United States Patent Application Publication US 2026/0058010 A1 - sequence listing, part 21

SEQ ID NO: 235 - DNA, 1184195 bp, Homo sapiens
  source 1..1184195: mol_type = genomic DNA
cagaatatattttatcttgatttccgacttgagggaaaataagttcagtgatttaagatctgccagttagcataaatattgtgaaagcaaaaaactgtgctaaaattttaagagaaaaaaagttaagtgtgttgcgttttcagaaagatttagctatggagtttttttttttgttttgttttgttttttttttttttggttttgttttgtcttgacctatgagtttgaagaagacaaagtggctctgtaaataagtcgacttcatttttaaagcgtttggaaaggttaaatgaggttgaatcttgagagtctttttggtggttaggagagggggaatttattaaagagaggaagacaatgtacctaatatgttgtgatgataatgacaaactcaaagatttaaacttcatgagtcattctggtcattcatatcatcatcaggaaaacatcttcatgtgtagcttcataggtgagctccacaaaactgtgcattaccttgtagtagtttgtgaataatgtgctgacctatgacacatagccacgtaagtgaataaacactattattattattattttgtcttggttttcattaaactatcttagtagtttcaggagctctgggtttcaacacacacttctgccagctgactttagtgcgtccattagcataacaaagtcaattaggcaaacctgaattttcacttttatcccgttcacagaacatcagtgtaaatggagacaggaagaagaaattggattgattctccacttgagaattatgttaacttggaagaaaatgttaagtctactatgtgagggcatctagtgagagggaaggaatcacctcccttcccccattatgtccctttatgcacctctgacccttgtgctctccttttcttgttgcttctgtggtctggttgttagctttcccgatcctccacacattagaaacctaagcataatgatttctgatcgaaggctatgagatatttgaaataaaaaaaggggaaattgttgagtctagaaccaaacctttaaaaattaagaactaccagtctgtaatgtgtgcctttagaaaaaaacaaagtcaaacagaaattaggcaactagttagagccgtgattgtgctctgccacccatgaactcccgtctatgactatttccactctggctttgtgtttcagtaggtcagggacacatattaagagcaacaattggaactgcgttatcctttacctccataaaaatacagcttaataacatgttaatgacttaaaattaccttgtctttctagattgtttattgatgtcatttcagatcggtataaaggatgtgaagtgaataagaaaataggtacgtttctttttctttttttcccctttctaccgactaggaagagatccagtccaggttttgcctttgactcggcctgtgaatttcggctgtgcaatgtgtagcacgtttctttctcccccctcctttctccttccctcttgcctccagtgactgtctccaggatttctctcttcctatttcaggaggactctcacaggctcccacagcctgtgttaagctgaggtttcccctagatctcgtatatccccaacacatacctccacgcacacacatccccaagaacctcgagctcacaccaacagacacacgcgcgcatacacactcgctctcgcttgtccatctccctcccgggggagccggcgcgcgctcccacctttgccgcacactccggcgagccgagcccgcagcgctccaggattctgcggctcggaactcggattgcagctctgaacccccatggtggttttttaaacacttcttttccttctcttcctcgttttgattgcaccgtttccatctgggggctagaggagcaaggcagcagccttcccagccagcccttgttggcttgccatcgtccatctggcttataaaagtttgctgagcgcagtccagagggctgcgctgctcgtcccctcggctggcagaagggggtgacgctgggcagcggcgaggagcgcgccgctgcctctggcgggctttcggcttgaggggcaaggtgaagagcgcaccggccgtggggtttaccgagctggatttgtatgttgcaccatgccttcttggatcggggctgtgattcttcccctcttggggctgctgctctccctccccgccggggcggatgtgaaggctcggagctgcggagaggtccgccaggcgtacggtgccaagggattcagcctggcggacatcccctaccaggagatcgcaggtaagcgcgggcgcgctgcaggggcaggctgcagccctcggctgccgcacgtcccactggccgcccggcgtccccttccttccccctgttgctgagttggtgctcactttctgccaccgctatgggactccgcgtctccgtgttgggcggcggatgctcctgcggcttcttcggcgggggaaggtgtgcgtctccgccgcctcattgtgtgcacacgcgggagcaccctggctcccgcctcccgctgctctcgcgcccttctaccccttagttgatggctcaggcccggctggccagggagcccgggtcactccggggcggctgcaaggcgcagacggagagccgagccgggcgctcactccgcgttctggttcgggcaaacttggaagaactgcgaccgcagtttgcccagcgccacagtctgagtggcgccttctccactcccgcccttgcgccggcaggggcggtggagagacgcggagggctcccccagcccctctctcccctatccgtccttcgggcgacagagcgcccggcgctcgggccgggggcgggcaaggctgggagggaccctcgccggggacctggcctctggacgccggcgtttcaaggctggtttggggacttcacgggctgcctgtttcagatgtggggcgggctttcccgttagggttcctcagtgcttccccagttgctgttggccactcagggcccggggacaccctgccacccggtctggagccggcctcgtctgccagcgaacagccaactttagcgggtggctcagctggggattcgggtccgggttcgggggccccgtgtcccccgcatgcccggccactggcattgctccaccaagagcttgagagcgcccaccctttctctcggcgccagtgtgtgtagcacttggtctccgacaacttgcgcggcagtctgggtgcttgttttccggctcttagctccaaccgaatccgagcttctctggggctctgtgaatgaaacgtgtcggggagagataatcctttggctgctaaagaacagaactgagagaggccgagggaggccaggagatgctgcgagggcgcgggctgctcaaaccgggcagctgaagtccttagtgacctcagatcgtcaagtcaaaacgctgaatttccaccagcctctgtctgctttttgccaaataactggtggatggatgaaaagcattttgcagatatcttagaacatcacagtttcgatacgttgaggaattactattttcttatgattttcaagctgtagaagtgagggtttttacttacactgaaatgaacacatttaaataaatttgagcattggcaaagggggaaaaaaagaggcgcaaattaccacgctcattatatagaaggagctttttcagttcagagccagacattccctttgctgagtctaagttagaatctgtggtgaattataagcctacttttctatccttgttacttcttccttcttttccagaactccttaatttgttaatcaatgaatagagagcgactgtccccacagctccttaagtttcttaactctccttctcctttgtctactgttatttcattctttttaattaattgataaggatcagcttcgcttttttttttccctccccaaatctcagggaattcaactttttaaaaggtttatagtatggatcacttcttctaggaactttttctcctttaatctgggctttttcaaacggtatcttttaagcacacaagatatttcccaacatgatttcagataagatgtctcaaagaagaaaatagttaggtatttttaaattgcttcggtattctttagaggataatgggactctcaggagactagagttcatcctcagcatcaggcacatctctttaatatcaaagtgaagattttcagtgtaaaacaatttctgtagtcaccatgaatgtttgttgagaacattcccaggggttcatgtaaattcttcggtggatatttaactaaagaggtttttgtttttgtttttggtttcctccccacctttttacaattacagtgtttgcttattagctatgaatttctaaaatgtgtgcacttttttttttttaaactcacctactttccatgagtaagggcatactgttaactttgctttaagccttgtgtcctttgatgctggtagacataatcaagatgcaggtcaccacagggtcagaggcacatttaataggaaaataatgaattgaaagataattgtgttttttaaggatatacttgttttttcaaaatcaactttacttaatgctacctattgctgttttaataatcacttaggaaatataccctgttgttacaggaacacactctatctctcctccctagttcttgatactgtttacatttaattatctagtgtaagtggttatcttttcttaaactcttttttatcctttgccttgattgggcatctaatggtttgcttgaagaatttcatgtgtcttcaatctgccagggcacataaatttaaaagaattgctgttcagacttcagattcatgacagctgtttctaattgaaagctatttgcaggtagcttgcttagtgaaataacttgagaagtaataaggacattatgtttcatcatgacattatcaaagttttactcagaactcacaattgtgaaatagtgttgcccttttctattctaggatagaatggaaacccaacagatgaggaagtatcacaggtaatatataaagttatgctttcagagaatgcttgggaaggaggaggccttcaaggggcagtttgcaccatcagttttcactcagcactgattttaaaccatggcaaggagatcagatagactatttatccttgtttgaaaaacttccaaaggagtagactcttgatcccctttcagcaatccattctaatatttagcaattcttgtggtatagaaatgtttccagatatctagccaaaagccttcacaatatgcttgcttattttttcttgttctatcctctgggaagatactgagcagtgaatcatcaggttctttgttaggagagttactctcatcaaaggtcagtgtgaaacattctagtctttcctcattcatcagaattatgacctaagtttccaatcctcctcatgttggtggctctaaacttctaaaggaactctaccactgaaaatagcacctgcttaaaactctgggaaattcagagaatgttgtttcaggcttactctgccactgttttatgccttgagtcttgctaggatcattaattataacactttgtagttaacagtgacttattggcctacatgatcatgttttcattacttatgtaatgtgacattatttaacaatctcttatatagaatttactatgtgcccatcacctacttaaaaattattacctttataatatcaccttactgaattcttccaataacttagtagatactacacattaaccccattttatagataaaaaggctgtgtgacaggaactttaataaacttacctaagggtgactctactagtaagtaatgaggctgcagttcaaacccaggcactctgactccagggtctatatacctaacttggctcactgccttacagtattaaacattcaccatttattttgaatgaatgcatgcaaaatctattctttcctcatttcatatatatatatatacgtatatatatatatacatatatatatatacgtatatatatatatatatacatatatatatatatatgtatatatatatatatatatatatatacgtatatatatatatatagtctggtattattaatcactatatacatatatgtatcccttccagttttgcatgctaaatacgtttctattttgttccaacgtctctaattctcaatatcactttgactttggattttgtattctcaggaattggccatgctaccaccattaaatggttcatgcgtttatgcctttttctgaacgttttctggcaagatatagttacataaaacacagaaactaaagtacatgtcttggtttctttcagtatactaggcctattgaaatattgggttagtccaacaaagctcatgctggaaagttattcatggggctagagggagtaagaacatttatctccacagattagaaaaaaaaatgtaactagctctgttttcagtatttattttgcaactttttctgtcccaggtattttgagagttgggttacagctggatattaaaaaagcactaaagtcttcatctatttgatattaatttatcaagtatttatctaaaaatctacagtttaaaaagattatttgcttgtttcaaaatacataatgtttccttttcactgatctttgcccagtgggcgtttcctttctctggaaacctgtctttctgtctgctcccccggcaaaccaactaatttaatacatttacaatttacacaacttttttttttttttccagtttccatggagatatcacattaacttaaatggaaaacagtgtttggtaactcttactctttaaagccacagtaaatatcgtagtttgagataaattgtttaatttctgtttatctgcctggttcaaagatttcttatttctttgccccctgtttagttagctgatttctttaaaagtttttggaaggacagtgtaagtcacaaatgagtgaggtgaacttcaatttttgtttttgtaatgattctacaagtcactagatttctaaaagaatcacattaattccaggtatcaaagcaatctaaaagttgggctattagaagcgtcacttgttaaactcttgatttgggcattaattttagagcgattgtgagttatcttagctgatttaattagaggataatatgtcatcattgggaacaagagttcatttgagttgactgatatacttttttacataaaatatctctcaactgcattgtatcttaataatagcttgtgagtagaaatataggccactgtcaaaattgatttaaaatgtacagcattatgttctttaagtattatggcataaagattgtgccataaattatgtaagaaagtgactagtgttcttttaaaattatggatgaaatttacgaacacttataaaacacaaaattattgagtagttctaacctaaaatgacctaacttcaatcactagttttgtatagaaatctgagtttagggtaaacattataataaattaattgctttaaaaatgattttaatcttttgatcttatattgaaacccacaaaaataacagtataagaacaacctttacccccacttaattcacatctttcaaattacttctagaaaggccagtaaggtgatttagatttatcttgccagtataaacagtgatttaatattcttttaaacttggtgattttatttctttacagactaaattctgctatgttaaattcttgagctggtacataatttaactttaaatattttcatagatttctccagtattattcaattttcaatgatatatatagtacagtttgaaagtactattgactccctgggatcatatatttgtaataaagggttccatagtggtgagacttgggtaaatattttaaaattctaataatcctggatgaaaatatctaagaatttttaataaccgtggatgaaaaatatgttttaaatgaatgtgccagttagtagccaaaaaaaaaaaaatcaaaatttggtttcacactttcacattattcaggttattgggtattttaataacccattctctctttcttctaggcatttttttcttcatgcaatgagtatttattgtatacctactatgggtaagtcattgtaccaggttctgggggtagaaccccagggaatttgaatcccagcagggaagcagaaattaaggacaccattcacaatgaattaattccaactgagataaatgcatagcactaaggacacctggcactgtgaaagcattttataggagcatttgatcaaatcagaggcagaataatgggttctgaagcatgggcgcccttcagtaaggaagcaggagtgtggaaggggcacaaatttcctgtgtggtgagaataccctgcaaacatgaggagggttccagtccctggggagactggtcagtgagtggggagaggggtgtgggagactggagaagggggcccaaaggtcaggttaatgacttacatagacggaaagaatccaaaggtaacccctgcttcttgaccgtaagttgttccctttttcacagcagacctgaacctttagttaaaaagcccagtagtgctaaagtcaagtttctacacatccagttgtttcaaatatagcacaaagaagcagatttttaaccatttagagcatgtttgccttgtgcactctgtaaaactgtacctgtctgctagccatatgtaagacaaccctggggtgatcaaagactcctagctgctgcagcccttagcagctctctggccctgaggctgtctaccctgttgctgatgacattgcctgggtcataatgcccttctcccctgggagttccttgaccttctgcccttttgggtggtggcccgtttgttagccctgcaaggtctcatgctgtgagggactttccttcacgtgcaaccaaagtgtcttccaaattaagctcactgtgtgctactgccacctgggggtcatgtcgtcctcccccacccccatcagtcctgacatccctcaaactcactacagtgactttggcctttagcctgagtcccttaacaagctgttgaataagtgttttaatcaggattggatacagttttgaaatattacattggttgctctatagagaaaggattgaggggaaaaaacagatacaggaaaaggaggagaggctagctaggactagagtggtgaccatggaaataggaaggattcaagaaatacttagtaggtgaaatggatcaaagttacttacttagcatctactatgtgactgacaatgaataaggactgggttgtgtgtttgtgtatgtgtgtgtgtgagagagagagagagagagagtgcaagagagagagagggaaggaagagagagaagagagaagtaagtgtcccagaaatgttaattgaattaccatggcaataaaaatactttagcatagtttttgtgtgcttcataatggagacaaaactcaatatcattaaaccagcagaagactattaacagtatcagtgtcactgagagaaagagatttctcaaataggatcagatgaattgctaactctcaaaagtgtagaactatcaaaatacatgtaatcagctacaattcactatgaaatttaagtcacagtactttctgctctgtcagtgaaaaaaaaacttcaaattttttaccctaatggagaattaatcaaattgtgccataatttccatcagtaatgatatttggtacttaagctactgacatagcattgttttaatctaagtaccaaatatcattactgattataataacaacgagaggttgaagctgaaaggaggaggcaaaatttaattggagccttgaaggatgggtagcatttgacaaagggccatgaaagaaggaggcagttagggagtaattaaatatgtgagcaaaatagggtgtgcagaggagagcacagaaaggaatctgatattgaatagatagggtgggattggatttttggagggccttgaaaattctaggctttatatgacagaaagtaggtcatcatctcaggttcttggcagagaggtgacatgacgaaagtattgttttggattaggcaagcagtatcacaggatggattagagaaaagatcattaaaggcccctggggagggaagaaggacagctaggagacacttaaattttagaggcttaggcaggagattgccaaggtctcagaggaggatgagaggagtgaagaaggggtgaataaggccatgagagaaggaagaaacaagattaaaagggaaaattttaaaaaattaaaaacttcactctgctgcttagaaattccaataaaagagtttagaggatgagctgttgaaactctcaactcaagtagtctgtgtcagttaagatacttttggcagcaggtcacagaaattcctgactcaactggcttacatagtcagggcaagccgttatttcacataacaagaagtcccagtgcagagtcttgcaggagtgagaaagctgtaagcttgcagtatcaacagggtgccaggttctctctgtcttttggctctcagatccttgttccaccagatcacctccaaataaacacaagatgatggctagagttccaggagctaaggcctcatgacaatgcctagaggcacagaaagaaatgatttcttcccacatgtctcttccttgatgaggcagacaactctcaacagtcccccagcagagatgcccacccttctcattttagaattgcctcctatgcctgtacctagaagggaaggcaaaggatatggtctttcagctggaccctcagatgggagctgatgatcatagcatggcttagctaatcttcattatccttttttttgttattcttttaaatttcaatagctttaggagtacaagtggttgttggttacatggatgaattatatagtagtgaattctgagcttttagcgtacctgtcacccaaatagtgttcattgaacccaagagcaaatttttcatccctcaccctcttcccaccctccctacttcttagtctccggtgtctattataccagggatccccaacccccaggccatggactggtaatggtgtgtggcctgttagtgactgggccatacagcaggaggtaacagtaggcaagtgaacatcactgcctgcgctctgcctcctgtcgaatcagcagcggcattagcttttcataggagcatgaaatctatcgtgaactgtgcatgcgagggatgtaggttgcgtgctcattatgagaatctaatgcctgatggtctgaggtgaaacagtttcatatccaaaccatccccaccaatccatggaaaaactgtcttttatgaaaccattccctggtgccaaaaaggttggggactgctgcattataccactctatgtgcccctgtgtatgcatacttatctcccacttattagtgaaaacgtggtatttggttttctattcctgagtcacttcatttaggataatggcctccaattccatccaagttactgcaaaagacatgatttcatttttttagggctgagtagtattccatagtatatatattccaaattctttttatccacttattgtttcatgggcacttaggtagaattccctgtttgcaattgtgagttgtgttgtgataaatatatgagtgtagttgtctttttgataaaatgacttctcttcctttgactagataaacccaatagtgggattgctggattgaatggtagatctacttttagtcctttgagaaatttccatgctgttttccgtagaagttgcactaatttacgttcccaccaacagtatataagcattccctcttcaccacatctacatcaacatctattgttttttgattttttaaataatggccattctgactaggataaggtggtatctcattgtagttttaattttcatttccatgataattagtaatgttaagcatttttttcacatttttgcccatttgtgtgtcttcttttgaaaaacgtctcttcatgtcatttacacactttttaatgcgattattcattttattcttgctgacttgtttgagatccttgtagattatagatattagtcctttgtcagatgcatagtttgcaaatcttttctttcattctgtagtttgtttactcttttgattatttcctttgctatgcagaagcttgctagattaattaagtctaacttatgtatttttgtttttatttcatttgcttttggagtcttagtcataaattctttgcctaggccaatgtccagaagagtttttcttaggtttcattctataattttaatggtttcaggtcttacaattaagtctttaattcatcttaagttattttttcatatggtgagagatagggatccagttttattcttgtgcatgtgactagacagttttctcaggaccatttgttgaatagggtgtactttccccagtgtatgtttttgtctgctttgtcaaagattcgttggttgtagggattaggctttatttctgggttctctattctgttctattggtctatgtgtctatttttacactattaccatgctatttgggctactatagcattgtagtataatttgaagttgggtgatgtgatgccttcagctttgttctttttgcttaggattgctttggctactcgggctctttgtggttccatatgaattttgggattgctttttctaactctgtgaaaaacgatattggtatattgatagaaattgcattgaatctgtagaatgcttttggcagtatggtcattttcacagtattgattcttccaatccataagcatggggtgtttttccatttgtttgtgtgatctacagtttctttcctcagcgttttgtagctctccttgtagagatctctcacatccttggttaaatatattccttatactttaaaataaaaattttattgttttgcagctattgtaaatgggatggaattcttgatttgattctaagcttggtcattattggtatatagcagtgccactgatttgcatgggttggccttgtaacctgagatattactgagttcatttacaaaatccagtagtcttttggaggagtctttagggtttttttaggtataggaacatatcattggcaaacatagtttgacttcctcttttctaactggaatgccttttatttctttcttttggatagttgctctggctaggacttccagtatgtgttcaatagaagtagtgaaagtgggcatccttgtcttgttccacttattaagggaaatgttcttatggggggatgctttcaacttttccccttcagtatgatgttcactgtgggtgtgtcatatatggcttttattattttgaagtatgctccttctatgcctagtttcttgggggttttttatcatgaagtgatgctgaattttattaaatgctttttcttcatctgctaaaatgaccatatagcttttgttattaattctgtttatgtggtgaattacatttgttgacttgcatatgttgaaccatccttgcattcctgaaatgaagcttagttgatcctggcaaattatccttttgttgtgctatagtatttggtttgctatgttttgttgaggacttttgcatctatgttcatcagagatctcagcccacagttttatttttttgtcgtgtctttcctgacttgggtatcagggtgatactggcttcataggatgagttaggatttcctccttctcaatcttttgaaatagttttggtaggattggtatcacttcttttaatgtctggtcacattcagcatgaacctagctggtcctgggcttcatgttgttggaaaattttttaaattactgatttgatctcactacttgttatttgtctgttcaggatttctatttctttctgattcaagcttggggttttgtgtttccagaaatttattcatttactctagattttctagtttgtgtgcttagagatgttcatagaacatcagatccatgaaaatggagacattacaactgataccacagaaatacaaaagatcatctcagatcattttttgtatttctgtggtatcagttgtaatgtttctatgtttatttctgattgagcttatttgaatcttctctattgttttcctggttaatctagctagtgatttatcaattttatcttttcgaagaaccaacttttcatttcattgatctttgtatttttttttcagtttcggttttgtttagttctggtctgatatttgttatttcttttctgctacctttgggtttggtttgtcttgtttttctagctccttgaggtgtgacattggttgtcaatttgtgatctttttgtcttttttgatgtagacatttagtgctataagctttcctgttagtactgcttttacagtatcccagagattttgataacttgtgtcactgtcatcattcattttgaaaaaattattaattttaatgttgattttgtcattgacctaaaagtccttcaggagcagataatttaatttccacatatttgtatagttttgggaatccctcttggaattgatttttaggtttattctgctgcagtctgagaagatgcctgatatgatttttctttttaaaaatttattggaacttgttttgtggcctattgtatggtctatcttggaaactattccatgtgcttatgacaagaatgtatattctctagtttggtgtagaatggtctgtaagcctctgttaggtccatttgtcctagaatccagtttatggccagtgttcctttgttgactttctgcctcaatgatctagctagtgttgtgttgaagtcccccactatgactgtattgctgtatttctcttttatggaatctattagtatttgttttacaaatccggaagctctggtgttaggtgtatgtttatttaaggttgttatctcttcttgttgagttgaccaactatcattatataatgaccttctatgtctttttattatttatttatttatttacttttgttgatttaatgtctgatttatctgatataagaatgaccagtgctgctcatttttggatgccatttgtgtggaatattttgttccactcctttaccttgagtctataagaatctttacaagttaagtgggtctcttgaaggcaacatatacttagattgtgcttattaaattaattccactaatcttatgttttaagtggagcatttagatcatttatattccaagttaatagtaatatattaaatactattccagtcatcatgttgattactacctagttgttttgtattctccatcatgttactattttataagcagtgagttttatacttttgaatgttttttatactgttgcgtatagaactttcattctgatgtttagaattcctttgagcatttcttataggtccagtctagtggtgacagattctctccgagtttgctttactgggagagaccttatttctccctcatttatgaaactaagttttgcaccatacaaaattcttggtgaccattactctgtttaagaagactaaagataggattccagtcccctctggcttgtgagttttttgctgggaagtctgccattagtctgacagattttcctttataagttttgatgcctttgtctcactagtcttagaattatttctttcatgttgactttagataacctgatgattacatgccttactgatattctttttgcaatgaatctcccagagttctttgagactcttgtgtctggatgtttaaatttctatcaagaccagacaagtttgcctcaaatattccctcaaataggttttccaaactttttactttttcttcttctccttcaggaatacctatgattatagggtttggatgttttagagaatcccatatttgttggagactgtattcatttcttttgattcttttttctttgtttttgttcggttgggtaaacccaaaagccttatatccaagctctgaaattatttcttttgcttggtctagtctcttggtaaaacttttcactgcattttgtaactccctaaatgagtctttcatttccagaagttctgtgttttgttttgttttgattttttgattttttaaaatctatctccttggaaaattttcattcatatcttgagttgttttcttgatttctttatgttggttttgacttcctcttggatctcattcagaaactttatgatcaatattttgaattctttatctggtatttccaagatttcattttggtttagatttattgctaaagagttaatgtgatcttttgagggcattgcaaaactctgcttttcatattgccagaattatttttctgcttccttctcatctggatagaattgtttcttcttattatttttgaattgagttttgactgaactgggttttttttttctccttgaggatgtaactataatgtgtatagtttatgattccctagctttgggtctgggtaatttcagttgcaaagactctgtgtaagttccttggttatacagaattttgtctgatggctttcttaggtcgtgcttttagtagcaatgtagcgggtgtgtgaatagggccactgtctcctgtggtgctggaatggcagaggtctcctgaagcttattttattcctcttgatgtgtacttttttccccagtattttttcagtgggttgaacaatttagtcttcagtttaattagaggtgttcatgggtaagaattggctgtggctaaggtaggtgggtatatgcaataccacaatggtgagcacacatcccagccctgatggatgtagcctagggagttcccatgaaatgcactgaggtcttcataggtgaaaggaagggtgctacctcagctctactacaagcctggcaaaaaacaacccaactccctatcatcctcctgtcccagtgttctggatattcagattagacaagcatctttccatcttcaggaatgctgacattttgtgtagagagggagcagggctctactcctcttgcaagcctgaccccagaggacacacatcctgtggggacacagtcaccccaaaatgctctataaagaccatctacagatgcacccaagccaagctcctacaggagacatcctggctgtgtctgcagcagtgggtgagggggagaagtcccctctacgtcacttcatgagtactggggctgctcgaccgctggggaagaattgtagtcttcccactcagctgagcactgtgcccatccctctgctgaaagagttgcagctgctcctagcccacaagcagcaagttcacggacacagaaaagcctgcactctgtttcttttgtcccacagagtgctcccttggtatgatgcactccccctttccctaggtatgacaatccctggggaacagaccaccgtgaatcctgctgttcctctgggtctagccaccatgtggggttgccacaatccaggttggtactgaggcatgtctacaagggatcctgtgatgtgaagacacaagggttggaagtccctgagcagaacaaagtctcgcaatgggtgcacactcagtatggcacctgctactacaggttgggaccgggggaacaggaagggaccctgttcgagatggtagcccaatataatgccctcgagaagtccccagatcgcagcccgctccagtacttgggctcatggtggcaaaaaagctctccttgagtttggataccagcagtctgctgcaagggctagagatgccaagagcattcccacctaccctttccacagaatactaagtctctcttgatttgatctctgcaagcttcttgattccttaatttttgtgtatgctgtagattcttccaatgaactttccaatgggctccaacaatctccccttaacattccatttaggctatggttattcacattcacctgtaattcgttttttttgttgttgttgttctgaagggaattgttcacccatgtctctagtcagccatctagaaaagccctctgatccctcaggccatggactggtctacaggacttgcagtagcttgggctttgctcttagctccagagacaagtgatatgggtggagctggaccaggctgacctgtcctctccggtctcccagtggcaggtgcgagcaccagctctgatgggggtggcaggggagtggtgtgggctctgtaggtctgtcttggtctgttcaggatttctaaataaggctgtttggtgtggtttggtggctttctcacttgccagctgtagcatcaatgtactgggcatgtgagcgggctcaagtcctcctgggtagctggggtggtgtggacaatggtgttagctgaggtcaaagaagagttttctccttcacaagcactgtgttactgtgtcagaagatgttgtaatgggctgtgctgggtgaagtcgggccaggaggtagcgcttgtaggagagaaccagctgctggggtggccatgggatgcttggcctgtgttattcaggggaagcactcagatgttgctggtgatgggcagggccgtggaactcctaaaaggccctgtctgtgttctgctgccaaggtgggtggaggggaaaagctgggtgggggctgggtcaggcagtcccgtgctttggctccctaggtgtgagtgcaagcaggagccctgatgggagtcagtgggaaattccctggccactggggtaatgtttcagagaggaatggaaccactttcgctgcataaaagagtccacgctgggagccgggcagcaggtggcaatgagacccacccagctcccatgcctttgacaaggcagatctcacacccacagacttctgctggcagaaagctgcaagggccggctgggtcccacagtgcaagactgccacacactgcaagacttcccccgcaagacagaaaccgcagctcttaggccacaccccttctagtttggcccacgaagcaggggcacctggctcctgtgtccatgccagaagcatgctttatgcttaagattaggttgcaaatctcgcttgggagcttctttcagcctgtggccatctcctgagttagctagcagattttcacgtgggcgtctgtgagttggattaggagtgtcttccttctgcccctcctggcgcctgggcgggcatgcaaagcacttctccatgctgctccttctccccactgctccccaaatcagctctagcacccggtagggttaaggagctcccccatggcctggattaagcggctccccagtgggaatgtgtatgaaggagacagtctctcccctttcacgctccaaagactgaagttttctgcctgactcacagtgcagcctgctgcctactgctcctttcacagtatccaaagtttctttcactttttctcttgagttcctctgttccttcttagataaaagtgcacagcgtgaatctctacatactattttgctcttttcaaaagggtgacgcacactaacaaagcctctaatctgccatcttcaaaaaaaaaacttcataatcttaataagaatcccaataaattgagtagtaattgagaaattgagagaaactgctgaggctgtctgaattaatgaggtatttggcattgtcactttagtccagtatttctcaaccctggccagtgatgaactgattaggtattaacaactgcctgggtgtggaggggacactgattcatagcatttggtaagttttgtggtataaatgttctcaccatgaacaatttcaagctaccaacagtttaacagccagttcacaaaattccttaaaatttaacagtcttctaggctataatgtggggcactgaaaattatctatacttgagcaccgttattcagttttggatactctgatttaattgatttgggaaagggcacagtccttccttcttctattcttctctccttccttccttcattctttccctcctttcataatttcctaatttagatgtgctcccaggattgagaatgagtgatgtagagcagtgagcttcctaaactttactatgcaccagaatcaccgaaaggcttgcaaaacacaaatggctgggctccacctcccagactttctgattcagtagtagttctggcctggagtctgtaatttgcgtttctaacaagttctcaggtgatgctgatgttgttgggtcaggtatcatactttgagtctctggggctcatactctggttgccattcattgtggttttaaatatggatttctttcagagtgggcagtcaccttttggataatggtttttgtattgttttttacattggttgtgggtgagaatctccacccacaaagtgtgttactgctacaagttgtactacttagatctccccgcatactttaaaaagtttacatgagcccctagggggactaaggaaaagagcagaatgggaccagagcagtctatcccatgtctgcctggaacaaaagaggccaacgattcttcttcctaagtagaatgggctctccacattgctttaaatgggaaatgggcaatggcatttcaggtttctttcaccacaggatcctatttttcttactaatatggtatgccttctgttggtacctatgactcttaattaatttttggtcctgttgagatttctggtcaagagaaattccatccccccaacctcctccttgagctgtttttcctatcctagcctctcaggcacagatctagccatttcccctgacttttagactgttatgcaaggcgactacatttagagctggtcactctgcattttgtacacattgaattaaagatatagcataatacattctgggcatgcacacctgcactctctaggctttactagttgcatgtttgctccttacatcatagttttaggtttatcaagcaattggcttcctctctttgtgcccccaggacagctgagattagcaggggccagtgcttctccacagaatttgaaggaactagaggtattttttttcttaagattgcagtgatgttgaggcaaccattttctttgcaaagaaaacaccttgaagtgttctaaaaaataataataataaataacttttatttactattttcttaatagatgagaataactcaaagtcactagcacttgtgaaatgaacttaacaaaagccactatgattgagaccatcctggcttacacggtgaaacctcgtctctactaaaaatacaaaaaaattagccggatgtggtggtgggcacctgtattcccagctactagggaggttgaggcaggaggtgaaccccagaggcggagcttgcagtgagccgagattgtgccactgcattcaggcctgggcggcagagcaagactgtctcaaaaaaaaaaaaaaaaaaaaaaaaaaaagccactatgcacacattataggtatttttaaatgacaggccttacattttttcctggaaaaaaaaaattgtcttttagctgtttgcttatcctaatttcccccccaaatctccatgattgggagtttttcaaacttaaaaaactgtgacatttaaaatttctggtaatttgttctcttttttcttttctttttttttttacagccaaatatttaacaaaaattttaagtataatgtaacattttattatgaaagaaacaactactggaaactaacttgcaacaaaaaccattctagtatctttgcagtacccttaggagatacctaattctttaaagagatgtttatattaatgaactgattttagaagacagaatttttgagatcgcttttagatacctacaagctatattaaaaatcaccaataaacaaattaagattatctttgacctctgttttctgttggcctaacaaatgtttttgcagagtttaggattgctattttgaaaatgggaacttgtaattctaaagtactaacaatctgaaaatgcaggattgctggacactcctatgtggtgatccattattagcttctcctccaactatatttgccttgaacttgagaatcttagtttactgttacttttacattatcaagtgctaatgtgtgaaaggattttattatgcttttactactcatttcatgatatggtatcttattcaatattctttcacagacttggggatattagatatcaggtcaagcattatgttaaaagcttaggccaatctttttatatgaccgcaataaagaatatattcatttcacttatattaccacatggccctcataaaaggtcagtttcaattgaatataaaataccttacaaatggcaaatcatatgtcatcaacaacacacctattatgaataatctattttcaattaccaccttcccctctttaaaatataacttggaaatgtcttagaatcactaagagatcttcattatgtattttgtgcaaaagacataaaaattgtatatttttctgttttagtcaacaaaatatgtatggagtaatcacacttaaatttcagttaaaacaagttaggtgcatcagatattcagaccaaaaaacatgaaattatattttttccattttgttgttaacacaaaatttaactaattaactgaatcagttactcggcctgggctattgatgatgagataatattacaagaagttatatgtatacacataagctggttgctgtgatttaggagtgccaatttattcttactcagaacatgcttagcagtgtatacaaaggtttccagtataacaaagggttgactatatatagaaatataggttagaatgagcttaattctatgtgataaccaaggttgatttttacaactggaataacaatttcctagaacagaaaaacctgtagcatatttaaaaatgagttttaacctttctagccatgattttaaaaagcacagtcttgacaaaactgcttagtcccctaaaggatatattttcaaaagtatgatcttatgtttgaaaaaaaaaaagtctaaaaatgttctgtactttaaaaggcccacaaaaagtgttttttttttttttcttttttaagtgagcctctgtcacaattactataatcaggaaaaatggaatacaaataagcaagagcaggctttttcccagtacgacacttcctacagctatcttcattcagggtgacaatttctattttaacctaattaagtataagagaggaccagtgtcctaagccataagcctgaaggttcctggaagtactgagctgctcattacctcccgggcactgctgggagccgctgcctgaaacttctggaaggtgccacggatgcccagaaggaggctctgctgcacagcgccagcctgtaggtgcaccaccttcaaccgcatttcagcctggttactgtggaattgattttcacggctcatgacagaagctgttttcagcccatgaaaaggaagtggctggagctgatacgcctaacacaaacagcaaattgctccatggctttcatagcattcgaggcctgttaccttaaggttctaatggccttttaacagtgtttccagctgagcagcagatgtaaaggatactgaacattgaaagcactgttcttttttcccctccctgaaagaatcattgtttacagacattgtaccaacaccatatcctaggacctattcactggcatgttagatttgaaaaactgaaacaaatttcagataaatagaaagtattatcagtgccataaacctaccaccttactgagctgtctgtcctatattaccacccatcaggaactgagatcactgaggacgtattttcaccattaataggggcccccatttggtaatatcgcatcagggaaaataattaatggaaccctgtgaaacctctgaaactccttatactttaaattgattgattttaatcctaaaaattgctgtgtatttctgaaaataacacatttaacatttagaattgtatcctttctgcctttggcttccctttctgttgttctgagtgtttagtttcgtcctctgttggtaagggttgtgaaatgtttgccttataggcagctatgggcttcctgcatagggaacatgaaggcctttaaaaggtttggtctgttgaaagaggttggcatttcagtcttgtggacttttgggaaaaaaatgttaaacataactgaagagcccttgtcaaattggaggtttttccattttaaaaactagagaaatagtatgtcttttgatttcactttggtccaagcagcgcctcatatttccactttccagtggtaactagcagaggtaagagaaaaacagccatgcgggtgagtcatcattcctcactccaggaaatggctcattttacaagcttttggaaggacctttgggaagttgtgagctgccaccatttttgaattgaaaatatacatatgttgcaactctgatgtaaaaggcatatagttcctttttcctccacctcttggtttctccttctccttctcttcttgctcatataacctgtgtagttttccgcaggagctcccacttgatgggtaacaggagaaaacattttagtctgatctagttgaaaatgtagtctgatcagttttgcctttctagctgacagtcaatcaagtgggatacttgctgtggtgcagtggctttgactcctggctcctctacttagccttttctgaacctctctgtgccttgatttttccatctgtaaacaggggtaatagcaattcctatctctcatcactgggattgtgctacacgaatgaacacttctaaagctcttagaatagtatctgacaagtacgaaaggctgtacacatgcttgtcaattaacacagagtagaggaggaaataaatctcttagattgcggagtgataaaggagtgactctttctcacgaaagaaaactgagggtcctagggctctgcccatttccagggccctgctggcctgcatatctgggggtggtatactttgtgatctgctcttattcaagttgggaaggaccgggtaactagtccccttcctttggtattcaccctcacattggcctttctgggcatgaagacctcctgagtcactggtttgtcactcaactggcctctggcccacctccagccttgatcacttggcatggggggaccatgacaagcctctggtttgcaactccgctgctttctgagttcttcccaggagggctctagggattgctgagccagaccagtgctacccaggtgaggggtgtagctctccctctgagtactctgtgccccaaagttgaccctaaagttggtccaggtagcccaccaggcaatctcttcacagaatcctaggcagaatttgggccccacatcctgcttccctttggcttcccagcattgaggcaaagctcagagagaaactgggtgtattagtttgttttcacactgctgataaagacatatccaagactgggcaatttacaaaagaaagaggtttaatgaactcacagttccacatggctggggaggcctcacaatcatggtggagggtgaaagacacgtctcacatggcagcagtcaagagaagagaatgagagccaagcgaaaggggtttgctcttataaaaccatcagatctcgtgagacttattcactaccacaaaacagtatggaggaaaccatccccatgattcagttatctcccactgggtccctctacaacctgagggaatgatgggagctacaattcaagatgagatttgggtggggacatagccaagccgtatcactgggtgacttggcaaaccattaccattcttccacctccttcctttgcacagaccccttgggcagggatgggtttgctatctctttctctttctgactggaattcaagcccttctgccacatttagagacttctgcctactaaagagatgatgtaacagaccctcatgcccttagaggtggaaacctataaggaaataaatgatttaaggagcaaacagaatggaatctgtttttaaagtatttgtaaaacattatacccattacataaacaatatgaaaactttcaaagaatctcttgagcatcaagtaaattggaaataatatgaactttttatttacataggaatctttgggattccttgcagatactactatatagaagcaaaaggacttaattccttgtctcatgcttgcaaattggttaaagttttcttaccttttcaactctggtttcctatctatacagagagaagtctcaaaataaatgttagttctccttttccccattccttcatgacatgtggtgataagaaatcttcctattccttgttcagcaacagggagaaaatgtaggaggctgtaatccccactctagacttagtcattttaatttctttttatgatgagctctgaagagagaagctctaatagaactttaaaaggtgatcttgaaatgctgttaaatgtcaaacagcaaatctttaaaaacatttactttctttttttggtcttctagttggaaatggcactgaaacatctctctcatctcatttttcacaggtttctgtttgttgtttttaccatcaggagaatgatctgtttgataagttgctttgattatttcgatttgttgaaaccagtggttctcaaacttgaatgtgcaccagaatcatccaaaagtcttattcaaacctaaacaggtgggccccaccctgagagtttttgattcagtagatctgagatggagcccaaattgtgtttctaacaagctcccaggaaatgcaggtgctggtgttctctggaccacactttgagaaccactgtcttaaaatttaagacttcaactatcagcagttcccttttttttccccccaggggtttgagaatacatttcaaacatggtttgacattcaataactcaaactatttttctaacttacttctaggcatttgccttctagaaatttccatctgataaaagatttttccaatacacttacttttcttcctgactaatttgatttgtgcacactcgtgacaatgctgatgtcttccctgcttttatccaccaagtaaaatccaaccctgttgaaagttctcttcaaactcccttcaaaatcccttttaaattcatttgccctaagcctcttggttcctgttttcacctttgccaagcttgtatagtgtttgtctctttattaggtaactaatccacttctactcttatattttcttgtatcatttaaaatgagggacttagtttttgtttctcaaattgcctctaagatgtcagaggtcattctaacacatatttttattccctggagcacagtgcttgaacacagtaggtactcaataaataattaaatactccttggttggaaatataaaggaattttttaaactttgcttttgttttgttttcttaccaggcataccttccagacaactttcagtaagatcaaaattaaattgtgtaatgtagagacacccttatattttctttgaaagattgcagctgataagctatattggcttaagccaatggaaatcagtttgcaaaagtatagaccaccagagtttattgtgtggaacatgcattttgttgcctttatattgttttaaagcataacatttctcccaatgaagctctgttttatataggtatatgtctatcaaaatgttttttcaaaacatggcatattttagctatcactgacagcaattttcaaatacctgaaaagattagagaagttaaacataaagagtactttaaatggcagtgacatttcctgggagataaagaagttgatatagaggaaatttagtttaaaaagtcaggcctagggataaagcaatcaaattgtactgccttttgaatgatctatttatgatggaggctttgaataataaattgtgcttctggaatgtacatagaaaccacttgtaattttgtggattccattttaagctgttgcctacttaggctctcttacctgtatcagtgcaggtcagaaacaatttatttttaatcacttgactaaaagaatagcatccacattttccctgcccttaaggtacacatagagcattgaagattgacttacaggtgattaatttcagtatgatgtggggagtggagggataaacctgctgggagcctaaaggaggacaggtgaaggtaaccatggctgggaggtgggggatgagaagaaaaaccgagtgctctgatacagtattaattgttctttgatataaatggatgaaccctaattatatagttaatatggaggctacattcctctcttcaatagaagatcatgccctatgaacctcctgagaaatgtcagctctggttttacaaaactgcattcattgatctttgttcaagtaaatggaacttgcatctgtccttaggaaatggtatataactaccaagggagagatttaatgtaaaattaatatacttcccatagtttgaataaaatttctagagaaatgttaggaaaataatcacatttatcacatatgattatccctgctacagatgtgggtttaaatggtgatcattctaccacttcatataccaacattcctttagcaaaaattagtatatgatcgtgctgtgtattttaaatattaggcatggtggctcacgcctataattcaagcatttgggaggccaaggttgaaggatcacttgaggccaggagtttgagactggcttgggcaacatggtaagaccctgtctctacaaaaaacaaaatcacagttagtcaggtgtggtggcatgtgcctgtagtcccagctaccgaagaggctgagaagaggatcacttgagcccaggagtttgaagttactgtgatctatgatcacaccactgcactccagcctgggtgacagactgagactctatctcttataaaaacaaaaatgaaaatgaaagatccatagatagtacagctaccatattaaagtgtgtatgcttgtgtacaaaatataaatatttttataaccaaagatgatactaatggtgtggctattttttgccataggtgactaaatagaacaattgtttcatgaatcccttttactaacttttcttaggtagatggtgcaaccagtggttccagatggagaaaaggtgaaaacaagttggcatttttttgtgcccttcaagatctgacttgctttattttttaatttttatgttttctagcacatttgaaagtgtgaacatttaaactcttattctgtttcagtttgcatatgaagatgttttaagtaagttctggaattatataaaaaaaaaatagagagagtgaggatgcccagatgacaacaagcagaaaaattcatcctttaaataaaagcctctattctcatttggaaagcaaaatgttctctcttaaaagtagcagctgtaaaaaaagcaggaaggcagaccacactaatctaagttgtaaaatatgttttggtagcttaacagagatttagctgtttctgagaaaaaaaatcaaatctaattttaaaatgaaggtatttaaaaccatggcacaagggagccttatttatggagctggtgggaagccaggatgtttccaatccgctgctcttacaggagcctgtgcctcgccagttctgtgctgcagtgggcagccaactgaagtgcatgagtcaaatgcacgaagcagcagacacctgtcctttcagaaggcaagaggtgatgaaatgagtgaattccagaactagtggaaagaaaacgtaatgattaccccagatttttttcttctatttatttatttttattgatgcataatagctgcacatagttttcgggtacgcatgataatttaatacattcataaaccttgtaaagatcaaatcagtgtacctgagatttccatcaccttaaagatttatcttctttttatactagaaccattcaaattcttctcttctagctattttgcagtatatattattataaaccatagtcaccatactgatctaacactgtctcttttttctatcacatttcagattttgtttttcttaaaattgatctgtacaaactaatatttctttctaaaaacaaggtgaaaagtgtttgggtttttttccccctacatggaattcaagctttgaacttgtgtgtttctttcaatgtcatacatactgatctttatagaatactgaaggtgctgtttcttttctaaatggtatgcctgatctttgaatgaaaggtatatcatggtgccaaaaaccttcaacatttagccttgggaccccattgcttgcacagtggacctattttctaatctggaaaatataagcctgtataccaagaatatattttttgaggctggggagtatatttttttggataagttcactaattaccataataaatagtaaatacaaattttcttgtgatctagtacataagctgggccctgtggctcatgcctgtaatctcagcattttgggaggccaaagttgatggattactggaggccaggagttcaagaccagcctggccaacatggagaaacctcatctatattaaaaatacaaaaattagctgggtgcagtggtgcacgcctgtagtcccaattgcaattgctagggaggctgaggtataagaaatgagaattgcttgagatgttgtaagttttaagcttgagcccaggaggcagagagtgtagtgagccgagattaccccactgtactccagcctgggcgacagagtgagactccatctcaaaaaaaaaaaaaaaaaaaagatctaatacatgaaacctaatttgctaaaacaattatgtttcctaatttctaaagaaaatttttctgtttcatttggaaaaaaataagacagaaagtaatgacagtatgattaaaagttgctttcctatggacaagagagatcgtcattttttttttccttaaaatgcgtttagtaggaataatttatctctcctcttacctcttaaaatattttacttaaatattttggagcagtaatcactttttaacttgttattacaaatatgaaatataaatatttggtatatttgattagtcttcccttagtctgtaaactctgaaaggcaggatcaggtctcatttatcctggcatagccctcagtgcctggctcagataagaaatttagtacacatataatgaacaatcaaatggtgacaatgacctaggctttcatttgattcctagaaaacaacctctatgtagatgttgactaagtcctgtatgttctctgttatgaaaaatactctgtatactactaggcatgtgctatcatccagtccttatattacggcttttcatttagattgatttttatggagcacatgaacttggccctcaaggagcttactctgtaggagaatacaaagtatgaggtgtcatcaaaggtatttcacattgagactgatgttgagatgtttctataccatgtcaattagcaatctagagggtaaaatttatactgagagcaggtacagctaatgttatacattattttgtccaacctaatctttagaaagatatcttccttgccttttgcctgtaactttgtgaaaaaaaaagcattgttaatgggctgggcatggtggcttaggcctctagtccaggtgatctgggaggctgaggtgggaggattgcttaaggctaggagttcgagaccaacctgggcaacatagtgagatcttttctctaccaaaaaaaaaattatcaggcatgatggtacatgcttgtagtcccagctactcaggaggctgacggggaggactgtttgagcacaggtggtggctggggctgcaataagctatgatcataccactgcacttaacctgggcaacagagcaagatcctgtctaaaaaaaaaatcattgttataaaaccattactttcactataagtggaatggtctacacttacctttcttaaaggataaaatagtctcttctcttttctctcgttatagcaaaagtatcagatgattggcctttccatatagttgaaggtcacccattaatgaaatgaaacagaatcaaggtaaactatggaaattacagtaagattgttaaaaagaggcttcatgttgcaacactgcatatatgttctgataaaacagaacatttattgagctctctctaggtcccacatattgttttaaactcttgtagtatctcgcataatccttacatcatcttttcatcataggcatcatcaccacattttacagatgaggaaactgaggcagagaggaaactggggcagagacaattcacttgtccaaggacacaggtgggaaagcagataagccaggcagattctaaagcccacatacaaaactactatctaggtgaattatatgatttcattttcaaaggagaaaattaactttttctagtattaaatttctcaaatcattgagctacataccctgtaatgcaattctttccaaatattaggaagcatttagctctcagttgttagagaaggtaagaagtagtaaaaaattattccggtattgagacacttctagaaacttccagtaagatcaagtgatagcttattagtttgatagacattttagtcattatgggtaaaactttgtagtattacattgtcattactcgggctgtttgcatctgaatgctcctcttcagtttgagaaattcccatcctcttgagtcttcatgggaggcagagcttccctaaagttacagaaactgaaaattccagatgcttgctttccccagctcctttgcatccaaggtgtgggtacatgacctacaatagaccaatgatatatgccagtctcagtctttgctttggctacttgtaacacaaagaagcagcaacagtgaagaactcattctgcaggtagcagtggccaaatggcactcatggaggtttcagcattgtcctcaagtatccagtgctgagggtcaggaatagggctctctgtgccataaagggctcactggctacaatggtgccctttatggatggccttggtggtttgatcttggctgtggtcttggctgatgcttcacttgttcctacttgtcttcctatcctagttcttcacccccaagtttctgtaaataaatcctttcctgtgtaaattagccataattagtttctgtggcatgtaactaagctctgaatggtgggatgtgaggggcagaagacaaacaatcttggttaaaaattacctccatgggggtgggtacaatggctcatgcctgtaatcctagcactttaggaggctgaggcaggaggattgcttgaagccaggagttcaacaccagcttaagcaacatagtgaggccccatctctacagaaaaaataaaaaataaaaaaaaattagcctggtgtgatgccatgtgcctgtagtcctagctacttgggaggcttagctgggaggatcccttgaacccagaagtttgaggcttcagggagctttgattgtaccagtgcactccagcctaggtgacagagtgagacactgtctcgaaaaatgaacaataacaaaaacaacaacaaagcttccatggtaacttctgaagctggaaaataatggtatgtatctggtgaatgcaaatgagtacaaagactgaagagagagaatcattttaacggtagggtagggttattgattacttttcgtgctgctttagaaacaagctccacttctctttacatttctttccactgtaatttctcattggatttctatgttcataatatgtgctcatgaaccacttaaaggcgaacccatgcctgatattctgttgagttctgttcaaaagggatccgattaagccatgcttcctcatgttagagcagctctatggaactttagggactgatacatggagttctgtggaagtgggtgagtcctaagagttgtgagctatcttaaaggtacaaaaagacaagcagaaagttaaatgggaatataatcagatttatgtagaagcttcctagtaataggcattcatttttttctcaggagtatagtaatatgatcctcatatagggtaaataatgtttttgtgctttattttgtatactgatatttctatttatcatctttcatcttttaagggactgtatcttcctttattctttatgagtcttttgtttgtttgcttgtttgtcttatttttcctgtgagttctttttccagtcagtttgttattatagggaactgaattatttctagggtaggagacatccatctcatcttaaccacagtcttagcaagtgaatatgctaaccttcagatagttgggttccagagtatacataggagtataaaatggataagctgattgtttccccatttaatgatttttttaataataatatagtcaatttcaatatcttgtgtggtagcatcattagaatggtattgcttcatcacagttactggatgtcatgatgactgtatatctcattattcatgttgtataacctcaaaagcactaagagaataaaatggaaattaaaacacatttttgaagttccagatttacttacttaatatggcttagttctaggcattgtacaaacatcaatgaaataaaagactttgtaatatgaaaccagagttaaatgaggaacaagaaagaaaattacaacatttgcaatgattttttactgtattctttcagtgaccaattcatatcgagaaaacaaaaagcagtataacttagtgatcacttatttgtttctacagaagagccttcattttagtaaatattaacttgtaaagggctttttattgaagagaaacaatctatgccaatgtattactaatttgagaattagctaagggttcagtgtttttagtttaaaatttggccatcacgtaaaaataattttattaataccattcattttgttaatagaattcactcagttggcctttcaactgagttctataaagagtatataaatttgtaaaatttggaaaagaatctcagtgtcaaactccataggaatttaagaataggaaactttgaaataaatatctttggctaacagacgctcctaggacttgttatcaccgcctcttaggtgaatgtctgttttaattgttcagattaaaaaactactcatgtcctcaatttataatattattgatcagtacctagaacattgttgtatttaaatcacattacaggacacactgccgaagcattatcctagatgggaaaatcaaaggcaagatttacaatttattttattatagacttggccaaactttggcttttgagtccttagtaccatttttcatagtgctactgggagaaattatgcaaactggtatcagattacccaacataccaggaatgtgcttagcaaacaggggcatcaaaaagcatttggaaaataataactctagcaatgtagtagtcatcatgataaaaattagaatttgattgtattttcttccttttttggtagttcagtattggtttaatactgaattataaaatgttatggtgggtgggaatacatgattatgtttttcatgcttagggtcagacacctttcctaaaactcttgatatgcaaattccttcactaataccagataatttttccaaaaggaaagtagtttcttattcctctagacccaaggacctagagatattaccatgtctttgctttcctttctgaagcctgtattgattattgaccatggtttgtttctcctacaaagccaattctatgagatatgggcagttagggagaagggagcttgaggggcacaggttttaagagggagagagaagtcaacaattgcagactggtcttttatggtaggaaacattgggatttttaaatcagttattccaaattcagtaagtacctgtttttagggttttctaagactttccatctttccaggaatgattcttcttaatgatgaatctctggaactaggagcattcactgtggtttgacaagaagttcagctctcaggaatagcacattttcctgtagtactgcatttacttgaaacagctgggtttacatgcagcataaatactgctttttaacattcgaaggcataagaagaatccagtatataagtgccacttttagataaatatattttgtaatttctttgcatggaataaaagagaaaacagtgtctattcctagggaaattgagtgtaaatccagcactccagaattccctgagaagtgtggttgctgtttgaagattttaagctcccccagggatgggtttatgcagtttcatttgtttcacatgtattttgcccagggttggacaaacagataagcttcttaactggtggatttaactgtctcttcacttttgaggtgtcaacctggtatatagtgaaaaatgttaaggataggcaaatgtcgttgggaataaacagataaataaagatgaggtaactttagactttctggcattattcacatttatctcctatctctccctctacacacacacacacacacacacacacacacacacacacacacttgcatatattatatattttgttaatgtgaagtcatttatgagagtgctgatgttggagtcaagatacataaattctgactacaagactatgacatattgatgagtatacaggaaatagcccctcaacccttagcttttcacacttttggacaaattcctagtccttcccactctccttgaaacattttcttggcttatacaacattcctcaagccaaaagtaacttttacctttctcaggtccagatgtcagggggttgtagtgacaattattttggaaataatggcttcagatgtcccctcagcagaggaaagaaggaagggttcccgaaaaaaaaagtgagctggagagagcaattttaaaaatgggtgaaagtgtggatcctttcacgccaagttacacttaagttttcttgcgaaattaaatgtgatgaaggcctacagtccattaaaacttgcacaattgacacattgtgacaaatccttccacatgtctcattttcaaaaatttatttatgaattggtaacacagaaatactcaagtgataaaaacggataggcctctttagaggctattcttataggcaattgtaattcttccagtgatagtttatagaaatatttatatttcatatgttaacctaaatggtatcataccctacacattgtaaagcagatgtttttctacttaatttatctggaaatgtattccatttcagtgtataaggacttgcctcagtttccccccacacccccaagttgcattttattccactgtacaaatatatcatacttgatttagctgctaccagtggactgggggaggttcccaaacactgctgggacctggaccccagctgatgtccaggctcttgatgccattgcaagaaggagttcagggatgagtcagtcagaaaatagtgagagtagagagatttattgccaagggaaaaggacacttaagaaaagggagtggaggcatactcaagagagagtcatacaaatggagtctgggtttgctagctttatgggtttttttaacaaaggagtgcaatattcgtgaaaattccagaaaaagggtggagatttcccagaactgtgatgctactaatttttacaacaaatatgggtgttctgggaactgtcatggcactggtgggtgtgtgattagtatgttaatgggcacataatgaagtcttaggggaaacctaggtcaaattcaacaccatgttggagccagttggtcttagccagcttggcccacaccgtgggttttcagggtcttattagctcatagcctctgtagctattttatctgtttccttttgctagtcatgtgaaattgctgcttggagttttttgttgttgttgttgttgtttgttttttgtttttttgttttttttgtttttttctgagatggaatttcgctcttgtcacccaggctagagtgcagtggcatgaccttggctgactgcaacctctgcctcgtgggttcaagtgattctcctccttcagcctcctaagtagctgggattacaggcgtgtgcctccactcccgggtaatttttgcatttttagtagagacaggatttcaccatgttgggcaggctgatctcgaactcctgacttcaggtgatccactggccttggcctcccaaagtgctgggattacaggcatgagccaccacgccccgccactgcctggagttttctgttctcctgcgaccactctgtattattcctatctgatagctagtggcctgcatatgtagggtgttttgtctttattacaaaccacactatagttaatgtccttacacgtgcatattttcatgaaagtgggaatgtatctctaaaagaaattcctggaagtataattgctgaggaaaaagttacaggcactgagcattttggttgacattgccacatatttctctctgttagttgtgccagtttactctcacaccagcagctcagaccactcagagtcacttgttgcacacctccaggggcctgtttacgtgacggtatctgtggatggagttgtgctgtgtctgtagctcctggcctatccctgcttgatgctagctcattgctcttctgctactggggcccttggtagtttttcaagggtctgggctttctaacttcagatggagtagatggatgaatgaaattctcagattccctcaggcatcctttctccttagggattatgcaccactgcagaaaatagctgtggtaaataaaagtagaaaaatgaactatgtgagtttaatggtacactgaaaacaaagtacagatatccctcggtatccatagggaattggtcccaggaccccctgtggctaccaaaatgcacagatgctctagtctcatatataaaatggcatagtatttgcatataacctatgtacattctcccatatactttatttatgaatttattattattttttgagacagattcttgctcttttgcccaggctggagtgcagtagcacaatcatagctccctgcagcctctaattcctgggctccagtgatcctcccacctcagcctcccactttgctaggacaacaggcacacactaccacagctggctaactttttaatttttcggtagaaacaaggtctcattatgttgcccagggttgaactccaatgatcttccctctttggccttccaaagtgctgagattataggtatgagccaccacacctggctatcctgtatactttaaatcatctctacattacttataatacctaatacagtgtaaatgctatataaatagttgttatattatattttaaaattgtattattttttatgattgtattatcttttaattttatttttttttccaaaggttttcacccctccatttgttgaatccaggatgtggaacccatggatagagggcttaccgtatttagaatagaatatgtgaatccctatatagtaagcccagtcttcattcaccaacactttttttataagaacttcataaaggatgataagaaaatcagattatgaaatttcttagaggtctactctctgagttcttaaatctggcctgctttattttagacgccaaacatatggccatagctcattatatgcttaaatgctgatgcatttcaaaaccattgatgctactctgtgaaggacctgagaggaaattatagtaagatatatggttagaaagatagaagctgtaaagtgaaattctgacctttagaaagagctgccataaactttaaagaaatcaatgtgtttgttaagagctatatttaagtttccttttatgtatttaatatatatcaacatatttgtatatattcaagttgagcatccctcaactgaaaatcggagatccaaaatgctccaaaactggaaacagtttgagtactcgcatgacaccataagtagagaattctacacatggcacattggatttccgatggctcagtatgcacaaccttcatttcatgcacaaaattattaaaagtcgtatttaaaattaccttcagcctgtgtgtatgaggtgtatgtgaaacataaatgaatttcatgtttagacttgtgtcccatccccaagatatctcattaagcatatgcaaatatttgaaaacctgaaaaaatctgaaatttgaaagacttctggtcccaagcatttcagataagggtactcagcttacactggtgtatgtgtatatgtctatttcaaatatacatgcaatgagatgccagagccagcttttattggcccacaagagccaactgttacatttttaggcatttttcttttatttcttttttttcttttttttcttttttttttcagttttgcccaggttggcctcgaacgcatagccttgcctccttatgcgcaaggacaactggcaggagccaccgcagctctcaatttttaggcatttttcaaggagttgtcctgatattcataggttgaaatcaaccaaggtaagagtgtttatataacagaaattggcaaatacttaaaaccagggcgttacttcctggaaagctgattgttaccagcctaccactgtacatgtgtgtgtatagtctatactctatctaaaaatgaagacaccttcagaaatattaaaactaatttgtttttgtttacactgtctgatttccaataagcaggaaaaagtagtaattagttatgttttacttttttcaccaaagccttattaatgcattacagattaattttacctaccacaagtgtatcatgatagtttctaattaaattgtgtataatttctggttgtgaattttttatgctaaaacaatctcttacaaataatacattatagacgcactaacagcatgatttgctaatattcatggtggtagctcatgaccttaacaggacaaaggtcatcaaatatttgatcataggaatcaagaaaactggcagaaatgatgctgtaaagttaagaaacatgtgcttcaaaagtagaaggaggttgagttcgtaagacccagtacgttcattaatacaaaggaggaaagggaataaatactgttaggattcatatggccaatatttaattgcctccatacagcatagcctatgttttaagtgctttgagtttgaatatagaagctgagggcattcgggcatgaatattttgtaatatgcatatacagtttgtattaaggttttctctcaatagaataaggaagaatgactgttattcagttaaatatagttaatgttaataacttgatcagaatttaaggagattaaatgtcagagttaagggcctgttggtaaatatcacttatagaaggcagaaataatagagaattacatatagccttgtggcttttgccactctataagtagtaaaatgtgatttattattctgtattctgtcgtgtatttctcaagaggcacaaagaaatgatgacttagaattcctgcataaaaatgaactgagagactcatgctttctggatatgaaagagattataaacagactataacacctactttagtttattgcttactgatctataaagaaaataacttgtaaaacccaaattaagcaggagtaatgatagttcactaatagcaaaagccagctgtgctggtttcctttaatagtgatattgtagtattaaaatgtggagatttacatgttagatctttgtaaatataaagaagatttacttcttaggatcttgatgaattcaagtttgttacaacctatttcatttaaggataaaaatttttagaaatgcaattttctcttaaatgaaaatttaagattggactaatgtagatcttccaaaaagatatgcaccaatgccattaaaagcattggagctgctaccttgatctcttggatcactcattcatcgttttccacaggagagggtttttttttttaatttactatagactttaattcttcataaagaaattcacgccagttttcctctttatatattggaagattcacgtgaaattacagctaaattttcactttgcatgctagaagcttcaattcctttgcccttacctttgatgttttatttctaaatgatcttatataagtgaaggccctttatgattataaagagctacacaaatgtgtgatattattttcagtcactataaattttctcaatgcctaatttcagaattgtaggactaagatattttatatggtctttggttttgggaaacaatgccaaatattgttgaagtattatctactgctttccatccaaagccaatatgacctggccaaagtaacaggctattagatcatatacctacattttcatcttcttgtagaaacaagagattttatatttttttagggacagatgaaaaagaaaaaatatgcttagatgggcagacatgtagttcttggggaaaaaatgtgtcattatagctctctctgtagagatatatgttgctgagcatgttttccatacttgttaagactgaatactgttttacttgatttactcattcattgtaaccttagtaactagccccttaatatagattgcatccattttgatctaaaaataaatgattatatttgcatagttttctcagggctcatttttagcattttatgtatcataaaaatattttaaagtgggttatatgcatttctatagggaaaaaataattatgagaggattatttgcaaaatagatttatctgttgttgaacatacactgagacactcttaggcagttggtatgtagtgcttggaagggagactttccaatgccatttggtcaagactggtcccgcctgtatgtttacaggtgtgttgatctgtaacgaaaactctgcccagttcatatagacaatctacaaagtagagattatagaaacaagtcttgaataatctccatttagaatattaaaatatgaatatttgagtacccggtcagtgagaaaagctacagaatgtgagctatggctttcagggcctgagaatacagcaatgaatctgcaagtacagttcctgcctgcagggaaatgaagtgtggaagagagtcgatggagcctttcttgctacgtaaagaccaattctcggtgaatttaggaaagagagtagtggaatgcctcctctaagcacttgactaattttatgttagtgctgtttgctgcatctatattggacttctttggaagcacgtgcatatgagcttccttgataagattgcctaagggaagccagagaggtcttttcagaatgtcattcccctggttcagacaggggaatgcctctagaaagacatcattgctcaaccttccactcccaatctgctgaccacaagcccctgtgtcccaagacccacttctatgctctcttctctgcctccctttccttcaacaagttccctgctgtgcattcttcgaatttagctcaagcctcctgttctctaggaatcctgactggagctttgccaaggtcagaacctcttttcttccccttttaaagtcttttctggggagcattagttacgattgtcatactcacacttagttgaaacaaataaggtaacaattattaaatttacaaaatatataaaataaattaatgttttatcattgaaacagagaagaatcaggttaaaggtaggtttggaaagacatagttgacctagagagaagatgcgtttgtctagcaatattattttcagagtgattatgtactcgatgaaaagtttggaggcatgtcacaagtttggaaataatctaatgttgtattgacttttcagggttctattagtgaaaacacaatcaaactaaattttgatatattaagacagatgtataaagcctataatttttgaaatcagtatccacctgacatttatctctcattccatcagctgaacatttggatattgatttctaattttgtatttatcaatataatgaatattgactgccataatgatgtctcaatgacatttcgcagccctagagtaacttacaaataaagaagtagattaaggcctttgcaattctattgtcctgtgtttcttattgtaattctgtctgcctttctcccaccttcttttgctttttctgtttcaattaataacttgctagaagatcaacagaagccaactgtatagaaatatttgtggtaggccggacacggtggctcacgcctgtaatcccagcactttgggaggccaaggtgggcggatcacgaggtcaggagatcaagactatcctggctagcacggtgaaaccccatctctactaaaaataccaaaaaaaaaaaaaaaaaaaattaacggggtgtggaggcgtgaacctgggaggcagagcttgcaatgagcctagattgcgtcactgcactccagcctgggcgacagagcaagactccatctcaaaaaaaaaaaaaaaaaaaaaaggaaatatgtgtggtatgatatgagtaagtttaaaagagatatgagtaagtttaaaagtccccacacagctgggcatggtggttcttgcctggagtcccagtctttgggaggctgaggattgcttgagctcaggaattccagcacagcctgggcagcatagtaagactatggctctcaaaaaaaaaattagccaggcatggtggcatgagcctggagtcacagctacttgggaggctcaattgggaggattgcttgaggccagcagttcagggttgcagtgagctgtgattatgtcactaatctccagcctgggtgataaagtgagaccttttctccttaaaaaaaaaaaaaaggccccacatcacctaagattttatgttgcttctcctcaattaaacatggtatgtttctcactttttctgaggtttaaatatatgagtttatgtctatatatacatgtacataattacatatgtatatctttatagatatgtagataatatttatataatatcaagggttcagagagtgtgcattataaagcaatgtgctttttactccacttaacagagaattaaacattgttttatttctgtatacctggaacatgttttctcctcttctctgtaaattgcttccaaatccaaaatgcttttgaattctacttatagttctcactgaagcatttccagaatcccttatttagaagcctcttctgccttttataccaggctcccatacattttatatctctgtcctagcattttcacattttccttcttttaaaatttatgtttattttcctcaaaaaaaaaaaaaaaaagctccaagtggacagtccccccagtgtgatatgtaaacttttgagctttacagagtcaacaacaacactgcctctccttcacttccatagtttagcaccagatgagaagcagtatagaaaagacagataaatggagattaaagtgacagatggagattaaagctgattgtaggtctgtatttagatcttaggttgaaagggctttctgccaatttccagcagaatttaatagacttgcacccgtagttaatggtacatctggacaatcagaagcctctgctgtgttccttctgggcaaaaagcagaagagaaagcaaattcattcaaggggcagggagtgtttgtgttgcaagcctggttcctacttctaataatcattcctccttccctaggtagaattgactgacagagcaggagagaggcctggcgtattctaacagaaatgtctctacaggaaactttagggctagggaaagaaagttctactccactgtagacctcctatctcttgacctttatcttctgctttgtgtaattttaactcaactacgttacaaaacattggtttaatgatcaaatcttctatttgtctccctgtgctgcctgccctcccccaagacagtgaaggtattgtctggaaaacactgaagaaaaacttttcattctgaaacaactaaggtttaaggcaaaagtattcagacatctttgactatcaaaattacatcctagataaaccctaagacagttgataaaatgcaggcgtgacatgtatcagatacagctttagagtatagatgtactcttacacagagatctaaaagtaaaacatatgactggaaagggactgtataagtaaataatacaaccatgcttagaattcttgaggacgatcaagtgagtggtttaaatatttactttactcagctttttcttgagcttgagcaaatcagtaatactatttattagatacagaagtgaattttgcctggaatatcatagaatttggaaagaaatatgaataaaatatcccaaccttttgagtattccaagtgatgttttataatgagaaatagtaatacttggtagacaaagaactgattttcctttcatagactgttaaaatttaattatagtgcttttcagaataaagaaccaagacttgctgactaccatggcagaccattaattaactcctttagttacttacagtaatcataactaataaactatatgacattacatcttaagttttatagattctggagtcaagtttgttttgtgctgtgctgatgggattatagtcatttattgaatatcaagaggtagttaatttttttttcgcttgtattagggaaaaataagctgtagttttttacttgatatgaattcttcatttgataatggggtaaattggattgtataaactagaccactttggggcatattatttctgaaatgtgactagtttgaataagataattatagttcagtggtaattttaatgacttagctttgggaatatgtaagttgtctttagatggcagatttaccaaatgaataagataaacaaaactaaaactggttagggatttaaccatgatatataaatttattttacattctaacttgccttttaaaaattccaatgatagtcacttcatttgagaaataatttatagaccaatgaatgtgaaaaattttaagcactgaaatttgagaggaaattgaagaatgaggtgattcattgtctgtgtgtatatatatatatatatatatatatataacttagaaaatgtttgaatggtatgattagaatggagtcatagtgttttgcaaaacatggattgttgaaatacaaaaatccaggttttgaagattattaaataattcatgtaagatatcagagtggagctccaacaatttgttctactcttatttggatataatgtctgtgagtgattccgtaaatgaggtcataaatattcatctattttatcactggcaatagctgagaatctctgaacagacagtggaccacagaattcagaccctctatgcctgtgcctatccattgacttatccaactttatttccatgttagataccagcagttcagaaacatttgtatttcccagctgcggaaacagaattatgcttctttctattaggatttgaaaaagctggtatttgattatccataaaatgcagtaaggtggtaggttttattctcattaaaaatgtaggacaaaggaaaaataggcagtgtttaaggaaaagaagttttttacccttctcaacaaaagctgaaatgcaacaaaagccgaaatgacctgaaatgcaacctgtaaagtcaaatgtgaatacactgtatgctagaaaggcaaattgtctcctgaggactaggaaaaaccttttagttctctctgacatctaggaatatgttttccaagtgatttttacaaaaagatagtctgaatcttatctaaatcatatctaggtaaaaagaattgcactttaagagagatattataaacattgaacacataatccattagtattatttcagttgtaataatagacatacaatcctttgctgatagaactcgtttgcctaaaagttaaaaaaagtactgtacataggctgggcgcggtggctcaagcctgtaatcccagcactttgggaggccgaggtgggcggatcacaaggtcaggagatcgagaccattctggctaacacggtgaaaccccgtctctactaaaaatacaaaaaattagccgggcgtggtggtgggcgcctgtagtcccagctactcgggaggctgaggcaggagaatggcatgaacccgggaggcggagcttgcagtgaaccgagattgcgccactgcactccagcctgggcgacagagcgagactccgtctcaaaaaacaaacaaacaaacaagtactgtacatgtcaaagctttactgtttatcatagaaattttaggtattttgatgttgtggatttctgtgcatgatactccctttaagatcaactgattgattgcctcatttttattttttatttttttattttatttttattttttgagacagagtctcactctgttgcctaggctggagtgtggtggtgcgatctcggctcactgcaacctctgcctcccaggttcaagcaattctgtgcctcagcgtcctgagtagctgggattacaggcacgtaccaccatgcccagctaatttttgtatttttagtagagatggggtttcaccatgttggccaggctggtcttgaactcctgacctcgtgatccacccgccatggctgggattacaggcgtgagcccctgcacctggctgattgcctcattttttaagggaaatgagttaagctgtcttcctacagcttaagaaatttaaaactttaaaagcgagtggtaaaaagcagtcacctacagatgtattcattaattcattcaatcattatctactaaacatgaactacatttagggtattgtattatggagtccctaaggtattcattttggtgagcaatgccacataaacaatgagtaatgtgtcattgggggaatgtggtaggttcattcggaaagtgatatgaatgatttattgcccccttaagtgtcctttaagtatcaatacaaaaataattcttctactatcaatatattgaattttatgctataatgaatgaatttcaaaagaggacatgatcctttgccacatagagatttcattctaaaacatttacagtattgctatattcattcacttatttatatattacatggttactacatactaggcattttgtcaggtatcttaaatcagatgtcatatacagagctccaaaaggagactattttcatctgaaaaactattacaaatagaacctgccttcagataattcaagttatttattaggattttctcccttagaagtggtctatgattttatgctatcagaatggtttaatgtatgaaatatcgctttcgtaaatatagtgcaaaaaatatatccactgtttttgaaattttctgaatgagtgttaatggacatgtatattagtaatacatcaaattctaattttgatataatttcctgtgctttcaaagtgctttaacatagtaatgttatatcacaaattagggtcttacctaagattgcataaaagactaaggaaaaaatgttatataaagaattagaaaggatttatggttagacactggaaagactgaatcacaagattacatatcaaaaattgtgagtgcatattccagcctactgaatttaagtacctgggcaaaatattgagaaatattacaggtcctgcttccaaactgggaaagcctcttctgattatagactaacctgtctgccagctctgacatgttgcaaacagatgctgtaactcattgaaactcttttcatcttattgggggaagactgttttaaagttcctaatggttatttttctaaaaatggttcatttaagatcttaattgggtacatgaaatggctttttctgtcattgatcctagtacgtgcacatgtgcaacatgtacaaaaagatccttttgttttagaccttacggaattttatgaggcatggaaatgaggagaagagagcctcattcttcagaatactatgtttgactagatagtaaagagggatctcaacagacctcaaacataatgtaagtgggagcacaggaatcaattagtatattagttttctggagctgccatagtaaaattccacaggctagatggcttaggggacagaaattaatttccttgtagtttcagagatcaaggtataggcagctttggtatcatctgaggcctccctccttggcctgcagatggctgccttctccctgtcctcaatggggtttctcctgtgtgtgcatccttggtgtctgtgtatccaaacttcttctcataaggatgtcagtcaggttcaattagaacacaccctcatgtcctcatcttaacctaatctcttctttaaaggtcctatctctaaatacagtcacattctcagataatgggggtagggcttcaacatatgaattttggagggatgcagtttcgcccataacaggataatttttttgttttgttttgttttgagacaagagtctggctctgtcgcccaggctggagtgcggcggcgcgatctcggctcatggcaagctctgcctcccgggttcacgccattctcctgcctcagcctcccgagtagctgggactacaggcgcccgccaccatgcccggctaattttttgtatttttagtagagacagggtttcaccgtgttagccaggatggtttcgatctcctgacctcgtgatccactcgcctcggcctcccaaagggctgggattacaggcgtgagccaccgcgcccagcgagaatttttaagtattttatgttcagtgaccagggtaaaaccatttacccttagtcaagcaagggtcaaggaaaggcatggagccccaagtggagggaagatgaaaaagaaagtccggaaggttctccctggtcacagactgagctctgggcttaaacttgctcattttggggttttgaaaaagtcaaatgaactaacaaggatcccttttaactctgatgtgaagtactttgagtttagtcaggagcacacaacttaagaaatggcagaagctctggccttttcagagagagagagagagagagagagagagagagagagagtgtgtgtgtgtgtgtgtgtgtgtgtgtgtgtatgtgtgtgatagaggcacaggagaagaatccctgtgaatggatggaagacatgcagtcccggccacatgtgtgcctgggtgtgaaggcagccttgaagaggaacaaatatagggtgggggtaaggcagctcttgggactcggggacggaggtggtgcatggagccaccaggcagtggcttgctgctggcttttatccctttcctcgggagtacctgggatgtgtggggcctgaggcctggtgaaaacctcactccctgggcagggattctgtaaataacagccgcagtccatcctggagcttcttagatgtgtggttcttgtttctttccagcttacttcttttcctgctattctcttaggtgacttgcaaagaatttctattttctgtccatttaatctgccttgtacaaataaaaccctgtatttcgacagtttttgaggcagtagagattataatcaatgcttctaaaatagtcagaaaccagaaatggagtcattacatggtttctttgggagaaagggaaccccagggagggaaatttttcctcaaaattgtctccctgttacatttcctataagccctctgccgattcctaaatgaatcattttcttcttattattacattacttatgatgtgttgcaaataattttaccgtgggtgaaggaatttacgaacacaccactgaggtgaaaagaaagtcctgggtttagtgctggttttacaagtaatttagactggtgaccattactcaatcaatttaatctccctctgtctcagcatcacatctataaaacgatgaagacaatatctgccaacctaattaagagttgtaaggatcaagtgaaataatgtcaaggaaagtgctttataaattgccagacactatacaaatagaaatgacgaatgctggtacagaaatgtgagattatattggaggcattaaaagcttataataaatgctttcacttcacaaaaatcttgtctcatcagactaaaccaaggtgtctttattataacccaattcctcaaatccccatctgagcttgaatttgaaatgctcagagatttctagagactgaaaaatgagtttaagctactctgtggacaaagacagtggttaaactgtttttttcacattcaatttagtaattaactttttaaaaatagaataattgttcaactagacataactttattgtggtaaatatcttttcaatgtactataagttttctaagggcaggaatcacatttctttagaagctgagtgcctagaactcaatagaagctttttgaataaatgatgggagaaattttcttttattgaaattaagggtttttatgtttgctttcctaccataaaattagagtttagtcccttgatgctgtgcccttctctttttaatcatactccttattttgaaaataagtgtatattatatcccagtgaattaaatatcttttccctctttactatagttcctggaaagagtatattgatactgtaataatatttgttttcaacagtaataatttgctggtaaaccttatatttgcgttactggctttacagtttatcttgcaaaacatttgcttcaggatcttattattttagacaacaagtgctgcagagggaaatagaacataaatacctagttccagatagaaagtgccacagtgattcagtttcattgtgtgagctgaatagagatttttttttaaaaagtttgttttatttttaattgtggtaacaaatacgtaacattaaatttgccatcttaaccatttttaagtgtacagttcgatactattaggtatatccgcattgttgtacagctgacctccagaatttcatcttgcacagctgaaactctacgcccattaaacatggattctccctttttcttgcatccagcccttggcaaccacctttctcctttctgtttccataattttgactacttgaaatatatcataaagaaatattcttataagacattttgatacattagtttttatttgtgtttatcattgtcatgtggatcatttaattgctaagtgacgttttcattcttattcacgtacaataaaaccagttaattcttttttaattagtgtcatgaattttgcctgggtaaggataaacagtaaaataataaagcaaagaaaaatattttatataatttgtaaagcagtgggtatatttaggatacaaagtagcagatatatagagtgaacacatctagggctataggtaataaagttgtattatatgcgggattcatgctaaatgagtagattttagctactcttgccacaaaaacaaaaaatgggtaactatgtgagatgatggatatgtaaatttacttcactgtagtaacctttttactgtctataggtatcccataacatcatgttgtatacctaaaatatatgcaacacttattttaaaaaatcataatagatttatgttaaaaaagacgaaatatgatatatttttaaagctgcctattattaaggactcactttaatttgaaaaccttttctttctaagataattatggaaaccatgcttttactcttgggaagagaatggtcttgctagaatatctgtggttctcaaacttgagtgtgcatcagaatcacctggaagcttctgacacagattgccagacctcactgccagaactgctcattcaggtggttttgggaggagcctgaaggagcatgtggattcaattcccatgtgatgttgaagctctgggctctggggccccattttgagaactattgttctggagttaacagatattctagaagacagtaagaaatggtttgtcgagatatgtacattgggtttggaaacgctatacaataatcacctcttagggattcagtgccatttgcatatgaaagatttgttcagattctgccataaaatagcttcttgaaccttatttccaatatttactaaatttacttgattgcagaactatctttttacataacattgattgccttttgagggatactcatattctagtgtgcatattttgaaaaatatcctctaggttaaagaattaggaaagtatcaagatattagtgccacagtagaaaatataggtttatacatttcatggcgaggcagggcagtgcatagctcatctctcttctttagctttaaaatcagtatgatataactctacttactagtgtggacagaaatgtaaaggatgtgttaactaaagtactttaatttctttagagattgaaaatacaaaaacattgttgaaaactttgcttactttacagtattcgttttgaggtttgtaattggaaagttctgtcatagtatcttaaatgaattgtttgggttttgattgtgatctgtgtaaatttcacaataataaacacacccaaactggttaaatgtacgaacatagtgggaaatgcctagcctgacgaaagaattgagaggtataaggatacctgcttggtctgtgttagagggtaatgccaagtcagtgatgaaaaacatctgcaggtattctgtacttcacctgaaggcattttttcaccctgtgtgacatgagaattctgcacatggttatctcctcccagagtcctcaggttcacatgtggggggggccagaccaaagcttactttctaggtactgtaaagatagtctctcacttcctgtttctgatgccaagaacagtgatagatctacattaattccccaaataaattcagctttgcaaacatcccattctttgtatacatatggtaatctcctttctgtaggtttttacccaaggttttttttatccagagccaaataatgtacctggtcagcggggctccacagagtttctacaaagatgcaaactaagcaaagtaaagaatgttgatgcattgcattacatgtcattcatactttcctcactttaagaaaaattcttacattatatatggatatggcacttttgaatacagcttatgtatctgtgaaaatagtagatataaaataaatatcagttgaagcatggtgttttcacattgtgcatgcctaacaaggtatagaccattcatggccagaaaccaagcaggccagataagggaatgccctacatagggcgctttacttatatgtatatgctggcgctaattttttaaggcagtggtccccagtcattttggcacccagggaccagtttcatggaaggtaatttttctgtggacagggccggggatgcggctagtttcaggattaaagtgttccacctcagatcattaggtattagattctcataaggagtccacagcctagatcccttgcatgcccggttcacaacagggttcgtgctcctatgagaatctaatgccagctggcagaggtcaggctgtaatgctcgtcccttgctcacctccggctgtgtggcccagttcctaataggcaacggactggtgctggtctgaggtccaagggttggggacccctgttttaaagcatttaaaaatgttaagaatggcttaataatgtgtccaaagtcattcagcttcagcattcaaatgctgagaacaagatttgaatcaggatttggcctccagattctactatatctgccacaatagcacttactacttggcagaaggactagaatggtgcttacctggataacagattaaagttgcttttttgttgttgttttttaaacagcaacatttatttatttatttctcacaattctggaggctgggaagtccaagatgaagacactggcagatgcggtgtctagtgagggccagcttcctgattcatagattgccatcatcttgctggagaacaaattaaagcattgaaagaagaataaatgctcctgtacaatcaaagggaatgattaaaatatgtaagaaacccaaataattaactgtaatagctcagtgttaaataaatatcaatgttactttgtaaagaatgttactttaaatgaaaagaatggctgggcgcagtggcttacacctgtaatcccagcactttcggaggccaaggcaggtggattacctgaggtcaggagttcaaaaccagcctgaccaacctggtgaaaccctgtctgtgccaaagatacaaaaaaaattagccaagcatggtggtgggcacctataatcccagctacttgggaggctgaggcaggagaattgccagatctgggaggcggaggttgtggtaagccacgatcatgccagtgtactccagcgtgggcgacggagtgagactccatctcaaaaaacaaaacaaaaaagaaagaacagaactccaatatgcacctattctgaaaccactgaattaggaaaattttgaattcaatacgtagacaaaaaagatgaacattttctcacatttgcttttgagtttatttcttgacgctgatggaaaggtaaaaaggtgaggtgcgaaggaccaatttagcctctcattttcattcttttatatgtgtactgataaagccaccctcagtgaaatcgaattaagtaatatttactgcaaagttgttttttggattgaacatttactaggaagtttttacagcctgtgaacataacatccaagttatattatttcttgggaccaaatgttttgaagtgaatatttttacattgtttttcataggacaatcagaatttgaaagctttgtgaagtagaaggtgaaagaaacaaaaattcctttcccttgagctgaagaggcaaacctaagactattttgctaaaattgtccttagcatggagaaaggtccttatctaagggggatccatcagaataacttggggaaaattttcataccaaaccccctcatcctctcttcccagattctgaattccctaccccgcccccagtatgatttgaacctaggaagagagcaggtatgtattgtatgaaaaattccttaatttcccttcctcccaacttagctgatctaatgaattacagtgaaaaaaaaaaaagcttcttgccaattttttctccacttactctccttaaatataagaagaacagagcaaatagggagattaatttttactaaaatgaaggaatattttagttttaaagttatgcataaacacagtttaaataatcaaatattttacacagaaaaatcactgccatcatccctttctcccccttccatggagataatcactttaagctcttttacatggttcttttggtaattaattcaaatctctaaacaatatgctcattttgctacattttgattttaaattttttaaataatcaaatattttacacagaaaaatcactgccatcatccctttctcccccttccatggagataatcactttaagctcttttacatggttcttttggtaattaattcaaatctctaaacaatatgctcattttgctacattttgattttaaattttttaaataatcaaatattttacacagaaaaatcactgccatcatccctttctcccccttccatggagataatcactttaagctcttttacatggttcttttggtaattaattcaaatctctaaacaatatgctcattttgctacattttgattttaaattttttagtattacctattgattgcctgctatggtggaagagggtttagcactgctcatccctgcttgaacagccttcccatctgctctattttttcctatcttatttatctttagttagccttgaacaaggaatgattctttttttctcatagaaaagagctaaaaacaggggaagttgaaattttgcggttgagaaaaacaaaatgttaaggtaaggtcgcataggatggcctcaattttctcaagaaaataagagatgagttcatctgggcttgagctactacgggctgctatcagtaattcattagggagttaacagatgaatatcagcattgctgcagaccagtgagaaatgaccaacagatctaaactcatatgacaaatggtctcacccaaacacagtggatttgcttggaatggtggcatgccaattttcattattggcaaagaacaaaacacccaaaagccaaaagggacaggtacacagtttggtgaatgtgagaaattacatgtgcggtctctgtttagttacacgtaataacagactacagatcacttttgtgaataatcccaaactgcaagtaatacaaaaagttaaaacatttaacttgagaccttatatatgttttcatatatttggatagatatgggtgctgttattacattgattcacatcctgatatttctcttcacttgattaatatttaattggcattcctaaaccccagaaacaacttatggagtggaggggtacataactcagcaaacaggttacagaaagcccacttacaatttcacattccttttggaaaactcacaaagtggataatctaagatgtggacaatctagaattgacaactgtacataaaggctcacattctctcagggcaacacttgtattgaatgttgttagtttactgtgctagctttgtttatacatttgtaataagttgggcttcttgcagatggcagattaaaacatatagtttattgcttttttaagcaagtgcatctgattttatatttaaaagggtgtagttttatggtgcaagaaaataacaggggcactgagttggagtatcagaagaaaatcccttagggcacggcagcagtgcagttagcaataattttaattggacacccaaactaagccagcctcaaatcatgtgtatgtcttacaaatagggtttattatgtcctttaagtccttttagaggcttatgaagatttataccagtagttagttgctttgtctgagctacagagaatatttaatagttttatcaggattaatgaacagaaatgtctcaacaaatgaaattctttagtatgtacactgtagtcatttggtattctctttattcacttgcagtattgtcagtaataggagacactgtttgatatgagcccttgtatttcatatatttgtcagatttttgtgaagctgtttatatagagcatttgtgtagcacttttctaacctcagacatgcccaagaatcatatagtaaatatgtacatctcaaaactgatttaccatataacaaagacattcactccatttatggcaacaaatattcagtgagtgcctactgtgtgccaagtgctggagacacagtgttgatcaaaacagcttagtggaattgatggcttagataagtacaataataatgaacataatgtactagtagatatttcaatcttgctgccccagggaagtagaggataatgtagagtctttatcagaggttgttatatggtctgggaaatgagaaaaggccttcttggcaaagtaatatctttactgagctgaaggttcaaatagaagttaactaagtaaagagggagtagaaggagaagcttcaaggcacagggagtaagagctgcagaggctcttaggctgaatgtggtaaaggcccctttgaggaaatgaatggaagccaccaggattgggactggattacatagtgggacagggagaggtttaagtccagtgagttccggtgagttctgttatgcacgttagtctttatccctgcaataatgcgtgctgttgtaaagaattttgaaacttaaaatatacagagaggaaagtacaaattagtggtaatcctattacccatagcttcttcattttaagacactgtatttttaattaatgaattgtctttcagttatataaagattaaaaagtaaatatgcagacagatactcttttcttgaactgggaaaaatgacaatctttactaccatgccatattactaatatctggaataggaagtaatttcgtaagccaagcaatgatgtctgtgcacactgtagtcctagtttgtcaattagactacaaatcatggttttgtttatatacagtatttaacatattttaccttgttttcaaaaagccaatttgtataatttttccccacccaaaattgagaaattatttttcctgggatgtatgtgtatgtatatactgctgtgtgtgtgtgtgtgtgtgtgtgtgtgtgtgtgtgtgtgtgtgtgtatgtgtttggtggcagtcaaacaacagtaataataattatatctttttaaaacccaggttaaatagttagcaaaactcaggatagctttttctaagtcatgtcaaaaagtatgaaaattataggaacaaaattgctgcttttgaagacatttaaaaattgtggaagtatagatattcttatatagaagttgtcaatattaatgtatactacataaaatcaaacttacatgagaaatacagatttaaaaatttaggagataataggcatatttaaaggtattagaatttgtcagcctgttgagagaagaaacctggaacaccgacaggaagtgttttcagagttgtgccaaatctacaattagtccttgtgttagtctgttcccatgctgctaataaagacatacctgagactgcgtaatttacaaaggaaggaggtttaattgactcacagttccacatagctggggaggcctcaggaaacttacaaccctggcagaaggcaccttttcatggggcggcaggagagagaatgagtgcccagtgaagagggaagcctcttataaaaccatcagatctcatgagaactaactcactatcacaagaacaggatgggaaaagctgcccccacgattcagtgatctccacctgttcggtcccatgacatgtgaggattataggaactataattcaagatcagtccttatgctaacaacctaggcacaaaggatccagttgaattagtgagctcagagaagcagtcccaatgtaatttgaggcagaacaaagctcagaggatatggggagctggagggcctggtattcagatgctgttaatgactctaacacatcttgtaaaatgtctttcctaccaagttgaagaaggatgtatcagtctgtgatttaaacactcctctataatttgtgttctgataatttttacattattaaaaacagaagtttggcattctgtgcatcttatcagagtggtctgaccgttgactccttgtagggaaggggtggcagaggtcactaagttttatatcccaaggaaacagcccaagaagacagctttacttaccagccttctgagcacttagggagtggcggtgaaagtgaagtcattctgaattttttgtccctccttttctcccttccttctttcctgatgctgttagtgtttagtgatacaagttgaacattggcattcccaaatctgatacctgaaatgctctaaaattccaagctttttgagttcccacatgacaccacaagtggaaaattgttagatatagacacctttgctttccggtggttcaatatacacaaacgttgtttcatgcacaaattattaaaaaatagtgtataaaattaccttcagactatgtgtatgaggcatatttgaaacataagtgaatttcatgtttaaacttgggtctgacccccaccaagatatctcattatgtatatgcaaatattacaaaatctgaacatgtctgaaaccttgggtccacattctggtcccaagcatttcagataaggggtgttcaatctgcataagataaaagagcctactgagaaatttaattatagcttcataagaatgtctagatcatttaaaaagtcgccaatgagaacagaggattccataagagtgttttggccaaaagtgagccaatgacatagaggcagggacattggccaccaaggagtgtgaaaagctggttctggggtgaggccgattctcgcaggaggcctccccgcctggtgtctgttctcacccaggaattggccagcaactcatccagatctttctttactcttggaaatgccagtgtggttcttatgttactgggcatgcctttgtttcatcttgaagaacttatcatcacttcaacccattcaaaagatatgagagaggagatgtgcaattgagtaatgattaggaatgtagcacatattgcatttataaaacacatcaaactatttttcaaatattagaaggtgtaattgagtctgcaacacattttactaaagatatttcctttaatttttaaaaccatgtgtattacggggggaaatgagatccatatgtttgattcttgcacagttaaatgatatattaaaggattatttgcaaatgcgttagaagtttattgtcaattaaaataatctacttttaaggaaattatgttttttttaaaggttttttttgttgtaatttgaattttggtccaatatccctgtagggaaaactgtttaataatagcaagtggatatcatcaacgtgatttgctcctaagcaatctcttgatttcattgcattttgttaaactgtttttaagcttcatcggttttgattttaagtaaaatttactaatgtcccttttaataaaatgtatctgtgaattatctagagtgagctgtttagtttcagaggttctcatattccaatcctttgaaactacaaagtaatacttataaaattgaaataattaaaaataattagcagaaactctccaaaataagacaatcaaaaccatctgggcttgaatatattaaaaaatgttgatcaaggaaaacaccttagaaatctgtgtgttatcttgtaatttcaagtgtggatattttaaatcctgaagaaatgggatcaaataagctctcagtagtgttctatatcaactgtaatttaacacatctgtccagaggagtagtgaataatgaattacactaatcaatccagataaaagagatttaattaacattaacatctcctcaaagtctttaaaactttcttttttttctttctgttttggtattcagggattctaatctaagggtcctttgatgatgaaagaatatttttaagagagattttattaaaaggatttgtgatatttagatgtatgtaagatgaaacttttctccaattttttaaaaaggcacttcataaaacataaaaaggctgtcagtattatcacttcgtattactttataaaaatatctggaaataaaagttgttgtatagggaataaacatgctttgccaaattttaattaatatgtattcaaaaaattgatgatgtctggataaccaatgagtgaccttcagtgctttgtagggcaacctgcaggcatggaggctcagcaataaatacttagcccactaaggtgattgaaggggttacaggtgttttctgcaaagtggttaaaccacttcatgagtaaatgtaaatcttcatacagacctgtatagggcagtctacaaccacaggccagttacagtaattaaacaagcaactgaagagttatgacaatgagagcagtgaaatgagaatctgaatatggtcttttcactatgtggggaagtcctcattttggtctaagatggaagcaagagaagagaccagggttaagagtgacaattgccacagatagggatgttatactgacccataactggattttatcggtaccacattgaagccttagtgtaactaatactgatgactttattaatgctaacactgcaacgtctttaatgcacaccagcaggagacaaggggagaaccctaacctgggagtcagaatgcctgactcatattctttcccaactcatttaatctgccttcactccagtactccaattcgtaaaatgcaaatagtagtatgtgccctagggctcaaaagactttcaaaacgtgagaatagagatagatattctggaaatatgatgtcctcaaattgattattttttggtacactgaaagacaatcaaaaagtgaaacaaaagaggcatttaaaagtagtattaggaaaagtgtcgatctctttttaagaaaaataatgcaatgcagaacaatttatatgtagtatataaatatttatatgccgaaattactaacataaatatatgtatatcttcatatccacttatagacaaagatatatgtatagggaaaaatttaccctatgttgataaaacttgtatgcacagttcagcctttcagtttagaggatcaaatcctaccaagagggtcaggcacattttattttattttgagccgtttgagatgtatgtgaattccaatttatataaaaggatttgtttattgtatacagctgtcattgctttcaggagtaaaaggtgagcagcacagtctgaaaataaatattgaaacttcttttacattttctgaattgttgtactggtcatgagaggctgatattgcatggaaaaatagctcctcttttgaaaaatactattttatggcacatggactcacagagtaaagagacattttctgttagtatcatcacttgaacatgcacttagcaagaaactgaatatggtagaatttctttactcagttcaaaggattactcatttttgtttcatagtgtttggtctgggctctaaatgaagcaaggaggttaatgtaacgagactcttggtaatcatgcagaaccatttgctgacttgataaggttcaggtgcaaatttgtcaggtcatctagatgcttgccccaataaagaatgtttgcctgtgacttttttaaaccatgaaaaggacaaatgcaggcagtggctgctgggttaaaatcaaataaaaataacacaaatgaacaagagaatagagggatgatattgtacgctggggcatatcaattaagaactatttccacaatctgtccagaaattcagtgataatatgcactatacaactatccacccttacgttcttatttttctttttagcaatgagggaaaaaatggagacaataaaacgagtaaattggttcattttattgtaatcaaacaatttggttgaagtctcaatgatactcactctgcagttactcaggaaattttatacaaataatgatctttgatgtatctgattttcaaagcaacatagattagaggaatccccttcccctccccattactggaattatcatcacccagcctgactaaatgcatttcacaccagacttctgtgcataaagatatactgcccactgctgtgaaaattagtataactttgatgagtcatttgttccaacctttgaaaaaaatgaaacttctgagaaccatactgatctcatgataactttatctctatacatgatatggtcctagatttgtaacttggccatgaagaatccatttgctaaggagaataaaatgtatttaaggaaatataaaaagacatgcataaaaacagccattatgttaaaaagtgtattcaatattatggttagagcctggttaatgtctcataatggtgatttttaaatgccttctgcatattttttgtaaccagaattactaattacgactgatcatttgggcaaagaaactcatcaaagcatcgtctattaggaaaattaattaggcatctctacttaaaattagacaaatgatggctgatatgaatgctgacatagtatggcattgatgtaggttgaagcaggcagactgacatttagaccaagggattataaactcttttatagttaatagtttgataatttctctctcatccacatcttgatggccagacctctgcttagaaatttgacccataagtttgttatttttgccttagtgctggcagtatgagtcaagtgacagagccaccatctcttctcaaacaatgccattgtctcttgatttcaaccagattttctatatttaagtgtggttatacagtgctgttttgccttgctttacccactgtatcgtagacactgctactcagtgggtttctgaacaaaacaaagaggctaaaactggggtttctcaaagttcagtgtaaaaattcaacctcttcgttatgtatttcttctacttggagccttagaataatttacttattttattatagtttaagtagctcatttcttcagccagtaatttttgtcattaggtaacagcaaattatactagccatcgcctgagtattttaatcccatttgcattttaccaggtctgttcacctgtcatttcatttttgaaatataattcctatagcaatcatattaaaaatgaactaatgttccatcattttctggtcaagttaaaacgagtctgagcaaacatatccagcatataccttcggaggaacaacattaatagagtgtgtagtggtatttcccatccagagagattttaacttggaaaagacatcacttcttttaatttctctcctgttcagcgtttgtatattcaatatgcaaattagaacaaaagccattataaaaattttcagtgttacatacaaaaatataaaagttaaaatgctgtaaatatttaatgctacagtatagcatttaatagttttgttcaatttaagaatctcagttttaccagtttggtttaggaattctaatttgtaaatgagggttgacagtatttcacaatgataaataaatcaaaaggcaaattcatcattgataagccattttgtagcaaacttgccagtggttaactaatagctttattgtatttcaaagtttgtgtgtttgtttattttatgaagagggtggaaattgagatgtcacgtgcccttaaaatgcagaaaataatgcaaggctttccagtgaatgtgtaacttctacctcatgtgaatacttttaggaagattcatgatttggtgccctatgcaagtggcaactcatcttcagtggaaagatctttaagggagagatgctttcttttgagaattgagaggaattctagactttttaagaaatgaaaaggtaaaataataagagtatctcaaaatatatacaacaacccaaacaagaaaatgttaacaattatatggtactcttataaatatgctcacaaatatttaaagaaagcgtttccatgacttggcagatattacatgcttgtatatatgtatgtcaagcagaataaacatattatggaataaatgggttgtgaaatttacacagagtgtattgatgtgtttgtaatacaagtaaatctgcttttctgtagttaatttacccttagtgattaaaatacacaattactttaaatgtataattaccatcattcttttccctatagtaagaaacttaagataattttatacccatattcatttagtattcaaatatacagtatttaaatctttagtaggtgtcaatttctacaattaaccatgtaccagaagattttctagaaaacaatttgaaatgggttgataaaagtttatttgcctcattgactagcaggcctggctaaagacactcatatttaaaccttatctttggccagtgtgtctagttatattccaggtagaagttcctttttttaatttttattttttgagacaggttctcattctgtcactcagactggagtgcagtggtgcaatcatggctcagccttgacctccagggctcaagccatcctcccacctccatctcccaagtagctggaactacaggcacacaccaccatctcgggctaatttttttctatttgtagggacagggtttcatcatgttgcccaggctggtcagaagttcctttcgtgagtagctgtagtgtctcggtattagggggaaaaaaacaattaaaaattatgcctctttacctaacttaaaaaaataacctcatatagtgtttgggaaaccttttctgaattcaataaaaattcagaaaacaaaaatctaatttctataggagatttccttttccagaaattaatctgatatctgtttttgttagttagaactatgttacttgaaacgttgttacatttttaaagattgtttagtacttagggtgagttgttgagtgtgagtagaaattaaacttgtgatttgtgaaaatgtaagattatctgagtaatggacaatttctaatattcattttttaaagtagctaactctgccttattatccccttccacttttcccctggatgggtgatttatataatggaatgcagtgtcattgattgtgtttgaaggaggcacactaaatagcacactattgttatcttgaaaatttgttttattttgtttttgcccattttttaaatcatttcattctatttttgcccatgtctcttgtaatgagctacacatgtaattagtacacagagttctggtgatgtattcattcatgagtttaggaagtgagattttcagcttcatttccttctaagcatctcaactaggagcacaggggagacaaaaaagattgcaacctctttatacagctgtgtttgacccttggcactctattcttacttcaattatcgtccattgtaatgatcccttttcatgtctagcttaaccctaaactgtgagttccttgagaataagaactttgtcacagtgatgttttaatatattctcaccacacaataaaggatctaagtgtgtgctcaataaatgggtatttgttgggaaatttaaacaagaaatagtgaattattttctattcactatttggataccctttctccaaagatattttttatttgagagtatcttatttacagtaaaaatcacaaatattatatatacaatttagttttgacaaatgtctacatttctatcctttacccaggccttcaataagaaaataataataatttttttcccaaagacataatctggttatttggttatttggctgaaacaatgaatatctttgatacatggattctttaataatgaatctgttatttagtatttagtcattacttcataatgattccaaatttcctaataacttcttcccccactatccacccccatcccctgcccctgcaaaaaagacaaaacaaatctccctttccctcaggaagtagttgatttggtgcctgtgtaaggtagttcatgcatttccttcttctgttttgttaccataccgtatgcttggcactcagtacaccaagaaaacaaagaggcattgcctgtctcgaagttgcttagagtctagtgggggagataatgcacacctgcatccatagcacagcaatgtgtacataataacaaagatctgaaaaccccagtcagttttctatgttttgtcctctttcacacccttccgagagttctatctaatgtaactatgaatggtcactgtgtctttatttttggcccagactcttctcaatgcttcagcctcacgtatccaactacctactgattattctgcttggacatacatcagccattttaaatttggcctgagttgaactcattctctttctctcccacattcattgtgttttcatttgttttcttgaaatctcctggttaagtcagttcaggttgctatagaaaaaaattttaggtctggcgtggtgtcttgtgcctgtaatcccagaatgttgggaagcctaggtgggcagattgcttgagcctcaggagttcgagaccagccagggtgattatgaggaaactctgtctctgcaaaaaaaaaaaaaaaaaaaaaaaatacaaatactagctgggcattgtggcggtgtgcctgtagtcccagtagtcaggaggctgaggctgaagatcacctgagtcaagagaggttgaggatgcagcagacagtggtcgtgccattgcacagaagctggggtggtacagggagaccctgtctcaaaaaaaaaaaaaaaaaaaaaaagagaaaaaagaaagaaagaaaaagaacaaaagaatcctatagactaggtggcttaaacaacaaactgatttctcacagttctggaggctggaagtctgagatcaggaggccagaagagatcgaaaaagcaagttctctgtctgtctctgtggtttttgttttgttttgttttgttttttgtttgtttgtgtgtgtgtgtttttgagacagagtctggagtgcagtggcgcgatctcggctcactgcaagcttcgcctcccaggttcacaccattctcctgcctcagcctcccaagtagctgggactataggcgcctgctactgcgctcgggtaatttttttgtatttttagtagagacggggtttcactgtgttagccaggatggtctcgatctcctgaccttgtgatccgcccaccttggggctcctgtgtcatccaggagggagtgcagtgggtgccatgtcggctcactgcaacctatgcctcctgggttcaagccattctcatgtctcagcctccagtgtagctgggattacaggcgtgtgccatcatggccggctaatttttttttgtatttttggtagagatggagttttaccatgttggccaggctcgtcttgaactcctgggctcaagtgctgggattacaggcgtgagccacctctccaggcccaagctccctttttgtaatggcactcactccatttatgggaggtctaccctcatgacctgattatgtcccaaaggtcctcctacctcttaaaacagggggatttcaacatatgagttttgtggggaaggaaatattcagcctgtagcacttctctttccatttctatttcaattaatggcactgccttttgcacaaattaggagcctgagagtcctatttgacttttctctatttctcacatctaatttatgatgtagtctagtatattctacctctggaattcctctgaaaccctccttcttccctctagtaccactgtcactgtctttgtttaggttttcatcttcattttctctcagttggattatggcagtaggctcctaaagaatctttctaccttaatttatcttcttttaatacaatgtcctacataggtgcctgggattgtttgtcacatgctgtgccttgactggattaaactcgtaattactcacccatgcctctttctttcctgcctcctgtacctgatgttctttctgcttgagactctgtaatctggacatgacaaaagccttccatatccgtacctctctcaagggactgcctttcccaccttccctactacagtggctggcacagctccatgtcccatagtctccattccttctcctctacctccagaaacaactaactggactatgtgggggcatctgagccatgaggaggcattacataggcattaaaagatgagctgggccaatcaagttccctttctcttgggactctccatgcagacatctcattctgagagaacaatgattcatggcacagtgacttagtcagtgaatgcctcaggtacgaggtggaggtggacccttcaggagtcgtagccatccaaagttatgaggaggttcaaacatggaggagcagccatgaggtagacaaaagataggccaaatacagggtcagaaatccacttgacagtgaggagggatggttggaaacaactgaagagaagctgagtcacgtgtaggctggagttagacagtgagcccctgtccttcagcttcagccgccagatgcgttccttgaggctgtgtgatttggcttttcttgggttcccttgtatgtgcatccttatattaatcccttactctaccctcctaccttaaaattaattcagtgagactgttcttcacagctaaaagaacctaagtaaaatgtttcttctaggccgggagttcaagaccagccttggcactatgtttggttctatgtttagtgagactccatctctgcaacacacactgtggcctaccatgggggagggcatcaggataaatagctaatgcatgtggggcttaatacccaggtgatgggttgatagatgcagtacaccaccatggcacacatctacctgtgtagcaaacctgcacatgtatcccagaacttaaaatttaatttaattcttaaaaatgcaaaataaaaaaagaaattagctgagtgtgttagcgtgcacctgtggtcccagctacttgggaggctgaggcaggagtattgagtaagcccaggagtttgaggctgcagtgagtagtgagtgcaccactgggcaacagagcaagaccctgtctttaacagaacaaaaagtaaaaagtaaaaaacaaaatgattttccccaccctccccccttcacctcagctaaaatgtcacctcctccagaaattccttatcatttggttgtaccactgtttgctgcttaccactgtcttaagttgtaattacgtatggtcttctctctaggtagggaacaacttgagactaaagacgttgtgactcacatgagtttgtataaatgaagaaaatgcgatgggacataagtagggtgtggggagagccttcatggggagatcatacttgacctgagtcttcccaaaagcaatccctctgtcttacaatacagctgtcaccacaattggcttgataaaatatggagtaacaaatgttaggttcacctagactaatcttcccttcctatacatgaagtacttggaggaaagagaaagcagtaaagtgattttccagagtcacacattctgacataggcagtgccagaccaaaaatcagtcacttcccataaggtggatatgcacactcacagaaagaacgagcctatgcatagaatgatctcattttcaagtaaaataatttttgagatacaaacatcagcaatgacaaccacaccccattccccagatcttgcatgtacccagatttattataaatattttgtgataaactctaatcagagcccagtccctcagtttaatagtcatagatttcaggattttgcttctgcttatcttcccaggctttcttcctcttctgtcttcttatggactggagaagtccttgtccttctagcaggcaggcacaccactttgggtttctgtttgtttttgtgtttttcagacagggtcccactctgtcacccaggttggagtgcagtggtgccatcacagctcactgtagccttgacttcctgggcttaagcgatcctcccatctcagcctcaccagtaactgggagtactagcacatgccactaggcccacctaatattttcttttttcttttttttttttatagggatgggggtctccctatctttcctaggctagtctcaaattcctaggctcaagcaattggcccgcctcagcctcccaaagtgctgggattgtaggcatgagtcacctcgccccatgggtttctctgtctttttcaaaccatcccctgcgtactgcctgacgtggattttctctctctgggagtctaggttaggtatctctcaagctttctctgatcaaagcagatgcaatcccttccgttggtaccacagtagcacttttctcttagggttttttttttttttggaattagtcacatggtgtctcatgtaatagttatttttgcacttctgttacttgcatctattagattgtgcacttctggtggcaggcattttatgcaaccatctggactacagttccttggactcagtaaagatttattgaatacatgatctcatggggtcatttgtttctttcaacatcttgtttccactactctccataaaattcataggttctctagtaatgagcacttcccttttatctcataaatacctttaagtgactatctgccacttgcaaaaatatctaaggaggggaattaagtgattttgacttctaataaattgacagaaaatgttttaaccataaagattcaatcaatacaaccacttttaatacaaactactgttttgaatgtttgtgggcagtgcagagcaatgtaatatattaattcagccttcatggaagctaagtacttagtggaggaactaatttaaataaagtcagaaaacatgaaaatgtggaaggaacagtgatcgctaaaatgacttccatgaattccataataaatgttgctgaatgtctgagttattttgatttacctaaaataatggttaagaattgggttctcctgcagtggtcaaggttagaattcaagaactgccactcacacttgcttggttggattcttctattaagagttaaagcatatggagccattagcacagagcctggcatagtgtaggcactcattacattttctctgctattacttttagattgcaaactcacatagctattttaagagtgttatatgccaatgccacttgtagaaaatttgtaaaacttagttttatttctggtgcagttactctttttaaagttataaattatatgtaattactagtatcaactagaggagatcaagtactgttcttcggggtctaaattaatcgtatgagtagttattctctaagcagatattgcatcatacatatccaacagcctcttaaggtattcagaattaataaagcagggaagatattaatcaaggatagtatctagcagatttgcataaattaattaatgtcaacagctacaacaagctgcagcatagcagcacctgggaaaatctttactcccaatgaaataaggtagtgagcctgcagggcagagagatattctatctccaaatacatgccaaggtcaccgtttacataacacaagtgacaacacccagccaaatcacagtaatgcatgggtgtgtaggaggggtacatccaggaaaatatggtgaatataaagctgtttagtgaaatccttaatggcttttcaggtgtttatattttagcattgcattgagatttctgtttctttgcactacattactgaaaataagtattaaaatttattggttttattattcgtaaattcagcaagttccttttgtgaattgaggtttaagaataggaggctgggcacggtggctcatgcctgtaaccccagcaatttgggaggccgaggcgggcggatcacgaggtcaggagattgagaccatcctggctaacacagtgaaaccccgtctctactaaaaatacaaaaaattagccgggcgtggtggcgggtgcctgtagtcccagctacttgggaggctgaggcaggagaatggtgtgaacccgggaggcggagcttgcagtgagctgagatcacaccactgcactccagcctgggccacagagccagactctgtctcaaaaaaaaaaaaaaaaagaataggaatgaggccaagagtagagacaatagaggtatcagttctttcctttatatagaatttaagaaaactggcttggcatggtggctcatgcctgtaatcccagcactttgggaggccaacgcaggaggatcacatgaggtcaggagttcgagaccagtctgaccaacatgaagaaactccatctctactaaaaatacaaaattatccaggtgtggtggcacatgcctgtaatcccagctacttgggaggctgaggtgggagaatcatttgaacccgggaggcagaggttgccctgagccaagattgtgccattgcactccggccttggcaaccagagagaaactccgtctcaaaaaaaaaaaagaaaaccttgttgcttcacttcttgtacccatttcaaatccaacccggttccattggcagacatttccttaatgttagctttactaactcatttacgcattcattgactcaataaacatgtttgagaacctaataaccaattgttactgtctttgataatgggaatgcaaaactcaggatcctccacttcaaagtgcctggagtctgaaatctcgtgcttcctgcaaacaaataatcacagattgatggctcatgtcctaaaatggtgatgcttggatatgtgctactggtccttcctgaagagaacttgagaagttttcaaagagaaaacaatatttaggaccaatatatgtgcttgactaggagaggtgagaagagagactatttcagagaatgggaccaccatgttaattactcttcatagttcccagagttactctcttcttgcattagctatgctgagcttcctgcagttgttgatgttagttaattttatgcagtctgtgttggtgagccatgaggaaggacaaggagaagtacagaaaggagactgttgctccttctatagtcttgaatactccagtgcccatttgattttggcaggtatttgaacactggctcatttaacctgtttctgtcatctctaggaggcatgtgcttctttatagcttgggggtaactgggaggacatcttaacagttcctacttctccagcctacaaatggagcctttgggagagaaacatcccaagacatgccttgactagtggacggtcttctttgtccagctgggatccaacaccaactgggttcccttgatgtctataaatggtggacctccttggagcaacacgtgaagagccccgatggattatttggcataatgacgagaaattactagtgtaaggaacaagattgtattcacaattttaatacccctacaaagcttcttcttaaggacttggtttagttatacaataataaaatataatttattcaaacttctgaaaagatcacaattgggtcactgtatatttttctctgttttaatacacaaagtgttaatcaaagctttatgagggcctctgtttatgagcaaggatgggatgtgggaatgctgtgaggatactttttttctggctagtgagatgttactattttaaacattaaatcttaaaacgtgtgggatctggtgtgtttcctgcctgagacaatgcttattaattgccctctgtcattttgatggtaaaagtctttaatttgcactggtaaatgatgaaatggcatatggtccatctatttctggaataccatccatgcattctggttaccctctagtcctaacatccttctccaaaggatttccacatgtagtggaatacatgttttaacctggagtatgttttaagaatagcactttgtattcagtggacagtatgcagcaatgtcatttaaataatgaaatgttggcattgtttgggtatagtgtaagtttctaaaataacaatttgatatttatagggctgaatgtcagaggggagttgtgatttccttcacaggatcagagagatctttagcaaaccaggaaacatacatgattgaatggaatttctgaagtcaaacttgtctgccattagaatccacttttcagtgtaggtagaacacctgtagcagaagtttaaaaaagaaatgtatttgtgtgagactcaatcctatctcttctagtggagtcaaggcatagcatttggtgaggagaaggcagagtaccgtaatggaaaaaagttaggctttgccatcccataaattttgattcacttaaagaaaaatccctgagcagacaaagccagctgggcctcctaagtagcagtcacctcacttctacttaggagatttgcaaacataagcaaaacttgagctaattcttataaatgcctatataaaagaaaaacagaacataagctaaacgaatcacaaacagccaacaaacttataattatataactagggactctccagtgggatagaccaaagaaggcaactgtataaccatagactgttaaataagttctttgtatgacttccacattctgtctataaaagcctgtttcttacactacttcaatggagccccagaaccacttttggtttggagctacctgattcatgaattgtttgtgcacataaactttaaaattttactgtccctcagtttaccttttcaacagttcaaattctggtcacaccacttactaccttatgaattcaggccacttactcagtttactcggactttggtttccttaagaatacctatctcatgattgttgggaaaataagtaagttaatacacatgaaatctttaggacagtagctgacaaaatgagtgctagttaaatcattactattactattattagtggtaatatctttaaaaataaattctcacaggtttttgagattatcaaatgcgaataacccaacccatgccaaagctttcagcataaaccccaggtgatagaagacttgggttgaagaagagtgtgggtcaagttttcaatgaatcagaggaagcttgaggttagtagatgatacaacaggtaggagcagagggttcttaaataaaatggatgaattacatacaatttttttaaatacttagataatttaataatggattcacaatacaaagtggggaaaattccggcctcattttctcatcctagggttcaattagggtgagaaaagaacatttgagtaggcagcaaggcagcgtccatagagtttcaataaaggcaaaagatggattttgcttatagagacagtttgggcaatgtagatactattttttttttttttttttgagatggagtctctattgcccaggctggagtgtaatggcacaatctcggctcactgcaacctccgcctcctgggttcaaacaattctcctgcctcagcctcccgagcagctgggattacaggtgctcaccaccatgcttggctaatttttgtattttagtagagacgggatttcaccatgttggccaggctggtcttgaactcctgaccttgtgatccgcctgcctcggcctcccacagtgctgggattacagatgtgagctactgcgcctggccgtagagactatttaatatcattgaaagacattctaaaacgtgtagtgcaaggggaggtgtttgttgggattttgcaggaaagaagaaacactgccatcagtgaaactctatcctagggcttacatttccatgtgaccaaggctgtgaggcatagtcagtgcagccagcgcgaggttttcaaagaattgctgctggcttgtctgctggtagatggcagttgctagccttgtctttaggcactctcctggctttccaaaggccctgctcacagttctggaaaatctctagaatcttccacatttacctctgtcttaacttcctcttggttttccccactttgattcaaagagtctgtggctccatatgtagacttctacctggatttgagttctccatagttttcactatgttttggagaacataggaactgttattgagaaattattctgacacatgttaatgacacaaagacagatttcattcgaggtactgcagaacggaagagggactacttcactatggatctgagttcaattccaaatacaacagagacaggtgaggatttacagctaatgggcagagtgagagtcagtggatagagaattactaagaggatcttgattagatatttagggttgggggatgaggagcttgatgctatgttgagagtgggtgggggattctgattaaaattggctgaagagggagtctttgtctatacaagtatgtttggctttctctgttttggcatcttacctttgtgctggcagagaacctcctgccccacctctttattctatcctccagccttcattcctcaacttcagattcttgaaatccacaacaggatcattctctactttctgtttgaagtcatgcagctggagcaggtgatggtatcaggattcagctaatttacatttgagttccagcaggagctcttaacacggcctgcccatcagacacacctggggtcgtttaaaacaagcaaccaacaagtataaaacaagagtcctctctatctggcctcacctcaggtcaattttatctgtacctctggggttgaacccaggcagtcgttttttttgtgtgtgtgtttttgttttgttttgttttgtttgtaaaacttctctagtgattatgatgagcagcctgctttgaggagcaaagacacataagaccccttgctcagcacctgatgggtatctcagtttgctgtcgtactgggaccacaagcagtaaataggagaacaggattggtgattattgtgaggcaggtgctatttttctcagaacagttaagagatttacagaagatgatagaattagtgagggagctgagagccatctgtttctgatatccaaatcgatgccaactctatccatgaaagagccacggagatactactgatactactgaaggtaggaagcattaagtctcttattttttgaatattgttccatcctaaatgtttattctttgttacagctttcacttcctttcttctagatatgttgtcttgcattagggcccacagatgtattatgaatggcttaaaaactttattcttccaacttttcagattgcattttgtacagaaaagcgatacagatttgattttagtttcctatttcctaaatgactttatcaagcaatctgctttccagatttgcttttatttttctcctgtttttctacatgtgcttatcaagcaatcaactttttgcctcccatatgcactgaactatattagaaaataaaatattaaaaccaaagagcagaaagtgcagattaccaaaagattaaggtagttttaaaatgtgcttgtttcccatgtaaatgaatggagggttagtatattcagtacaaattatgtttagaatattaatccacagagtttataacatgctgtgtatgacacataaagtaattatgcagtggggtactgaacagtcacattccaatgtatgttattgacatctttttcttgttaaaaagtgcaaagtggaagcagaatatcaaacaaaatagttattattttatggtaaaagattgaaatgtaaagacaaatgataatgaaataagcatgtgattaaagctaatgatgagagtaaacactgtatccaaaggttttgctattttggtgaactggatatattttcttagtgatttctgatgattatgtgtgagaaaattctgtctgtcagccagcatataaatagagccaacttgtttgattcattgtttagctggatcttgaatacatttagaaagcccttttatttgactgatttgatcaatctggtgatctattttcctaaaaaaaaagatttcagaggggacaacaaaatataatcactaaatcttaaaagcaaaagtaaacaaatttagtactttaccagaggaaaaaatgttgctaaatatctcatgtaactgattgatctaggatttcacttcaaataaatcctatatcctagatagtcatatgaaattatctgatatttcaaaacaacttaattcatttaggatttaaagaaagctaaatttattgaatcatgggaataaaaggaatctcatctagacatttagtctattcaattttttgaagttacagatcaaaaatatatgtttaagtagctattctttgtaattttgtagcgtgtggttcatattacattttgacacagagcatatttgttttttcattttaaatacgcatgtcccctagcaaactctcggttccaatagggtagggagcatgttctgtctttataaccctagtttttataatggtgcttagaagagcaataaatgaagcttagaagatcagtggtgcttagaatctgctgaataaatgatttttgaatttttatttttttatttcttttctgttttaaaatattgccagtgaaagaggtatcctagtttctattggtaaccaattgtagatttttttcttatatttaatcgactattcattctgaattggagaaaaagaaagatttgacagatacatatttttaacaagatgttgcatatatggcagtagtacaatgtaatttctggtatgggtgaaattatagccatatgtgtgcctaatcaacttaaatcctgcctgtgaaaagtgaatcatgtactcttattgttatttcacatgtatatattaatatatcattatctggctcttgaagttattcagattttatgatgaatcaaatgggaagagggatgaaatttatccttgcttagtaatcttaaccacataggaagttcaagcaatggttatttagtgtgcaaggggaaaagttaaaaatactcaaaatactttataaaatagttattataataattctaattataaaccactcatacctatgtatggaaagagcataaataaagttagattggctctttctattaacaccatcatattaactcagtatgagtttacatatatgattgaggatagttttaaaaagccactatgtaaatgtcatatacgagacatactctttgatcaattactgagagtaatgaggtgtatgataaacttttataataatacttatttttatgacaaaagatcttttgagatctattgtaaaactatggtgactatgttaataatatatttatattcttgaaaaatgccaagagagtgaatgtaaagtgttctcaccacaaaaatgatgactgcaagttaaagcatatgttaattagctagatttagtcattttacaaacatattgtacactgtaaatatatacagatttatctgccaatttacaaaaagaaaataggtcaattgaaaaatggtggccgggcatggtggctcaggccgggcacggtggctcacgtctgtaatcccagcactttgggaggccgaggtgggcggatcacgaagtcaggagatcgagaccatcctggctaacatggtgaaaccccgtctctactaaaaatacaaaaaaattagccgggcctggtggcgggcgcctgcagtcccagctactcgggaggctgaggcaggagaatggcatgaacccgggaggcagagcttgcagtgagccgagattgcgctactgcactccagcctgggtgacagagtgagactccatctcagaaaagaaaaatggttattgttagacaaaaagctgcctgagggcataacttataattacatatccttagtgactgagaagtaactggtgcatagcaagtcctctgacactggctgaaattgttgaaccaaatttaaataattggatctatagtcatgtgttatttatttatttagagattgagtctggctctgttgtctaggctggagtgcagtggcatgatctcagctcactggaacctctggtttctgggttcaagcaattctcctgcctcagcctcctgagtagctaggattgctggtgtgcaccaccacagccagctaacttttgtatttttagtagagacagggttttgccatgttggtcaggctggtctcgaactcctgacttcaagtgatctgcccgccttggcctcccaaagtgctgggattacaggcgtaagccactgcactgggctgtcatgggtaatttaatttctgaaactttattacacataataggactgcatttataatcttaatttttttatggctaagaaaatattaggaagaaagcaaactgcaacaatgttttatatgtatttagtttatttcagtgggaatactgatcatcattgtaggatcataattgaataatttatcctcttaaacattcctgtttgagagaatgctggttcattcattcagtcagtcatccattttttgatttaatgggcacttattgagtaggtacttttttaaggaaactactatagtggaacaaaatactgaactggaacaatgaactggaaaatacaacagatccaaatattttcctcccgtcaaagagacctttatttctttttagaagaccatgctgcctaggtatattggacacaaataattcttgtttacaatgtaaatgatatgctttttgaaaagaatttaaaggttcttgatataacaaattgtgactttttaagtataaaagtcaatattttggtaggtaagtctttatttttgtgataagaaatgactttaaaaacatttatttcactataatatttgaaatataaacatagcgataattcatgatgttgctatttttttggttagcatgaatatacacatttatgcttgttctcattttggatgagtgattctaatattattatatattctgtattattttaaaagcactttgtcaacttaacacacaatgtatttttatatgtatttttctaacttagttatgcttttagtttaatagcatgacatgttttaaacatattttaaactataattggtagaggcagtttaaagtatatacactttagtataaacatagtcatacagcaagtatattaacttgggaaaaacatacagaaacacaagaagctatcattattttcatgaagccataattttgttactttttatttttataaatatagaagaaagaaaagccctgaatggtttggtgatcatgtggggatataatgtacgtagtaatgttacacagtgtaatagttattgtttcttgatggttcttctttacttagacataaattccaatgtaaatcagtttgcttgggacagttctggttgatacttgttgtaccttctaaattgttaagagcatctacttgtattgtaaaaagtgacctgctttggatgattaactacgtggtcactgccatcacaaagcattttgtaagaagggttgtttgtgaatgaactagttgtgaaagttgacagctcctccctagactcctaggaagcctgacgtgactggttactatggtaacagagtactatgtgaatacacatttcacacagtctcatagaatcgtacatgtccaaatctcccattcagtctttcttgtaaatggtgatctggcttccacttgattactctctgtgaccaaatagaaactacaacctccctctgcttctcatctgtatttttcaatgctcaggaaagagggtgcagctggagaaaccgtataaaaaacaatgcagctaattgtttccagtcaagaaactccaccaggcctcatcttccttcttcctgcttccttctacgtcagttcccaagagcttggggttttgacttttttgttgaagcctctgccaggtccatctccgtggagtgagcaaaaccagaatcaccctcaggaggcactttggaaacacaacattcacatttctgtattaccatgtcgagtggttgtcatgaacttgtagtgattggatattaaagtaactagactttctgcattgctcagagatgcctttagtccttaaagcccttcaaatatccttcaaaccagtcccataaggaaaatcctgtatataattttccggttttggaaagttagtctactatatattaaaaattattttcccatggttttattataccataaactttttgaaaatgcgactaccatgtccatggagagaagacgctactttgttgcattctatattttaggagcattgtgcgctgttgtaactaatcataatatgatggctacactcgttttggtatttgaataactgatatgacacattgcatcatatctgtcttctcatcttcctcgcctaagcatttaccttctaactactactattttattataaacaatttttacaaactacgaaatccttttacagtttatactataatgaggacttttatctgatgaaaaaatattgagtaggtagcttacgttatctaagaatatcctttctgatataaaaatgaagagttgggtctcaaaggattcactgccattgtgtcatcactgcctgtggaacccagaaattgcattacccatggccctaaagtctagacctccggcatcagaaagggtagggcaatgccagctgggactcactatgcttatggaggaaattttgacaccttttctatttctggaaggctttggttttcagataatttttttgcaaggaatgagatatgtttacctgtgtcttaacatgcattcattttacatttccctgtgggagcacacagaagaaactaacatttcctttcatgtgatgacccttgagctatttgaatatagctggcattcagtttcttctcccaatccccctgtgaatgttttgaaggccctggactcatcttaagtcagggaggggagactcttctctttcagacataggacattatgcctctactattgcaagcaaagacaccaccccttatttatttcctggttccggtaatcccataatagtgttgacttatactgcttttgaaatcaaccaagccctacacagtctattgtaattactgtagttgaactatgcttcctttaaatttgggattaattttgtgatccctggaacttcatagaaacctagagacatagattctttgtaaacaaataatgatataaatagagaaagatatctccttgacccctatgcagtgccagttttctgtcctgcactatactctggattggtaaaaaggtagtggtggaagcagtgacagaatccaaacctgatgcagactcatacttcaagaatcattaaagtacgtgttcttccagcttctcgcctggatgtcggttaactactgagggtacaaaggcaagatgggtctttggggtaatcaggcagaagcaattttagctcctgatgggaggtaaaaaagaaagaagctaaagagaaaatgcacaccttaacagaataactcaaaaaagttatggagagttatgtgagtaataaacaactcattaggaaagttactttggcttagaaagtacataagcagcctaattatgtagtcatttcacatctatcttatgtgaaattggcagtaccaaacaaacagcttctctttttttcttttcttattccaggtctttggaaaatagtcagttttttgtctgataaattatctcttttgttgaaattgatttgtgttactgcttttcatttttgagcagattttctcattattcgtttatatcaaagtgtcaatagatcctgagaacagggtacacttatgtcctgtgtatatagtgtgcattaaagggccttattcccaagtcaactttcttccacgttgtgagtggcatatgtacacctattgcttgctattttgagttttaaattatctaagcaagaaagcctgaaactaattaaactccagtggtttatttattaatattaatttacaacctgatggcttaatcagtatcctgctttcttttttttctttaaagacttggcataattttacatagccttgtgattgctttgaaaaggctgtagtgttcttccatcattagatgacaattttcttttctagtttgaaaacttagcttaagttctcaagtcaatatgcctatagtgaaccatttattgaaggggtgttcattgcgaatagcatggccaattaaatgaagaataattggtttagttgagcaccttgcaatacttctctggtttagaatactgcagaaactcaatggttctttctcatgctgtgtgtgattttgctttgtttaaaacctgatgtgcctaagtagatttaccttaccagtagatggtttaatttgattttaatgatattctatttggctctataaactgtactgaagccagcgctgccatgctgttaaaaatgtaatctattctataatggcattaggtgataatgaaagcagatattagagacataaccattttcatatttaatagagaagcaatgtgttctaggtaatgaagttaagacttcacatgacattgtcagcacatgttaactctatgttttggaaggctgctttttagacctaagtaaatataattcaaaatgcccctatacttgtttatctattagatgctcttgttttgttttacacatcataactgccaggatcatttatttggcagagcctcagaataaaaacaactcaaaccaaccaaacaaacaacaactaagaactaataaaatctttgaagcttgaaactgtagaaatgaggtaaattttttttttccttggataactacttccaatctagtatttgaatggcaaacaactaagcaacatttgtatgcttttcttttgaagtaaggtggaaacatttttcatcagtttttcaactgttagttggaatatttgtgatcactttaaagtgtgacagtaatatgaaactcctgagatgaccagcagcatagcctttagcccatttgtgttcattttaaatatgcttttattgaataattaatatgtctagacactttattgtgaaaactagaaatttttcctatccactccggtgtaacccgtgtaaatagtttcctgtgtataccctctatacattttccatcatatataagcaagcatgtaatagattttttttttaaagagacaagatcttgatatgttgcccaggctggagtacagtggctattcacaagtatgatcatagtgcactatagcctagaatttctgggctcaaacaatcctcctgcctcagtctctcaagtagctgggactacaggtatctaccattgtgcctggcctaaaattttatcttctaaagattataaaaatgagggaattatactatgtatacagttctccaactggctatttcataaacaatgtactgtgcaaccttttctgtatcaggcacatatgttttctaatgaatgcctaggatgacattgtaggtatgaacttcatgcttaactttagtttgttcttggttgttttccaattttaagtttgaagttagatgcagttacatgaagcaagtgaactctattctggttttcctgcctctaagatgccttttgtcattagttctgctatcttcagagataaacaaatacattttataggcagacagaattgcataaaagaattttttttcctcttggcttatttttttctcaataatttcttttatccctggaaataatacaacgtaatgcatcaaatatatacttgacacatgctttcaaaccaagccattgtaggtgagactgacctggaaaacagatacagaatcaaagtgatcacatcagttaagcacagcaatacaccctcttacagtgaaagacgttcagagcaattcatgagtatgaaggacaaaacacggttaggttaaggattaggaacagatgaccaggttggggaaataaagttaatatcttatactccccacatggtattctcatgtttttcacactccaaccgcctataaaatggcagcacataatttaggccatgagttctgtctttggtatgagaatcggactgggatttaggagaccttggttgccttgtttagctactatcaacagcaaataaagttgcatgagcataactgcagcagagaatgcaagagaatggagttcaggaaaaaatgagggcctaattagatagaaaacaaggaggggtgtgtgtgtgtgtgtgtgtgtgtgtgtgtgtgtgtgtgtgtgtgcacgcatgtgctgagaaatgaggagattggttatgatgttatacagtaaatcattttatagaagaagattaatctgggagtaaattgcaaagccaaaggattacatggctaggctgataagttgtgcttttttgttttgttttgtttgtttgtttgttttttggtaactcagttctgaagttgatgagaacccagatttgtatgtcatagcagtagaaacagagagggaacagtttgaaagtattcaagttaaaagttgaaaacagtacattgttggtttgaaagatggttaaagagctttaatttcctaattattttgatggatgagaaggagggaggggactttttatcaactagttatgtccttttgaaaaacaagttgtttgatttttttattaagatctaaattttaaaacattacatccttttaaaacattaacttaagtttttgtttatttaaagagatatgttgtttgttatgaacaggatgttactatgaaattttttgaagattgtatttctttttctttgccataaaaaatgaatatgatcatattgtggataattgtcctaaccataattatagctctgttttctagggaaacaatgaaatatattcttggaagaaaataagtttagaaaatactctttaatcatcccagtgcaattatattcattatttattttgctttttaaatcagtaaattattagctactgaaaattataattactaccaatgaatagataaggctttacatatttcatcatttaattaatgattaactatttttttgactttacaagtaaatcattcatttttggaaatttaagtcaaccactaaatattaatattctttatataattttacattatttcactaagactaaaagtgtacctaagattggttgttgtgaagttttaaaaatgtgtatgcttttattttaagagattaatattatatattattaggatattatatgagcaaacatgttttcttcaatttttttttaaccatgtatgtagtcagtcattactaagagagagtgagtggggagtcactgccccatccctttatctctgcgtaccactgttctgaagatattttgttgatgacatatatgagcaagatatttggacaaagagtctgttttctgatcctctagctaatatgcatatatatgaaaaaaattaataacgttcatatatgtgctgtcttttgttcatgctcaaagcagtctcaatgattttttcacaggggtgttctcctgtatatacttgaggccaccatcagatttttaaatccaggcttagaatagtgactataaccaggtttatcttcttttatgcatccatggtatattgccttctaaactgtacccaaattctttatcagaatcatttttaacaaagtgctccaagctgtaaccttcatttgatgaaccttgctctttgagtggagaactattttttattcatgccctagactattaccaagcagagagcttgaaggcagtccattgtccagatatactaataaaatcgacattcatggctagttttcctaatgtgtgggtatatgtcattatccattcatggtttgtctttcatgcttttcatacacatcaagccaaatgtctgggacacaaagatgtccaatatttccttaatttcaaggagctcataattaagtgttacaggagaacacatgaacaaattattgtgcaggttgaataaagctattaggtataatgtgaaagtatgctctagggcataaagggaaaaaatgatgagagtgtttatactctaaactgctatcatcattggaaaacagcagcttttaaaccgaataatttctttagcaatcactaaataatagttaaaataaaagaaccatctctttagcccttattacatgctaacacctacaaatatttaattatcaaatacctctttaaaattagccttataccaaagtattttactttgataaatcagagctcatgagccttttctccagactcaacaaatcaaaatcttataatgttatgaggaactcacggattaaatgtttgtttcattgctcagcatacgttttaatgtattttgcttttctgagaaggtgttgtaccttgttttcatttaatttctgtagcatatacacttagtgcttaagctgtcattatctgatctgcatttgaggagcaagctatgttagcactgtgagccattctcatttgcaagtcaataattgtgacagtgcttctaagtatgtagacctgtattataaatgttaggggaggtttagtaatgtaatgggagaggcggtccccattcttatcctttgtgttacttacaattggctgacttttaacacactcatggggtgttttatatgtggtcctgcgttcagaaatcaaattcagattttagcaattctttcattagcattttctttcctattaagaatttgaatgggcacataccaagtcatttaaccctgcctaagcatcttttatcattgaaaatatttgataaacttatcagacacctcaatgttttcctgaacagaaaaagtgacttaatattaatctttacaaccagagatttgacgaaagctctgcttgtattagttggagacctcccatgcttcaaagtgtgttgcttcaggttgccttagtttgttggataaccaggcgcctctttgaattcactgtatgcttgtgattaatgtcattcacacaacttctcttttctttatccacaacccaatgttttaatgagatatgcttttctgttttgttttatgtttctattgttttctaagttggattactgaaagcttttagtctgaaggaagggaaaggcctgtggaatcaatgctgaacctctgtggtgcctacatttacttttttatcaactttatcagaaaactgagtggaccatggtaaattcttaattggttttgttaaaactaccagtgaagagtgaaacacatggagcaggcttgaaacttaattgaaatccaacatcaagtatttcttgttatacagtctgtcttttttccttttggaatttcttttgtctgttactgtgctatgataagctcatctgcgatttcagcactttggaagagatattttacaaaggaggggaggatacaagaggaatgataaatggcaaggaaaaccactcactcttaatgctttttgtcatactcatgtcctcttgtcccgtcaaacataccttttctgcaatgaattcaactcatgttatgtgacattgtcattttacaagggaagactagccagagaatttctgatggatgccaaagacatggagtggtactttacattttgtaggtgattgataggtttagtgtcttgtatctagaaagtggacacatagagtagagcagcttattcgagactcttctccctccgtccatagccaaggaaattataggaagcattctagtttgttgaatggttcataaatatgtgacagttttttttgttggttggttggcttttgttgtttgatactaatggaccaagaagaaaaaaaaagcaaatttttattttgaataatgagggtgaatgagtaatatgagtagtatagttcttttctgtaacaaatttcagataacttgatttaattgggaataacatgttttctaacatagaaaaaagaatattgagactccagttcaacatggtaacatgagcaaatatgtttatctctataccctcctgaatatctcactaaggctaaaataaaggggaaaaaaggatagaaacatacatgaataaagaggattggagaggagataacaatcagttagaaatactatgaatttatggataatataaattagaaggaggggtttctagagcagaagaagttgcatacctagtgcttgcagggggaggtgccaacaagcaggaagcaaaatcatgattcagaacctgggagaggacagcaattggcaatgtgaggaagtgcggaagccagttgtgaaatacggggctgaaacaaggaagtttgttcaaagtctaagtagggtatgttatagctttgctatatgttatagttttgctaaattttataaatgttgctatatgttatagctttccctgcatgaacagacactgactactggagtgcccttactctagtcagaatgaggtttattctatggagacattgaacttagagaggttgcatacattggaacaccatgcacagctgggggtggagtcagtctcacaatacacagtgagatatcccatcaattacttccgatagcactggcagactggcctataactgtcccctcatgcatctctacacagattagtgaaagctaattttctggagaaactggctccagaggaaagagatggtgacatttgaagagtcaggtcacatttgaaaatctgttcactctgcagtgaaaccctttggttgacaagctgcagccctcgtgcatagtgttcctaggctgtttattttctcacttgtaaatatgtataagaatcaccaagtgtttggagtgtgctctgacaagaaataaataggccacaagaaggggaaaaacccactaaaaaggaaattggagaaactaaattaataggtatggatcagaaaaaatggcttaaataagcaagagagaatgttaacttagagaaataaaagttgcatccacaaaacagaatgtgatgctattactgtcagagctaatgaagaacaagagagaccttgtgagaactaaaactttggaagcaggagtaaaataaagagtagaagcatttgagcattaagggtgtatcctagaaaatagaacaagtagaacatatagtatccagcttacactgttttcagaaaaagagcagaacaaataaaataaattctcaaagtaataaaattaagtcccaggacggaaggaaaggtgcttccacatgctgagtgcattgccaaattaatgaaaaatgggtagaaacaaaatcgcaaaatttcagaacgctaggcatgaagaccagatcacagaggcctctagatgagaaaaatacatatgtatttttctccttcatatacaacatatgaaggattaagaatccaagtgacataggatatacatggagcatagtggaaactagaagtgaaagaaaatcgcaaaacaatagctgtttgacagctctagggaacaacaaacccaaattggagcatgagccctgatggcttcaggaagatagatcaactgatatctttgatcatatgaaaatccatactgaaagtgattttaatgttggagaattttggagtctaagcaaaggggaaaaggacaggcaactgttaaatccaggaaaaatataaagttttacaagaagggaaatatcataatagactatttggcttatcagagaaaatatatactcataataatgcaaatactgcctaatacctttaaaaagtgaaattttatatttgttccagaataactgactcttaggagttatacattgccttgcagttattaaggagtaataaattaccaagtatattcttttaactacattttaaagtgattcccttatatatataaattttttaaatgtttagctatttattaaagaaagtgctcaaagtaaaggagagggcttcaattcattagagaaaaacaaataatattagtaaactattggaatcagaatgttttgagaggaaacgaattatcttgttgctgatagatatctcagaattttaaatgatattaagtatatggactaagtggtattgtttatataagaatattgtgactttcgcaaatagtgataaccatctgggaatatttcttctggaaagtagtgtatatattatatatatatatatacacacacactctattatgatattcttttgatgatatgatggattcactttggggctatagccacagaattatgtagtatagcagtaaattgattagcagtttattaaactgcaaaagaaaattctgtaactttcttttctgttcaactactaatgctttacaaataagaaccggtgttcaacaaatcttcatggcggagtacagagtgatttttaagacaggtgaagtattgtgtttctcattgctaattcaacgaatttctattgtaacaatagcggttttttaaattgcaatggtttttgttttttctctaatcagcaccatgctgcttataaatgaaaaggttcactttaaatttttttctgcagtatgcttgattgttaatttccaggtcagcatctagtctatcaaagtttcatgggatgataatttatggttataatggacagtctatttaaaactatgatgaggtcactctgtcttaagaagctgaagtactgtattccattctctcgcttactcagaattgcatcacgttagtttgctaatttcccatctttaaggattgtgttttgttcaaataaaacttcagccttcccagtgcctaatttattactagccattcacatttcattaattgggtgcctgatttattaggcaaatcgcattacttgctttcttcccttccctcccctccattttccttctgctgccctccttaccaggtaaaggaatgatttctctttcccaggtagtgctttcttctgttatttcttggatttgagggttctaatcttatctcgtgctgtatatagtgcagattttaagtttaactaaaaaatccttctctgattccagcgtcaaatatactatttttagaactgtagttgaatgaatttagcacattttccagcaataacaatagaatcagaggttcagagaattagggttgaaatggaccttagaatgtgtttattttaaacccatcaagttcaaataaaaaatgatttttcttaaagcaggagcatttatatttctctctagaaaatatcagtaaatacactcatctaataaataaaagaagttgcatcactaaggcactgccccaaatgctccatatctgtgagcagactagacaacaaaatacaagttgcccctgatcttttaccaagaattctcagcccatttcaacatctagtgtgagaccagcattagctacctgctggatgggctttctggtggggttacatctagaagtacagaacttctcaaactctctgtcgtgatgaatcagtcttcctcttcctcccttcttccccctcctccacctcctgctctcttttttcttccaatccattgcagattggttctctcataaaatacagctaaattaatttatacaattgtataaaaagacacataaaatacatgccccaaattgttattattagatctaatggacaagaaaacgttgacttgctaccaaaatttctaagtttattcttttttaaaacttttaagttcaagggtacatgtgcaggtttgttacgtaagtaaacttgtgtcatggagtttgttgtacaaattatttcacccaggtattaagcctagtacccattagttatttttcctgatcctctctctctttgttcaccctccaataggccacagtgtgtgtatatgtgtcaatgtgttctcatcatttaaatcccacttataagtgagaacgtgtggtattcagaaccagaaaatctaagttaattcttttttttttctttcttcttttttttttttttttttttttgagatggagtttcgctcttgttgcccaggctggagtgcaatggtgcattctcggctcactgcaacctctgccacttgggttcaagcgattctcctgcctcagccttcccagtagctgggattacaggtgcccgccaccatgcccagctaattttttttgtatttttagtagagatggggtttcaccatgttggccaggctggtgtcgaactcctgacctcaggtgatccgcccgcctcagcctcccaaagtgctgggattacaggcatgagccaccacacctggcctaagttaattattttgttgttcttgttgttgttgtttttaatttgtttgtttttatttttttattatactttaagttctggggtatatgtgcagaacgtgcatgttggttaaataggtatacgcgtgccatggtggtttgctgcacccatcaaccccgtcatctacattaggtatttctcctaatgctatccctcccctagccccccacacccccttagtcttagggtctggaacaaagcagttcagtttgagtaacattactctactctgctacgtttgatggccatgtaatgagctttccatttactttctgctaagattggacacatctaaaatatttggcaatacaaatgatttctttatattttctatctgttttggggaccattggtaggcatatttttaatgtcagattatatatgttaaattcattatgtaatataaatttcatagtagtcaactcatcaaagtgtctttattaatatttttgtgatgctcaccattatatagttaagaaatttacgatagcatcattgatgacacattatatgtggacaaacttattaagtaataggaaaagaatgtgggggatgtatgtgtgagatatgtgatatatatcagttttcagcacttatcctaccaatggcctctcatagaatggtctctcctaccatttttcttttcttccttttcctttcttttctgccatccaaacttccacctcatttcttcatgagcgtttcactgttttattaggttatgcctcagttgccagttttcacctgtcttccaagcccagatcccattttgtgtggggttagcaagttccgcctcctcaacaggactatgcctgtgtggctcttcttcatgctgttttacttacattatataattgttaattcagtatgaagtaccatgataaatatttgggataaaaagaggagagcatggaccctgcacccaaggacttagagtttggtaggagacagttagtaaattgttaatagtagctgtgataatagtctttataaagtatgatgaggacataaaagagggagcaggtagtttcctttgggaataggtcaagaaaagctttattaaattatgccagttagtacaaccactaaggagaacagttgggtgattccgcaaaaaactaaaaatagagcaaccatatgctccagcagtcccactgctgggtatatacccagaggaaaggaaaccattatattgaaggagatatctgcacaaccatgtttgttacagccctgttcacaatagccaagatttggaagcaacctaagtgtccatcaacagatgaatggataaagaaaatgtggtacatatacatagtggagtactattcagccattaaaaaagaataagatcctgtcatttgcaacaacatggatagaattggacatcattttgttgagtgaaataagccaggcacagaaagataaacatcacatattctcacttatttgtggggtctaaaaatcaaaacaattgaactcatggagatagagaatagaagaatggttaccagaggctgggaatggtagtttgcaggggggatggtaagtgggtacaaaaaagatagaaagaatgaataagacctagtatttgatagtaaaatagggagactatagtcaataatttaatttaaaataactaaaagagtataattggattgtttgtaacacaaaggatagatacttagggggatggaaaccccattctttatcatgtggttattatgtattacatgcttgtattaaaatatctcatgtatgtatgtgtgtatatatatatatgtgtatatatatatacacacacatacatacatatatatatatatatatatatataaaatctctgagcagcctagacaacaaaatatgtactactatgtacccactaaaattaaaaataaaaatttttaaaaagtgtgacagttgagctatgttaagaggattaagtattggaggatgtggctgtctcatatggggggttggggttgcagtatattctaaggcacatggaatctggaaaaggcattgaaatgagtaaatgttaagagatttcagctttggagctatgtgttcagacacccacagtttatacagcttgagtggtggccctttgatttatgctgtttttaggcccctctagtaggaatcaaaagtgttttttactttttaagactcaactggagccagcgtgaaacctacccctctaatgtatttgcctggaaaaaacgaaaaaaggaattcatgcacagcaattgagctattaaaattttgtaggcatttctctatgttttggaaaacttaggaatatctctggatgaaagatgaaaaatttgcatgcttaggaacatgctagacattaagaaggtgtttcagacctaatttatttggatttgtatcattataatttctagccagttagtccccacataaccccccacaataaaattaagaggtggttttatactggtgtttggtttttgtagttaatagctgtttataggagcatatttgtgtatatttttaattttcatgattaatggcagtatttttaaggtctaatgtggcttttgtgaagggtacatgcaatgcattgctttatacttacagacaataaggatttaatttatcccaccttggttaggaattcagatggtagcaatgggtagcttatactcagtaagagaggaacacaggtgatgtggtggaggcagatgagtgagacagtgagtgagatgctagaagagtaagcagtggccattctaaggtgctgcagtttgatttttaggctatgggagaccttaaagagttttaaagagtaatggaggaaaatcacttactgggtacaatgatcactactggggcaatgagtacactgcaagtccagacttcaccactttgcaatgtatgtatgtaacaaactgcccttgtactccttaaatctacaaaaagaaaaaagaaagagagaaaaaaagagtgatggagggtgtgggtgggagtggagcatcttatttgtgttgtagatgtatccatctggtagtaatatgtactgataggagatgaaatcaaagccctagggactaatgaggagactctggcagtgtggatacagaggaggtattcagggccctgcctgcatggttaccacttttattcattcaacagatgttcattaagttccaactagtgactaggtactgggacataatggagagtaacatagtcgtggtttgtacctttagggagcacagggagaattatctgacagcttccaggtctctgtttaggtgactagatggaacctagtgccctgagtgcactcagcaccacagggaaaacaggaggagaaagaggctgtgtgtatagttgaggggtggctttgcagcagttgtagatgacattgggttttggataaactgagctaaagtagtttgagaggctgtggggttgagaggtataggccagtgcttcttagaccatagtgtgcattggactatctgggcaatcttgttcaattgcaaattctcatgcaataggtctgggtggggcttgagattctttacttattactgccaggtgagctgatgctgctggtccatgggtcatactttaagcagtagaagtgtagttaagaagctggttaagaatatctacattctctctctggctacacacacgcacacgcacacacacacacgtgtacgcagttcaagctttagaagaaacttataaaaaatctttgggagtagaaccgtttacagattggggagtagctgcatatgtgtacatatacaagcacttatgataaaattgcttttgcagaaagtccataatctctaggtcatctggaaaatatttctttatgtcaaacatgtacagaacatattttgttgactttgcttgtggctgtcaaaggggaatattgaactcatatttacagataaccatttccaaaccatactttattttcaagtgttgccttttcaactctaatccataaaatctgaaaagtggtaaaaaagagaaaacaaaatgtccagcgaacatttttttaaatactgtgcttctgtgaaggaaatactgtgtagtgtctgttgcctgaggggaagaagatagcaaatgtcatttgtggaataaatatatataattgcatgtcatattctgagcctgcactaaaaagctgtaggtgttattggttttcactggttgattgcctcgctagacaaaacagttgagaaggaatcttcagcttcttgttctcttcattttagaaaagaaaaaaaggatgagaatacagaaagtggctttgctaagttgcagagaacagggaggtaggatttttttccggtagtttttgatgtgttcaaatgtgatcaagatttatgtagtaactaggcgtttgacttacctctatctttttaataagccttagttacacttgtgatgactggtgatcattttatttgttctaagcattgttcaaataaattattagggaattggagcaaatactgcttttccagtgtggttatttctctgattgtgatacctttctttactgtgactgttgagatgatgtggtctgtgtgacagtcgaatatactgtatgaataatactttccacttcttagttgggtttgcagttttatttccttttacacttgttcattgactctactttcatttaacaggaaaaaaatcaattgcataggagaaaatagagatgtttcagtctcgttaatagattgaaacctcattagggagacaatggttatgtaatgaaaggtgcttaacatcagaagacctggattaaaatcctggctcagatcctggctagtttaggaaacatctcacagtctcagtctccttggcttggaatacaagcacaggcaaaatgcatttatgatacagtaataagtgtgccgtgtgaaaacattctcatgtagacagcattcttagtgaagtgcttcaaattaaaattatatataatatatatatatgtattaaacggaataagtgtcttagctaatggcatgaaatgcaaatgtctaataaaatgttaaactcatattttaagccttctaaattttcagacttgaaattggtggcaaaatgaatggtcaatgccttgaccaaaggatcagacactctctgtagaactgactcctcagattcagggaagataatgcagagctttgaggaaatacataaatataaaaaacaactttaaaaaaatggccattttggttttatattttttatttttttccttccaaatgattacatatttttattccttccaaaccattatgtattttctttctcttgcatgattctagtaaattttacttttttgtaattttctacctcaggaacctatctgaagacttaaagcaaattcccaggaacacttacatgcatgatgtttatagctgctcatgtactatacttgtatatattagatactagaaaactcttgtttctccagtaatatttgtgagagaatatatgtgtatgtgtgtgttatattctaaagaacaaacaaaataattagctacagtctatagaggttaccttggttgtttgtcttaatgtttttgctcaaaaaatgtcactcagggctgggtgctgtggctcactcctgtaatcttagcattttgggagactgaggcacaaggatcgcttgagcccaggagttcgagaccagcctgggcaacatggcaaaaccctgtctctacaaaatatacaaaaaattagcctggcgtggtggcatacacctgtagttgcagctactcaggaggctgaggtgggaggatcaattgagcccaggaggtcaaggctacagtgagctgtgatcacaccactgtactccagcctgggtgaaacagcaagaccttgtctcaattaaaaaaaaaaaaaagtcactcagactgaagggaatatcaaaatttgaaattaacccaatcactagcgagaatctatgaactattatggcaaaaatgagatgtttatttgccatgtatttattaattgctgaattagtattatagaaggactgtgtaatattggaaaacttaggaatcttccctcaaaagttgaccaaatacctctacagtttctgttgatagccttgaaatgccaggaggtagactcctgtcagttcaagtcgtcagtttagaactcagggctgcagattctgataccctatataggtcaaagaccagggtgaggttgttggatctgtgtgtttttaaacatcagagaaaatcattatgaattatcttgagtaaaatcatctgtaaaatttcctctcttggtaacctagattaaactttggaccttgagaaatcctagctaaaaatagctattgaagagtttgtttattgcacttaatacattggccccagagaaactcaggcactcagattccctaggtttcgtggcaaacctaactgcccacagataaaattttctttctttcccttctgattctgatcctaactacaaacaaaataatttatggcatttaggcaacagcttgtaaaagccagtgaacccgtcactattggcaacttttataaatcactaatgaattaaaatgttcataactatgtaaaagcttagtttttttcctttacaattcaattaaaaacagttggttactatgtaaacactatctccctacttctggctctgttgatcagctacaatgtaaaaagttgtgttgcttatttaaaaaggttttgatagctaatagggatttatgttatctcctaaagtttctaagattcaactttataagtgaatagtctctctttcagtagttaatggtgaacagtggtttaaagtgtggagagcctggatcactagtcttgcaggaagaatggagtatgctgttgatgttttttgaggtcccttatggtagtcttccaggcttctccctgaaacaccgcaagcgtaagtggaaatgagttccctagtgttatgtgtccatcaaacatcatggtctgtttttttcctttttccccattaccttaagcccaacaaataaatggatgaacaacaataacaaaaaaaaaacccttgttgcaaaggattaataacatttaaatctgtaagaaaatgaaattataaataaatacattaaggaaattcaagaagacttagatcatgttttatttattaacagtaaagttattcacttcacaggtggacgttttacaagtcttagaagttgtactttacttatcatattgaacaagaataaagaccaaagtcagcataaacataaaggaagagaaaagctcatagtgtatatacatggatgcattttgcatttgggatgaagtaagtcttcattgtgcaagaatgtcttgcatttccttggatgttctgtatcttgggtttctactcactgagtgctattaatagtagagcctactgttcatagtgatcatgaaaaatgctcttggttgggtacagtggctcatacttgtaatgccagcaatttgggaggccagggtaggaggactgcttgagcccaggagtttgagactagcctgggtagcatggcaagatgccatctctaccaagaaaaagaaaaagccatatgtggtagtgtggtatgtgcctgtagtcacagctgtttgggaggctaaggtaggagcattgtctgagtgtggaggttgaggctgcagtgagtcatgatggcgccactgtactccagcctgggtgcagagtgagactctgtttcaaaaaaaaaaaatgcttttgcagatttacaaatgctccctatgaggctgctacctcatacactgaaaatcactgccttatcatgaagacatacttggtcttatttaacttatcatgcatcattttctcacttgcgtaccccagctcctttcttcccaacagtggctgatctcgattctattgccttccacttcctcattccagcatttgctttatcaatgaaaaattctcttgcatctttcattcttccatctctgctggcttctttctttcaacatatagatataatcttttatttctaatcatacgcaaatcccaacaaaatgattgacatgcaaataaaattttgcatcctaacatcatatcttcttacagttctatcactttttttggctatagacttttggaattagcctgattatcataagcctcaccataaaggtaaaggggaagtaatcatgtttgcttaatggacagatgaatgtagcactgataactatttgatgggattcatatgctcactgtatttccaggaggtctttgggggctctatttggggattggattttttggctttgtttcagtcttattttttattctctaggatgttgtgttctgctaatgataagaggtgtactttgaagttcctttcttctctcttcctccttttttctttcttgctaaaaatactcatactacatttttatcaggtactaagtagccaagtttaattatatatccatcatttctgtccttcgaaaggaattgtacttatcttttgtgtaaatgaaaattatccattctcactgacatcttccaaattgaaattttcctttttctattatatttctagatacgtgtttttaaaaaatgatgccctttggctctctttcttaagaagcgtggtagagtatgattcatcaacttgagaaaggttagctatggatatagtttacctgagaaatatcaattgctttttatcaccttttggagcaagtatatttgttttttatcttatataagcatatgcatatctggagaattgatatttttctaatatggaagatattttaaaacgtattttcccctgaaacattgttttttcatctttttttttctgtcatttgttgttaaatttcatgaaggaatggagttgtaactcatattatttgtcctttaccacctggggtaaactctatcagtttaccctgctgcttcaaaatatgctctgttaatggttaactgtagtcaccctactgcactaatgaacactagaacttattcattctatctaactgtatttttgtacctattagccaacctttctttatcacttctcccctctactctccccaacctctggtaagcaacatcctactctctacctctatgacatccatttttatagctcccatatataagtgataacatgcaatatttgtctttctctgcctggcttatttcacttaacatgatgtcctccagatcatcccttttgcaaatgacatgagttcattcttttttaagactgaataatatcccattgtgtatagataccacattttctttattcatttattcgttaatgaacacttggttgattccatattttagccgtagtgaatagtgcaacaataaacatgggaatgcagatatttcttcaacaggtggatttcctttcttttggatccatacccagcaataggattgctaaataatatggtatttctgtttttcttttttttttttttttgcgaaacctctgtagctgttttccataatgactgtgctatcttacattcccacgcaacagtgtgtaggaattctctttcctctgctcccttgccagtgtttatcttttgtctttttaataatagccattttaactggggtgagatttgctcattgtgattttgatttgcatttccgtgatgattagtgatgttgaaaatattttcatatacttgctggccatttttatgtcttttgagaaatgtctgttctgatcatttgcccatttaaaaaattggagtatttatgtttttgctattgagtggtttggattccatatatattcttgttattaatctcttgtcaaatggatagtttgcaaatattttctcccattctgtaggttatctcttcattctgttgactgtttcctttgctgtgcagaagatttttagcttgatataattccatttgtcaattttgctttggttacctgtgcttttgagatcttacctcaaaaatttatgtcctgaagtgttttgtttgtttgtttgtttcggtagcttcatagtttcaggccttacactgaagtatttatttaattcattttggtttgatttttgtattcagtgagagacatgggggtttcattcttttgcatatagatatccagtgttcccagaactatttattgaaaagactgttgttacctcaatgtattttcttaatgcatttgttgataatgagttggctgtaaatgtgtggatttatctctgggttcacaattctgttccattgatctatgtgtctgtttttatgccagtgccatcatgttttggttgtgatcgctttgtagtatatttcgaattcaggtagtgtgatgtctccagattcttttgttcaggattactttggctatttgaagtcttatgattctgtatgcattttaggactttttttctgtgtttctatgaagagtgtccttggtattttgttagggattgcattgaatctgtagatcactttgggtaggtagaatggatattttaatggtattaatttctccattccatgaacacataatatccttgtattcttttgttgttatctttaacttctttcatcagtgttttgtaattttcattgtagatgtttcatctctttggttgaatatattactagttatttgattttttttgtaactattgtaaatgggattgcttttctgattttcttttcagattgtttgctgttggcatataaaaatgctattgaatttttttttttttttttttgagacagggttttactctcttgcccaggctggagtgcgttggtacaatctcagctcactgccacctctacctcctggctcaagtgatcctcccacctcagcctcccaagtattgtagctgggaccaaaggcatgtgccaccattcccagttacatttctctattttttgtagagacagggtttcaccatgttgcccaggctggcctcagactcctgggctcaaatgatctgcccacctcagccgcccaaagtgcttagattacaggcatgagccagtgtgccaagccaccaaacgctactgatttttctatgttgattttgtatccctcaactttactgaatttatcagttctatctgttttttggtgtagtctttaggttttttaaaatataagatcatgttgactgcagtgtgtttcttttctaatacatgttttttgtgcatatagattaggaaattcttccctgtcataagttcacaagtatatttaattatgactttttacattgtttatgaagtcaagatccattttcatttatttctatatagacaacaaattttcattactctttattgattagtccatctgttccctacccatctgtaatgcctgctctgtaataaagttttcttatatatgcctgtttgtttctggattctgttctatttgtctttttatctgaatgtgtagcaaaaggacataattttaattactatagttctgtataaaaatcttaccttgttcttcttctggagtgtcctggtttttcatggccctttactcttcaatatacatcatagaattgactaatcaaagtccaagaaaacccctgctaagattttgtttaggattatattgaatctatataataatttgggggagaatcaacttcattctgacattgattcttcttatttatttattttttgagacagagtctcactctgttgcccagactggagtgcagtggtacaatctcagctccctgcaacctgtgcctcctgggttcaagcgattcccctgcctcactcagcctaccaagtagttgggattataggtgtgtgccagcatgcccagctaatttttataattttgctagagacagggtttcaccatcttggctgggatagtctcgaacccctgacctcaggtgattcgcctgcctcagcctcccaaagtgttgcgattgcaggcgtgagccactgtgcctggcctattgattcttcttcactgaaaacttacctatgaagtcattatttatttatattttaaaatgtcttttaataaatgtttatgaatttttgtaaaagacttgcacagaaaattaattccaacctttaacataatttatgagtcttataatattttcagatattaactttgaaaattatgtattttactttaatgtcatttgacacctcaaataaatataattgccaacaataaatgaataattagtcccacagatttctccctttcctccacagggcaatgtttcttccaactgttgatgcatcttgaaaatcattcctcaagtttattatcacttccattccccatgtcagtggcatagctaattatttagaaggcaggtgtctctaggtaattatagttagttctgtatgcaattatcctttctgaaatgtgtgttgtatgccgtaaaaatacctgttacgttatagaatataacaaatagctaacacaatagttaatacttagttgatgctgactatatataattctctagtttattatcataataatacacctcacatcattgaagtcttttacagtttaccaagttctttcattcacggtgtttcatttgggtatcccaacaacattttcaaggcaaacgtgttaccatccttagtttgaagaggaggaacctgaaacttaggaagactaaataacttgtaaaagatcacagaagtgatatctaatagagacgagcttcaaattcaggtttattgaactcagaatcaatgctcctgccccctacctctcaggagtgataatggtaaagattgggggactgtaggccaaataggtcctctgacctcttttataattgtcagcttatctaacgtgaatgacttagataggccttgcagattgagtccttgggagatttcctgcctctgtctagtattatacccagcccaatttgtacctgctgaccttccaagttcctgtgggcatttgagtttctgacctttgcctttgaataagcctgccatttcctatagcatatgtgcattttttgcttcctggaactttctactactttatatttgttctgattacttatcagcaaacaaatcttttagactgccttgtagttctattatggaaaaagtgagaaattattatcctaagaataggcacaaaacatataatacagtgccttgcacttaatgtgtgcttacaaaatgttaattgatgatgaaaaagatttaaatcttcctctaaataataagattttatagttatccatcaaaatctaattatgctgaagtcacttcacatcatcataaaaaagtgtttaacactgtttatcaacagataaactgttgttggcttgtaaaatcaaacttgttctgcacttggaattttatcaagttatttgttgggaaaagtttggattatgtggatacttttggtagaagcgttgtgtaaaatgtgtggagtaaaaagtttttgcagataatgtgtttgacataccatattattatattggatgagactttcttccacctgcagatgtttctctttgtcttcccctggtagggttccccttatataataatattcctaggagcaataattgttcccccagatttggatgtcttccagtagttcagagtttcacttagcaccaaaaattaataagctttaattaaaagaagtgattattgctgaaaatgatgacctgttaactccagaaaggcagggtgcttttatccattctcctccttcaaggttggcttttgaattctgaaccatggatttcaatgcagtccatcctcaatttgtaggaagcgttgttttatttggaatttaaaaaggaagctctgttaggtaacattgcagcacaagttctttttaatgtaagtccatgtattaatcaaaacagctgtgagggttactaggtagactgtgacaccgggtggcaataaaatgtcttcctcattacaattaataccgatgacttgcagagacctcctgtatgtgatggcctttctcgatgggcatcctcacttggtggtagggaaaatgagtatgggctgtatgaaacaatttcagcaccaccctgagcttaatagagccgtctttcattgcctgttaacaagctgtgctgctgccataaaatgttcaagctgacaaatgctgtcaaagctccttcaatgcaaagattttctgccgtatttaacatgttaacttttattttaatgatgccaaaacacacatcagttgtttgtgcaacatccagtgtggtctctggagccatcccattagctgaaaagtatagtcagtgtcctgttccagtggccattaatggtaaaattcttcaattaaaaactgtggagttatgctgattcaaccattcactctatcccagaagtaaaatagatatacctacttgctgtgaaattattgagtttgtttagcttgattttctgtgcattacattagccatgagtgtattatagaggctaagaatgataactctatgaaggtttattatgagattcccatatttggctcaaggttttatacaacttgatatgctacctactactagtcttccagttccactattgcaactagttaacacatacattgtacttattgtgtgccaggctctgttctgactgctttatatgtatctactcatttaattttcacaacagtcctacttattaagtgccattgtcctcacttaaaggtaaaaaaaaaagaaaaaaatcagaggcacgagatattcaataatttgtctaaggccatatagacaggatatggtagaggctctataagaatgcagatattctgattccaaaatatatgctcttaactaaaactaatgcatcaagtcgactgaaatgacatcaaatacatccttgacactaaagggagcacacaaacggaatgcctgcctttctggtggagatgcttatgttgcagctaacaaagagaacgaattcttttataaatgaagtttaggatcacagggtttccactacccttctggttatgttttccaaggctgaaaatggagaacagtttggagcaggaagagtggaagtttataggttctgttttccctctttttcttcatggatctttcatctccccacacactattgcagcccgcaacctcagatggagtgaaattctcagcggaattaaatttcagttgctacccttaataactgtagagaacccctttggaaaggcctccctattacccttttttgtttgttcatttttcgctaaattaaactttaatattttataacatcacgaggaagctactgattttaggaatttggattcatgttttcttcttccttttctcttctatacctataaatcagcaagtaacaaaacgagtgatttccactgcaaagtcattatccccggtgagttgaatatgggcattgtaattcaccagcagctgatgactgagtggatctaaaggaagaatgaaaaggtagatcttaaggatgaattacagctgtaataataatttattccacaagattcacatggaactgaaatttatgacaggcagccagaccagaaaatcaggaagtttggattttctcttcttcctaatcagtttctccacatcttgttctgattagtgccctcgctgagtctccttacaggtatctctgacccatttccagtagaccttttgaaattccactgtttttcaggcagtgatttctgcctttgctggattttagaatataaaagtcattcatctgtatcttagaaggatgattcacatatttatgttctagaaagtaggctgagaagaaaaatgtggtactttattaattagggccctttaacattttatactctcaagcttaatcatttgcttgtttgaactaaagtcatcttccttaatcaccatcattagtggctgtccatgaatgattacctctgaattttattaacatgttattatttaatgcattttacattccccattaggaattagatatcatccaatattttactatatcaatatatttttttaaagcatgagattaactatgggaatgggctacctccatcttcctgctccctcagtggttctgaaattgatgtggaggtggtgttgacagggcagagagagcaattggaggaactagcccatctattcttggtgctgttttttagagcttaaaacttgctgggtgatgtcaaagcatttacgccccaaagatgagaaccactgctctaatcttgaacgtttccagtgatgaaaggcttgctcacaatcatttggaaatagcccattacactttgggattcctttgacaattcctctgtatacctagcagagtgactcattatggtcactagttcctagttctcatctttaagcaaatacagaacaaatttgttcctcctctatctgatggtctttaaaatatctggagccatcttaatattcctactgattattcttgcatacatagattgggtcatgccacaatttcttatattccatattttgaaaacctctcatgatcatggctctccttctctgtattttctgtgtgtagaaataaacaccatcatctattaaaaaaaaaaaaaaaagcaccacgtatacttgccatcaagtgctcatttattatctttcccctgagtatctcagaagctccagtcaggtcagcactgactttatttcttgttgagtcctcagtcccatggacagtgcttggtgcacaatagtgacttagtcaataattgttgaatgcatgagcccccaggtctacactgaggttaggaactgacagtgaattggtcgtaaggggtggaatgaattttagtgcatgtaagattggtcagttttgcataatgttcaataaaatggttttgcaagttgtacactcatgcttgtttgtattgcttgttagtgccaacggcttcccgggcttaaaatgactaccagaatgtcctgcacactcaaaagcaataatgttttgtgaaatacaggcttacatcaaaaaagctctgctttttataacttatgaagttgggagtttaagaaaattacttttgaaaggagtattaatctaaatggataaatgagtcatcgtattaaaatacctgtgggaaaactagaattaggcacattacaatcaggcacaatgtttattgtataagtgtgctaatgtatggtttagttaataataatccattcaaaaacaaaaacaaaagttttctttctttttttttttttttttttttttttttgagacggagtcttgctcggtcacccaggctggagtgcagtggcgcgatctcggctcactgcaagctccgctgccaggttcatgccattctcctgcctcagcctccagagtagctgggactacaggcgcccgccaccatgcccggctaattttttgtatttttagtagagacggggtttcaccgtgttagccaggttggtctggatctcctgacctcgtgatctgcccgcctcggcctcccaaagtgctgggattataggcgtgagccaccgtgcccggcccaaaagttttctttttaaatacctgttatgtgttgcgcattttcaaggctcttgagatacaatattagggacaaagtccacacttttataggtcttgtattttaactgagaaacacagacaatagataattgaataaataaaagaaagtaattttggataatcataagtgaaataagtgtacagagtactgtgctaaagatccgcagtgaggaagtgagggatgggatgaggaggcagccatgcaaggtgctgatcatttcagctgatggaaggaagcacaaaggtccttaagtgggagagagcttggtatgctcaaggaagatagggtcaggtgagctgcagaagaatggcagctggagtttggggataaggttggaggcctataggcctcatcatgatacccttatggaccatagcgaagaagacttatgaaccatcgtgaagatttatttttattttttttatttcaatagttttggggctacaggtggtttttgactacatggataagttctttagtggtgatttctgaaattttagtgcacctaccaccggagtactatatactgtacccgatatatactcttttatctctcaacccccttccaaatttccccctggagtcctttgcaacctcataccttagctccgacttatgagaacattcaatatttggttattcattcctgagttacttcacttaaaataatggcctccagctccatccaagttgctgcaaaatacattatttcattcgtttttatagctgagcagtattccatggtgtatatatagcacattttctttatccacttgttagttgatgggcttttagattggttccatattttacaattgcgaattgtgtgctataaacatatgtgtgcatgtgtctttttcatataatgacttcttttgggtagctacccagtagtgggatcactggattgaatggtagttctactttttgttctttaaggaatttccatactgttttccatagtggttgtactagtttacattctcaccagcagtgtttaagtgttccctttcaccacatccatgccaacatctattgttttttgactttttaataatgtccattcttgcacgagtaaggtggtatctcattgtggttttaatttgcatatccctgatgattagtgatgttgagcattttttcctaagtttgatggctgtgtacatcctcttttgagaaatatctattcatgtcctttgcccactttttgatggagttatttgttttattcttgctgatttgcttgagttccttgtagattctggatactagtcctttgtcagatgcatagtttgcaaatattgtctgtttactccgctgctttttttttttttcttttttttgctgagcagacgctttttagtttaattaggtcccatttatttatttttgtgtttttgcatttgtttttggcgtcttagtcattatttatttgcctaagcgaatgtccagaagatttttttctgatgttatcttctagaatttttatggtatcaggttttaatttaagtcattgatccatcttgagttaactttttttttctttctttttttttttttaagatggagtctcactcggttgcccaggctggagtacagtggcccaattttggctcactgagtagctgggactccaggtgtccagcaccacacccacctaatttttttgtatttttagtagagacagggtttcaccgtgttagccaggatggtctcaatctcctgacctcgtgaatcacccacctcggcctcccaaagtgctgaatacttttgttataaggtgagaggttaggattgagttgggcagatttttgatgtaggttcttagggacacagggttaaactgggagacccatagaagactgggagaacataggtgtattagtccatttttatactgctatgaagaaatacctgagattgggtaattaaaagaagaagaggtttaatggattcacagttccacatggctggggaggcctcacaatcatggcagaaggtgaaggaggagcaaacccatgtcttacatggcggcaggcaagagagtgtatgcaggagaactgccctttatgaaaccatgagatctcataagacttactcactatcatgagaacagcatgggaaaaaccctcccccatggttcaattacctcccatcaggtccctcccacgacatgtggggattatgggagctaccattcaagatgagacttgggtgggggaacagccaaaccttaccaataggagttattggaagtaagctaggagagaaacgatggtgggttggactagtatagtgataacagtcgtgaagagaaatgagtggatttgagatacgtgttggcattagcattggcaggtcttactgagggggactggatgacacattgcagcaggaagagaggaaataaggatggaacttaaatataatggcaaggagttaaggaaaagtcctactaaattctgtttctggaattatcaatgctattgttttatataaatggacattggagtttatgatatgatattgtcacttggaagtacaaccacacaggaaggaaatttgtgctgggaatattaaaaatgtcttatcacttttcctatcccaaatgtagacacaaattcagtcattgatacacactggatattttttcttttgcaggtctctcttatctttactcaatgcactaaatatataaataaatagatgtggtatttgttgttccttagtaatgggaaataatgacaacccccgccccccaccactggccagcatttaacctgaatgtctgtacatttgcttagctttccaaaacagtgcaaggtttcacaaagataagacagttcatttacataacccggaataatttggctggcaaactcaaggagatatagtatatggatcaagtttaacacattcatttggattggctgagtcccatacgttccttgtgcttgcagagagggtcccatctgttcagctcttggccagagaccatcgagcctgtgagcattgaaatttcttattgcaaaggcccagtatttcataactggtttatggtaccccagatactcaccagtaacattgttaattagtagcaacatgagtagccattattctagaactgttacctgcctgttatgaatgtatttagatagtttcaaaagccaacacattcctttcttgcatttatttccccttttgcatcatgtttattttattactcaaagattccttttccattgccctccaactagttagcccagcatatgaagacccttttaatgcctctacaatatctcctatagaattgtcattccttagtctctgagaagacctctctttgcccgttgaattagactacctgacgtttctttaacacatccttattttctaccctttgcagctttgctccttgggttctttctgtttggaattacctttatactcctctaatccccacctgtcacaaattatgctcattgcaaatgcttacctaatgctccatcctttgatctactcatattttctttcttcctctctttggatatttcacttctaacttctcatccttgctatatatccacgtcacctcttcaaatttcctttagtgtcaacagggtgccttacaagtaggatggtgccagttgggatttgatgactttaactgaaattttgatatccagctatcatctaaacatgagcaacagtaaaagaaatcatttcagggaaaaatgtggaaataacccacctcctccacttcctacttcccagccctaaagggatcatgctgccatcaaggccattctagccttttcatctttgctgttcttctgtggtcaaactggccccgcctctttgttttctgagtggaaaataaacacaaagagggacatttcctgcaagtgggcagggccagaagaggccaggtatagcttcagcatggctgcctccagagaacctagtagacttgtcatatcccaaggcaggctttttcttggattatattgtttccctttgaattctccaaaacctgtcagtgttttcttccttatctctcttgagggcagccagttaatctaagattagcctgacagcccctattttccaggtctctggtttcatcaataaagtaggctacatcgtttctgagccccatttcctcctctataaccctgctctcttcatccatattgtggtttattctttctacagcctgctccatccatttttggttctgttcccgtgtcctatttccactattgaataggagtatttaattcaataattgctttgactgtaaaaggttgacaatccctgagccttttgtgcgatattttcacctcattgctcttctggttaccaccagggactttgagatgaatgagtcgagtgaccagcagcctcactcaggattgctaataattgtcatctttactttctcagtgctaatggtaaacttataaaagcctttcacttatcacaaaagcctattttctagggaatttaggaaaggtaatgaagacccctacttttttttaaactagaggcaatatgcctcagtggagaatgcataaggtaattctttctatttatgttgatgtcatgcttttttattcctatttttatatgctttaaaaatgtgtatgaaatattagcctagtaagagaagaacagaattataaaaatgcatccactgatactgaatgctcaagatgatttcattgagaagggtatgtgattaaaatgttgagggcttgctggatttcagaacatcctgtctggagtcagacctggattctcagctccttgccttatcagtcttctacttgtgtgactttagaaaagccctttagtctctctggggcttatgatgatcaccaccaaattgaaagacaaactgtttcacagggttgttaaaaggattcagtgagataacacatgtgaagctagcaagtacctggcatgtatacttgttactatggttatttttgttgttgatgatatcagtattgctgttgctattgtagtattatattttgagtatagcagggggcttgagcctatctgcatcccgagtaaacagcatctcataccaaacacatggaaaaaaactctaaatgaatgaaaaaaaattaaaaattaaaaaactgcatgcacatactctttcccacatcaaaattaagaatagtaatatattttgtaatgtatttgcataacttttgaaagaaaaggaacagagtcattcattggagtttcatacacccacacaaaaataaaaccccaatgaatgcataatgcatgcaatagggccattttgttggtaaaattagctgatgatggattttctttggtattttcaccacaaaacttttaaagatgatgtttatgataaacctattttttattaaattttaccacgtcttgtttggctttaaagtgatgttctggtacaagatatcttaaagaataaaaagcttactgtgcatttctccagcatgtttgctgagatctgaagtgtgtaacagaattcttcagtgaggtaaagaaaagttcaccatagtttgcaagactggttcatgtggaatttataagaatggactgaccagcatgcccttttaaaattccgtagttaatctctttattgaaagctgctggactacttgattaagaaagctttatggaatgactgcttttagtgtcacacaaatgaagctgaactgttgctaagtaaatcactgtagatcaaagtactttgtagtcagagaactgcagttcatttttttttcattaagttttaaagagaaggtgaagggttgaagaatgaaacacaccaaatttgacatctatgatgtccatttacattcatgcacttctttaagcatctaatctgagtgattaggcaagtagtgcagtaaagcataaatgggcaagtgtaaagctgaatgaattaatacttgtttcctgtatataattgcccagatccttcctagccattaagaaatcagtaggcaagtagagaacacttcgggtgctcccaggaaaactgaagtggcactactgttgacttctccatgctttaaaatccctattctcatatttacctgatctgtaagtgtctgcaagaccatgggtgacagtttccctgtgatgtgaggggttccagggaatgatatttttgccttttatgtccccaagtgtagaaagtgcatctctgttgccccagtgtctaaagtagcgtatgaataaatttgggtggaataaatgaatacatgaacctatgttttactggattaggatgacaatgaggaaagaagtgagaaaaaaggacaaaaagaatggacagaaaatggaaactgaatctaccataagttttctacatgggttttagttccatagtttgaatttacttgctgtgaaaagttcaggcattgctctgttgaaatttttggatagtgtatagcattatgtagatacatttagtcatataatttctaaataaaaatgtcatgaactaggtatgtttatttctataagtttgttatgttatcatctttgttaatactttcaatgtatccattcggttgattggtcatacataaatgataaatcaaaactaatttcttatcctacatgttccactggtgataagaactgtagctaagaagtgtcaaaattttaaagatattaaatcttagtcatttattgatgttctttttgaacatgtaggggagaggatttacagaagcatcaaactgaaccaagtaagactccacactaaagttttatagaagtatgtatgaacaaaataaattctttaatagtgaactaacttatgaaatgaccttacattgcattagatgaaataaacggtctaagtttgggattatttctgctaacatgactgggtcagaaagaaataatgtcttcatgcttgaccatcttcaagttttgtggtgagatttttttaagttatcttcctgatgttgcaagatattacaaatgcattagcaaatactgtctaatgtgaaatgcatagccctatcataaaacatgtggtgagagaaatgattttagccccaagtcttcagtatcacagtgaccaaagaaatggtctctcagttgttatttttgtcatgagagggcatgagaagcaatctccccttccccttcccgggaagccccaacatcgagtctaatgcttcctatatcatgcccaatcgaacaaacgtgctagccagtatggaaggtcttcctttcttcatctttagaaatggtgcacttgctactgtagaattctaatccatggcattctgcagcctgcaagctttgatctttattagtttcataatcataacacaagtcttcaatgcactccaggctcactccaatgagaggtgattatatgaaagtagtaaatgctctgagtgactgagtcctcccaaaagcttgctggggaagacagcagggcaggctttccagtgtttttatgaaacatgagtcatcctgagatggactatgcaaaagcaaagtcccaggagtaaaccagtgtgggcaaagcttcaggttctgttttgcaggatgcacaatgccttccccaagtaaagatcctgagatgtcctacagttttaaagccccttgacagtttattccctactgcacaacatttttcaccatggaactatttcctctggcataatgttttttaatataccatagtttggaaaacactctcttgtgaaggatacaaaaaaggaccttgtattttgggcccaagaaggtgaaccaaagtccccgtggtgttttcttcagcatgtaggtactaattgggcaacatgactagtatgtggtttgttctagttggatgtaaattgcaaattaatatacagtctcaacatcattagtaacacatccttataaacaagagactcaagtttgagaattaaagaacttcttcaatgtcttgccaagtagattgtgaatttttgtattagataaaagtcctttgcaattacataatcattgtaggcttcattatctacattgcatttttcagtctttctaacccttctgccctcttacttgcattatttatttgtatgtaaagattttgttcgcagatgaagaggatgaggttaattgttaccctgcctctgattaaagtatcaggcactgcaatccacattagtgttgttcacatgatttggtcaagcattttactctgtggcacccagaaacaatttcagaaacaaaaagcaaacctgctctttccctttctgatcaaagcagtttggaaaagattttgtcttttagtgatgcttttgatagactgcaaaaatataaagttaagcagatctcagttggataaaacattctgtcatactaactttttttcttctactagcagcaaagaaagcccatacaaatttaatgaatagaagctggaatcacatttcttcttagtttggtcttttatttcctcccttaggcttagtataaatgagtagagtcacaaacatgggatatttttttcccctccatagagaatacataggtcactaatgttaccattttgtgtctgaaataacattctgcttagagatgcttccagtcagtcaccatcaaagcattagccccagtttgactgtgtctgagtccttgaaagaataatgtgccgagatgtaacattacttttactctgtatgatatattctgggtatcaacataatttggcctttactagttcagaagagaaatgaattcggtcatatctaatgtgcactgataactgctctcaaattaggaactcatttgacaagttctttgaatcttttgccaaaatttaaggagtttgttgatctttgtagtctcccagaacatgttagcttttttttccctgtaaaagtaactaagttgtatcattgatgacatgccatgaagattttcaagaatctatcctgttttaaataataatgagtttcagaaaaattgattttgctttgtgcacaaactataaaaagccttattcattaaacagattagttcttcctctgcaggctacactaaatgttgggtataaaaatgtataatgcctagaaagtgcattttagatgattattttaatataatctccgtgtgattaatttgccaggctgactatgtaggctgatacatccgatctggagatataccaaagtttaaaacttttaagggagcatatttagaaagtttcagttaaatcttttaaaacatattaatcttttaagaatatttacaatagtactaaaagatgcttcttcactctacatagaaaaataaatattttaagtcgagtgagttttggctttctttctcattttaatattaatgttccttgtatcagacaccagttttaatttttccatccttatactaatatgttgcaaatatatttgtgccaaaaatcaaagacaacttgaattcaaactaatataaaatataaatgttaattagtgaatcatattcaatggccattaggcaagcctataatttatgtcaagtattgggttaaatgctaactgataaaaattaaaagtcatataaatgagtgctctcttgaaattgtatgtgttattgtgtttttacttttgctttattttaattttcacaacagtcttttgagacagtacttattctatttgtccacttaatagatgtggaaataggctgatcccagggaagtaaaatgggtatattatataatcaaatcatttttggttttaaaagaaaataaattcttggccagatgcagtggctcacgactgtaaccccagcactttggaaggctaaggcgggtggatcacttgaagtcaggagtttgagacaagcctggccaatatggtgaaaccccatctctactaaaaatacaaaaattagccaggtgtggtggcgggtgctttagtcccagctactcaggaggctgaggcaggaaaattgcttaaacccaggaggcggaggttgcagtgagccaagatcatgccactgcactccagcttgggtgacagagcgagactccatctcaaataaataaataaaataaattcttaaatgtcttagtagctatgacaattaaatattttggttacagagtctgaaatacaccctttaaagcacatagtaatttgcttggacagataattacaaagcactaacctacactatttttaaaatatcaaggtgatctggaccttaagggcctaaattatttctgatcttaagaattttcccagttcatttctcactgtggtctattagtaatcacagctgcattgtagaatattttatacgaagacccagagaatcttaagtagatcaaaatatatctggactataaaccttaagagaaaagctagatcaagtattaaggatatattaattcaccttccattcaactatgtctatcagattgatgttggtctatcccttaggttggaagggtctcactaatttgtgagttttgttttatatattcttttctttttttaacttttcagatgatgacaaagagtcacacacacatacacacagacaaaaattcacagaggcacaggtatatagcatataaatgaagtagttgaaccctgaaaatttgaatcaggaacttcttttttataaagtataacaacagtaataaacacatgtcttaatgtaatactacttggtatggacagaattggatacagaaagtaaaaagacattttctataataaaacagtggtattatgcttaaaaaaatttgaatacaagtatgttaaattagtctgataaacaagaaacagcattcccaacaggtggaatattaatttcatcctgtttataatagtagttgcagttaaacaaactaagctaatattattatattctcaatgattaatatctcaggcattttgctgtaaaataaaaatataaaatgtgtagggcaacattttggaaacattttgctaccctgcaaagtggatgataacaattataaggtgattattttaaacatgatttagttgtcaaaaaagagtctgggaagggtagggggaaggcagggacagggagagagttgttaaaggatacaaaattacagctaggtaggaggaatacgttctagtgttcaaagccattttaggataactatagttaataaaagcacattacatagattcaaatagcaagaaggaggatattgaatgttcccaacacaaagaatggtagatggacaattgagatgattgatatgctaattacactgatctgatgactatatattatatgtatggaaatggcactaagtactccataatttgtacaattactatatgtcaaacaaataatgcttaaaaattaaaaatataaacaaaacaaaacacaaaaagcccatctctaattggaaccaccgttgattacgttagctgctgcatttgtcttcacttttctgagtaacacttgggatttgaaaaccatgacaattaaaaggtaattattaaggataagcataacatttagggttcaaatctattagaagcagattttttcagtagaaaaaattcaagtttttggtccgtatataaccacttgttcttggcagcgtaaaaggaaacctgcaaaactaatataaattatttaatttcacaatttttgacaacccactaaatggtggcaaataattggaggatggggaaatcaggagtaattacttaatgtaattaagggatgttcccttttgaggtgataagaatattttggaagtagatagaagtgatggttgcacaacacggtaaatttacggaacaccaatgaattttcaccttaaaatagctaattttatggtatgcgaatttcactttagtaaattatcttttaaagaatgcatgcattagtattccaataaaattttatttacaaaaatttattctttttaaaattgagcattatacacttcataaattattgttaatatagcaatggggattgtttaaggttatgtttagattatggtagtttataatttcttatatgaagtacctaacatttcaaacaattgaaattctatttagcttggtaaattctggccatttatattttacgaattttgttgtgcaaattgggtttgctgaatttgaagtgcttgagcagatgatgcggatgtctggggaaaaatcattccaggcataggtagcatcctatgaggtgagagcctgcttgacatttttgaaaaacaccatggggatcaatttggttgggttggagggaggagtggggagtggaaggaagagaatttatagagaggtaagcaggtcccagatttcgcagatcttggaaggcctgttaagtccctttagattttattctaaataagatagcaaatctcacggtgtctgagcaggggagggtcttaatcagatttacactgcaaatacaattgctctgattactgtgtgatgagtagacttggtgaggacagagtgggcagagataaaatcaagaagacaattaggaagcgcttgcaggagtctctagctccttgtgtggtcatggaacagacattatctccaggtgatttatacaaacattcaagtttgggaagtactggcataggtaagagtggcttcggatagggtagtacaggccaaggtgttaacaagtggtgggatattgcatgtacttctttacattatgatttgctgatgtattgtatatgggtgtgaaatttgggaaggataaatggaggtgctttttactaccaaagaggaaactgaggggtttcttggagggcttggaaatcaagaatttggtttgagatgcctttaggcatacgataaagtaatttggaagctgctagcatcatgatggttttgaaagctgtgggattagatgccttcacctggaggagtagctagaaaacagtgagtctgaggactgaattctgaaacactccaacagggcctcagaaagtagagtaacatccagaaaagaacactaacaatgagtgccaagtgatgtttgtggcataataactaggagcatgtggggtcctggtgtccctcgatgagcatcaaagaactcatgaacttctcgtgaaattatcagttgactcatatgtttcacccattacactctgagctctttaatgcagtgtctcaacaaagtcaggcattcagaaggtgtttaagaagaagccagcagataaatgaagaacaatcacttgttttatgatagtatattacttggcattttttggactcctagatttatgccttggtgaaggtaatttttcagcacgtgaggctgtctgggtcatctgtttttttgctcgtgattactcacctaagtactataggtaagttgggcggaaatccttgctgttatgtttaatgtcccttgccattttcactgcattagtgttccctccttgctatttggatgtaaatattcaccattttcactttccctgctgtactttctcatctgtctctgacaaaattcatatacatctttaccaggaaagcatattttatctaaataatagctttagtcacaaaggtgtgtttttttgatagataatctgagagaaatgagtggaactcttgatgttttccaaggaactgatttggtaaatcagatttactatattatgatctatttttctaaaaatccgacaagaactaagaagcaagaaaatgcactcaagtctaaccctaagcctttatctgaagcacgtttgctttgaccattagtttacctcccatagatttagggtagaggtcccaggtctgtaacatttggttatggctatcacttggaaaatggcgactagcaatacaggatgatgtactgatcggtggctgagttgttcatggtaaactgctaccctcagattttctttgccaagataaccttaatataatttaaaagacaagtcacaataagaagtgcttccgttggtagatttttttttttttttttttgagacagagtctcgctgtattgcccaggttggagtgcagtggcgcgatctcagctcactgcaagctctgcctcccgggttcacgccattctcctgcctcagcctcccgagtagctgggactacaggtgcccgctaccacactcggctattattttttttttttttttttggatttttagtagagactgggtttcaccttgttagccaggatggtctcgatctcctgacctcgtgatccgcccgcctcggcctcccaaagtgctgggattataggcgtgagccaccgcacccagccttctgttggtagatttaaggtagaaaaaaatcctaacgtgttatatgtttaataaccaaggttggttagaataagtagtttgaagaccttcaatttgtgaagaaggttgtcctggcatttctctgtccagctgtgcgtggacagagaatccacccacttcaagtgggacaaagagatcccaggaggggagccttaaaaagcaagtggaaattcccaggaaagagaaatcccaggaccagcttaaccttcctgtgtttttatctatcaaaaaattaatgataacccttttatattcaattcaacaatctaaaaagtaattcttgatgagctcttttgttcacaaagctttgaatgttgcagaagctataaggagtcattgactccaccacctggcctcaagttgattacaggcaggagaggcaattcatcctcttcaaaatataagcagccattattcatatcttgataaatattaacgttcctctcctgtttttctccttttgctttctcttctcctttataatttgagttgacttaagtacttattgtactcaagataaaagcattttcgggggataaatagccattttctgctgacgtgtatgactgtcacttagaagtgaaaggtgtgtgctactgtaaggctacagggtaagagcacacatgacactaggtgaaataggatgtgacataagctaagtgatagattcaaaaagagggcagctgtattattccagtcaagtcaggaagggtttttatggaaaaggcagcatttgggttggccttaaagaataaatagggtttgggaggtaagaagagaagtcagggaaagtgagcatttagatgtttgcatcaaatgagcagatgaactcccatggagagatccacaatagaacagtttgggatatggataggcagacaaagaattcacctttatcaaggtgaagtgtttcttaactccagaggctctgaaatgttttgaaaggctttcagcagagaagtgatggaactagaactatgctgtaagaaaataattgtgcagcagtgtattgactggggttctgtgtgggagctggggaacagggaggtgttgtagcagtccagtctggaaatggtgatgttctggggcagggtggtgctgcacgttatgggggaagggaaataaaaaggaagtatggggtgcatgtgagaaatgttggagaaagacatggcaggatgtgagaaataggccttggtagtggttgggttaggggacaagcaaataggactggggcagtggatggaggctctgtgatattggacacagggaactcagagaatggtggtgtcttagctcgaaatagagacgccatgaggaagacctggtttaaaggggaggaggagtttaatcctgaacttgtatccaaggcatgtacaagtaggaattttccacagccagttgtaaatataatcttggcctttgcagagagaccagaggtacagaaggaaatttggtcctcatttgttgcaagataataaacggagctggatgaaataatatcacccatttaggtgaattcatacaattaatcttctagctcattaaaagaaatctcagactttaagcaatacattctgagatacgacacacttattttgtctccagtagagcaagagttcaagataattttcttgaacaaggaacaagcaagagctctgttgaaaacagattcagactttgtgcccataatagcaaattattccataaatgggagccatgatccagtgaagaaggcatttccctttcaggcatgacatatgtttgattaccaagggcaaggttcctcatttgattgccaacctccctaattaggaggccttgaagatcattgcctgaaggttgtccaagctgaaaaagcattcgcaagcacaaacatattttatgtccagtaaaagtcactctagttgactgaatgcggttggttatcatagagacttacttgttagctccaggcaaacacggccagcagcattggtattgaagacaaaagacagccatcagtataaattcttgtctactatgcaaggtgtatcttttgatcttttcagaaagaactagaaaattggatggtatttgcaggagcctttcagctgagaaatgtcaataatgtaattgtgttgagaccagtacatggaattgacttgttgggagatggatacaggtgcaaggatgaaatgtgtatctgattactatatagaactgagtttgtgcatgagatcatgggtcaccaggctacatcagcaagcattaggagaatttaatgaatcctctatagaggcttctgagtgccaactccaaatctgaagtttttggaaaacagcaagaaataaaaaagtaagtttcctcctgctatttgcatttgtagtgtataacccagtttcctccatttggtagataatgtgatgactgtaaaatcaagacaggtcattccatttccctcaagcagagtgaatcaccttcattgtgcactgaatttctgcaagctgggcaagtaggagttttaagttgctcttaggtggtttttattcgctgcaggttatgttagcttattttaaaaggtatctaaaatgagcagcattggtgaattaaattgttcaattttgtaattgtttaaatgtaccttttggttttatatttttccccttttcatttattcagaactgtaattaaatttgttttttattatctgctattgagttatcaatgaatagaaaggagatggggaaaatagattataggatcctaacaacattaatttgtttaatgcttgactccatctccatggatagataacacttttggcaccacattattctctgggcaaaataagtattttctatttttaaaaatgtaaataattggccgggtatggtggctcaagcctgtaatgttttggaggctgaagtgggcagattgctttagctcagatgctcaaaatcagcctgagcaacatgacaaagaccccatctttacaaaaaaaaaatagccaaacatggtattgtgtgcctgtggtcccagctactcaggaggctgaggctggaggatcgcttgagtccaggagattgaggctacagtgagccatgtttgtgccactgcactccagcctgggcaacagcctgcctccaaaaaatgtaaataattgtatatcacatttcttctggttacactagaatatggactactgtatgttggtgttatctgagaatagatggtgtcttatgcatgtgtatctttgaagaaccaggaagtgactgcttacgagtggtctgttcatggatgcctcatgggatatggcataattgaacattctttttcttagaaaggaatccatgcttgcaatttttgtgataatagttaacattggccgggtacggtggctcatggctataatccagcattttgggaggccaaggcgggaagatcacttccattcaggagttagagaccagcacaggcaacatagcaagacgctgtctctacaaaaaatgaaaaattacctgggtgtgctggtgaatgcttgtagtcccagcactcaaaggctgtggtggaatgattgcttgagcctgggagatcgagcagtgagctatgactgcaccactgtactccagcctgggcgacagagtaagaccttgtctcaaagacaaaaaaaaatggttaacatttattgagtatttacagtgtgctggagactgttgtaagtgcttcttatgttctctcattttatccttacaataccaagaggtggctatcttccccctttatgaatgaggacaatgagacacaatgaaatgaaggaaccagccacaggtcccaccgcccttaagtagcagagtgggaatttgaacctatgcagcatgactctaaagcctacattgaaaaacccatcttgaagcaattcaaatatgtctaattttatcatgtaggaatatgcagtcatcaaatttgcatcttttgagcctttaataccaatcatcctatcttttctcaaaagaaaaaattttggaagatgatttttttcctgtatttgttttcattcatatcttttgggaacataaatttaactatatattcattttatgtaagtggctccagcacgagtgaaaatgacttcagagcaggggttttgatttttgcaggcatgtctaccactccctgtgatgttcagtgtgttactgtgtaatagatgattaataggggaaagtgttttaggtgattgttatgtctgtcaagctcaaatgcagatagaaatgtattgccttaattctctctctctttttttttttttgttttttttttcactttttgcccaggctggagtgcagtggtgtgatcacggctcactgctgcttcaacctcctgggctcgagatcctcccacctcagcctcccaggtagctagggctacagatgcgtgccaccatgctaggctaattttaaattttttatagaggctgggtctcagcatgttgcccaggccagtctcaaattccttggctgaagcaatcttccagcctaggcttcccaaagtgccaggattacaggcatgagccaccgcacccaacctaatattcttgtgtagaaaaaaataataataataactaattgatttttcttatgtcatcacattgcattacctttattctactagctctgttacctcaaggaggccatagaatcttctgttactcaacttcctcatctgtaaaatgggataatcgtacattctgtgcctgtgtatccatgagattacaagctttgagtgacaaaagttatctacttagaaaaataaaattatatatgtatatgtgtttataataaatatacatatttgatatgtgcaatagttgaatgtgcaaactgcaatggggaaaatattaaaactgtgatttttctggaccttaaatatagttaagtatattttaaaatgcttttgaaacatggaaaagttttctgaggctttggaagtatgaattcaaaatggtactgctaatgagagtaaatatttcaaggtaatgtgaaaagtctgagacagaggttattggccagtaatttacctggaggaaggcaaggtaagtctgcaaacatagagcatgtggatctttctgtactatgtcattctgttcatataatctgaacattttttttaatctccatgcattactatcttgaataaacaaaataattaggcaaagaaaacatattttaaaaagttaaaacgtgttggaagagaaaccatcagaatataagctgttatgccttcccagcctctgtattaaacatggaatttttactctttaccctaagtcattgggagaagatgaaagttttttcaaaggggaaactcaggaacatgattgtaaagaaaatgtctagttcctagagagagccagtaaaagaacatcattccacaagttactgcctccaatttaaaaacatcaaaacaggataaagagtgtctcctactgagcggaaagtagagaccagaaggtttgttgaaaccccagagtgaaaaccacttagagaatcggaatcgtcaagtataaggttgtgagatggattcagagaccagactgaaatatgtctctgccaatctgtgcagtgaaagtggatgacaagggagatgggagacaggagtcagaggtggcagaacaggcattggcctccctgagagatgtccagggcgtgagagtgaatttgtgagtaggtgacagaggcatgtcacaaaaagcaggcacagagagcaatacagaatgagaggtcattttactgtagcccaaaagttagtatggtccacggataccagagcctataaaataatatcatggatttatgaaatatgagaattctattgtgtgctgtgtgtgtagataaaaaaagtaagtgcctacaaattagatgtgcagcaaaatagaatcttttaagttttctataattgatgtgtttacttttgaatcccccacccttactggtagtgatggttggagtgggatagaattgatgtatgttgatgagttatcagtggattatttttcctccaaagtcgcttttggtttccaaacactttctgttagaaatatattcaataggttcacagttcaactcctgatcagttatttctatccttcttcccttctgaaaatctatgtttgcaggcagacttagaggcttctagtgtggatgtggaagcctttaactccgtgaccccactgtgtggccagtgcttgagttctagggtatgggcctctggatctattgtgcagtgtttggtctgattctgtcctctggaatcttactcgctttttttgtttttcaaatctgcaaaacgcacccctctcttgctgaccacctcttgcttggtgctacggatacctcctgaaatctggctgctgtttatatttgttcatcagctcaagtggcccatgctttagccctaagctgctgtgcccttggttcctgtcacagttcagaccttatggattctccttgctgcttgcctgaagctctgaaactttcttgccatacataggccctaggaaccaagatgagtttcccgctcaaacagagaaaatgttcaaaaccccattgcttctgcctgttcccacctcatttccaaaaattaggcaaaagttgcaaagcatctggcagcctgttttccctgtcattgtctctaattccttcccacaaacccctaagatgtatattgctccatcctgctatgtaggacttatcctggggcataaaaactttcttatccagagaaataagcatcatgccatagatgttcataagatatagaacagacattcatagccattatctacaggttgcaagagattaaatatttcctttattcatttaaaaacgtgtattttctaaatcttctataataaacaggtactattaatacatatattcataaaaagaaaaagtgtttacaaattgcacaaaataagatggaaaagaatcctggtttttctgcttaaaggagtacttcctattctattatgagatgcgagaccctgcaaatgctaacagacagagataaatgaaagatacaggaacagcagtagtggttaggcagaaaaaaacctggaccttaaaaacccgacttcagtaagggcaaaaggagtttctagagtccctgggtccgtgcagtcaaagcagataatcacaactgggagaatttcaagagaagacagattgttcacttgcaggattgcaactgttttgtttactcttggttgttgatctttcacttgtgactggatgatcatacaaagactccagcctcagtaagtgatgaattgttagttgaaggagaactgtgttttgtaataaataaggtaactctttcataatctctgctgtcaggatgctctggggtatgttttggggttcattagttctataatatctctgccagttcacctctacatgccactccaaataactaatcagaggacagcttgtgtgcttgctgtgcaagctcagtggaagcactcagctcctcaaacatcagattgtctctgcccagttcttcctggagagaatttctcagttgccctgtattcttccaaggtctctccagcatgttttggttcctctgaatgtaaccctttgcttttgaatttctgagtggtagatccattttaccatctccttacagtattagtacccataaagacattacctgtgattgagtctctttgatcaagggctgtaaacccatccaaggtgagaatgtaagggtgggaaaatccatttttctgtgacatcaggaccaaataactgcaaaggaaaggtgcccaaatatattaaatattgtcttagtgacttttactaaaaaacataactgtgagatggagttctgctcgagtactgtcaggcacttaatatattccaaataaatatggctggagttagattgactgaacttattcacagagggagagagtttggaagtgacttactgataataaaaaaaaaaattttttttaaagggtttgaggtgaggtcttacataggaaaagtcattttctgatgttctaacttgctttactaatcttcaggaaacaactgtggtacattttgtcctaaataaatgtttcttaaaggagtactcaagtggttgttaaagttttaagcactctgcatctttttaaataaatgcattgcttagcaagtacaaatgtgagtctcccagattccatcgccccactgacttctgccaaacagtgctagtattaatttttaggtgaaaagacaggtcagaacagtctgaattcaacattatactgatgaacgactattttttaaatggctgcaaaatgtattagtatctctaccaagacgtttcataagtactaaataatgtcagtaggttttgtgtctttttttttctttcctttttttttgtttttttttttgttttttttaaaattattattatactttaagttttagggtacatgcgtacaatgtgcaggttagttacatatgtatacatgtgccatgctggtgtgctgcacccactaactcatcatctagcgttaggtatatctcccaatgctatccctccctcctccccccaccccacaacagtccccagagtgtgatgttccccttcctgtgtccatgtgttctcattgttcaattcccacctatgagtgagaatatgcggtgtttggttttttgttcttgtgatagtttactgagaatgatgatttccgatttcatccatgttcctacaaaagacatgaactcatcattttttatggctgcatagtattccatggtgtatatgtgccacattttcttaatccagtctatcattgttggacatttgggttggttccaagtctttgctattgtgaataatgccgcaataaacatacgtgtgcatgtgtctttatagcagcacaatttatagtcctttgggtatatacccagtaatgggatggctgggtcaaatggtatttctagttctagatccctgaggaatcgccacactgacttccacaatggttgaactagtttacagtcccaccaacagtgtaaaagtgttcctatttctccacatcctctccagcacctgttgtttcctgactttttaatgattgccattctgactggtgtgagatggtatctcattgtggttttgatttgcaattctctgatggccagtgatgctgagcattttttcatgtgttttttggctgcataaatgtcttcttttgagaagtgtctgttcatgtccttcacccactttttgatgggattgtttgtttttttcttgtaaatttgtttgagttcattgtagattctggatattagccctttgtcagatgagtaggttgcgaaaattttcttccattctgcaggttgcctgttcactctgatggtagtttcttttgctgtgcagaagctctttagtttatttagatcccatttgtcaattttggcttttgttgccattgcttttggtgttttagacatgaagtccttgcccatgcctgtgtcttagtaaatataagcaataaaattgtcaaaaagattattcttggtggatgaagacgaaaatgatttttggtttagtcaccacgtgtcataagcagagctgaacagtaaagttcatggagaatgtatgttatctatccagaggagatgtaagaaaatcacaatgatgcacggtgagtcaacagtttttaaaacactacagcaacgttagtgttttcacctttcatgaaggaactgtcatgtgaataaagcctctgttgaggattagtcgttgatgctatatgttgctgtggtgtgtcatttaggagcatttttttccttatttttaatccataagcagtgatgggatagtaaaagctatgaattaagtgagccttgtttgaaataaatgaattatctctaaaacaatttcatatatctcagttctccttgtagtggggtcaggcacacaaatatgtgtgtgtgtgtatatatatatacacacacacatatatatacacacacatatatgtatatatatatgtattttatatatatgtatatctccaatgatcagactacatatcttgcccaattggctaattgtatatgattgaacatgcatcaaggtgtattgactctccttctcctctgtttctctgaagcactccatattattgcatacattacaccttcacctccggtctgtctccatttatggatcctccccatcttgtctttggttcttcttccttggcatactccttcacactactggttttctagtgtaatagtcttagctccatgttcttctttttctacatcttctgcatttagatctgatttttctttctacctccacatcacccccatgtcaatgaaaagtattcatatctttaactctagtttctgccctttctctgaagccatggaccagcatgtttgactggctgatgcgttcccacagtaaactgcaagtttatccattcaaagagggaacccgtgacttgtcttccactctccctgacactcttcctgatataagtacgtggcatttttcagcctctcttcctggcagtggaactctcctggctcattccctccaatatctagtcatatgctaagtttgatcaacctgatttggtaggtcctgtataagattctcaaactctcatttccaacccactttcttactttttcaatgaccatagtcagatattttgccttaacaacagctccatagtaccaatcactttgccttgtaggggttttaaaaataatcattcttttccaacctgcttgaaatatgacagctcctaaatcaataaactagagttaggtggcaaaatacttgattcccaacaatgaaactcaggtccagagtagtgtcacatttgttaatgtaaataccctcaccatatgtgcatatgtgttttaatgaagattagaccccaaattttagggcaaatttatcataattattttaggggaacaattattgtgattctggcagtgggaaagtgatctctgaaggaccagatgactgtgtatggtactgccatctatcactttacatggtagactcctaccaaactttcttcctgcactaagctgacactatctccttgtggaatatgtagagtgttggctcttctctgattccttcagttccagggaaaaaagaggtttccaaatataataaatatttcccatgttgaataaaatattagcagaaaatattgttcatgttctattctccagctttaggattttagtttcatagtcatattttacatatttttactaaggtttggtaacaagcatcaaaacaatccaagtagtggggtgagagatacactatatatctctggtcagagtgtcaacctgatttgtatgcagcagaacacaatttgtggtctactgaatccccttgtaattatgctctctttatatatctcaggttttctttaaatcattctttagtagggcattgtatttatagcagtctgtaaatttacatggaaaaaccccaataaactttacataaattgagaaatatttgaaagcaaatagaagtgctagacagtgcccttagataccttgtagtttaatgttaacaaaataaaatacaatcaaccaaattctgatggagcagcatgtcatcaacaatgacatttccaaacctgatgttactgataggggttttattagttaattaaatgtgtgcagactacatgcagtgttgcagataatgtagaagaggacatgcatgcttcattgcagctcaatttcctttctagaagttatgacgatattaaattatttaaatttctaaaatgagccacccacattcctccaatctttttattgtaaatttctatccacttttcactaagatgaatttgtttacagtttatttttgataagtcttgcaatactttttggggagtgttaggggaaagaaactcattcaaattgagcagatttccaatgatttgcaatccatttatttgggtagacttgaaatacaacagggacattcaaaagtttgagcagtaatttatgctatatttatacataagccagatttcattcccagaatttctgtctctcctatggttttttgctctgatttatgaatttatttgtaataaaatcaggtaagtcaagcatttattctaaactcctagtctgttttttataacttacacaattcgtacacttccaattattaattacttcaattattcattcagcaaatattgactgtcttagagatacagtggacactattcttaatgctgggaatgtgctggtgattacaaaaccaagtcgcaacacatgcaaagctcatttactctttatgcttttcaaccttaaaattttatcatcaccaaaaaacatttctttgcttagttgatatggcagtaccagaagttaggtgaaaaacaggtgcacattcagaatacctactgtaagaaagagcttaccttacaaaatactatcagaaagaaattcactctttgttaaataatagtgtcaattgtgtggacaattattctgatgctagtgatgaaatatcaaaaagagaagcaaggaatatccctagtttcatttttggcattatttttgtcatacctctttttatcattgttagctttgctagaggtttgtctgttttattgctgtttccaaagattcagctttttgtttcattgataattctctattacattactgttttctatttcgttggtttctgctttttattatgccctttgtttgtcttatttaggtttacttttctttttctaggtttttgaagtgggtgcttagataactgatttgagactttcccttttttcagtgtatgcatttcctttcggcagtgttttaactgtgtgccacaaatttttgatatgttctattttgagtttaattcaggttaatgtaatttttgatatctcttgcaactaactgcctctttgacccatagattatttaatagtgtgttgcttagtttccaggtgttgggagatttctttctgttatccttctattcttgatttctagtttgaatccattgtggctagagaatatactctgtatatatttaatttgtaaaaatttgttgaggattgttttatgacccataatataatccatattggcatatattctgtgagctcttgaaaagaatgtgtaatctgctttgttgggtatcctataaatgtcacttcgatccttttagttgataatgttattgatttattctatatccttgcttattttctgtctagatgttctatcacttgtgaaaagatggttgttaaaatctcaaactgtaattattgaattgtttattttcccattctattgtccttttgcttcaaatacttttgtagctctgttttttgttgcaaacacctctatgattgctttgtcttattgctagttcttttatcattatgcaatgttcttctctatgttcaataattgtctttgctctgagtctattctatctaatattaaaactccctccgtccctccctactcctttgcctccctttcctccctccctccttccctccctccctccctctctccttccctccttccctccttccctccctccctgctttccttccttccttccttccttccttccttccttccttccttccttccttccgtccttccttccttccttccttccttccatccttccagcacctttattaggaagactgaaatgatagtatgctgtcttaaaaagcttggttgtaaaaggaaggacttgaaaatttcctttctcatgtcctcaaagacatggatttcatttatatgcaccttggtctttcctcagacctctaacttcagcctggagttgagcagaaacccagcttagtttccctcaaatcattcttattctccagacatggtgctgcacctttgaaccaacaagcaggttactggtagtatacttcttaattctgaaggcttttcattgttatacaggaacaagctacacctgaatcagaaaattatttagttagcaaagcatccaaaacagccaaagctattctacttatggttgttaatggacagtctaagaaaagctaagcaaatgtcatctgtaggcatttgctgtacctcagactcttatgggacaggtttgcagactgtttcccagttccccagtgggttcataattgctgactctttgcactctcctttgattaatgtttgcataatatatggtgattgaggtttctggctccccatatggccttcactggcaccataaaaggagagatgtccctgtaactgctgagtggtgatagaagtgcctactctttactagacattgtctcatacctccctagtgagaagagagaggggtgcctcattattggtgggtgggggtagaagtatgggctcctcgtgtagtctccattgacactacagattatgctctaacattatcaataatcacattaaatataaatggtctatatattaatatattgatgaaaagccagagattgagagaatagattaaaaagcataatccaactttgtactatcagcaaaaattcactgcaattacaataaataaacttgttaaaaataaaaggatgggaaaagatatacgatggaaacattaatcaaaaggaagcaggagtggctatatcaaaggataagtacatcaataaaacagcaatcctaaatgttcgtgtatcaataataggatacttttaaaacttttctgttgtgacttacattgttttattgcttttcaaaagcaaagaaaaaatggagtttttgttggcatagtctattatttttattacaatactattagtagtcacagcatgtaaggctattaataaatgaaatactcgtaggtgataatcatgtttggatattctagtttgagcagaattagaagctcaaaagtatgctgagtttgttcacatttgctattgttttaaccacatttgaagcaacagtttaaacgtttttttgtcacttgggaaaactgtcagtactctataaggaggaatgaaaataccagaactataaaaagaaatgttcaaaagcttcaatcaacttttataatatttccagctttaaaattatcattattaaattcatatctatcaagacagtgtatttcaaatcatcagttttttccatggcctgctgtattcaagctaactgacaagtgattatgtaggttgtatcattattatattttttaaaatgccaatagacatccccccaaagcagcaaggaactacttttcaaattcacttaaatgacacacgttattctgtctgtctctggcagctcttcattcctgcccagagtttatgggtagatgcctttaaattgtggaggagaccgagtacaatgctgcattcattattccagacagttgtcatcatactgaaatgaaaactccttttaaaattttaattaaaatcctagaattggcatgccctttgggtttctagataatgtaaaggtttttgaactatctggaaatgttaaaaattcatgcaaacagaggtcccctgataaagaaatagagccttctgccgctattctttacatatgacaaacataaacaccccaacttaaattttcccttttcttccttgaataaggcagatttataaaacagtctcataactggaatgtatattaacttgttagaatcattgatttaaaactgttctattctttacgcaagggaaaaataatgctggatttctcagtttcaagtacagaagatccaactcaataaggatgtttattgttaaataatcagaaatctagatatagcaaagtcccagggtcagttaattcaggggttccatgacttcttcaagaatccaggttttgttaagtttggaatttgggcacctgttatggaggaagaggctggtgggaagattgggtgagcatccatgtagcctgccacatacagcaggcaaattaccagggattatgttacatagatttaaatagtcaaacctggttaacttagagtgtgggaaaaccttttctgtaaaaatgaagaacaatcttgtttattgtttatcaaacatttcacatagaggtatcattgcgttgtaattcctcctttagaaaacattgagaatggctcaatactttctacatggatgtttatatagaccaatgacatttatttccattgtattgtcatgcttccatagccaattagaatgattcacccttttgacaaattgaaaagacggtttgtggaaataaacaagttaggagaacgctactggaaaacaaataatctcttacttttgttaatgttgacaaacatagtccacagctatgtggatggttgtgacagatgttgtattctgattttgaaaactaggttgaaatgtaacatagttcttgacatatgcatttttccaaaggtcattgggatcaggtttatggctagagagttaatgattcgggaaatattttcattgaggatgaagcttggcaggggttgggggtagtatagccttccggtaggcatcatagagtgtgtcacatacaccagggagattacaaaggattatattaaataggtttaatcagccaaatctagttagctcagattttaggtaaactattaatgcaataatgagagataatattggttcattttattaaacaatatgatttgggtgatctggaaaaaatgatctcaaagaatcttgcaagttataaagtataatcatagaaaaaatgcatttttgtttagagtttcttataattcgacctagcaatggaccatttcagtctgatttattcctttaacacatgtgtgaggtactaggaactgaggtacacatggtgaacaagacaaatacttctgtgctctcatggagcttacattgtagtgaggagttcagacaatggacaaataaacacctaaaaatatcattcagtatcaggtaagcagtaaggctattagggaaactaaagcactagtgtggataggcagggagatacatagtgcaatgccatatagctcctgagaccttaaaaaaaacaaaagctaatgggcgcatctctgtgtataggcaaaaaaagactcttaggaatagagacctcagtaaatctaatgtcatagaattcattgttagccttatccatattaaaccagagcccaccattggagatctctgttccctttgttccattgtcccattagccaattttaactttgggtcttagggtgcatcagtcccacgttagtgaaacatacatcttattgggttattcgattggcctatttctgaagtgatgagcaaaagatacactttgggattagcttaactctgatggactttgctttcattaattcatttatacttgcatcttttcagtatgtatgtgtatcaaatgcctgttatacacaagaggctttatagtagatatgtgacttagacattgcttgcaaacaggttagatataatatctaaaaaagatttgtagtaacaaggcagagtttcagatatcttaagagaagcagaggtcctgcttcttttgagaagatggcttattggctatgagtttgcttggtcttggctgttacaaaccagtctctctgggtctgtaaggctctattaatatttcagcattgagaatgattggagtgccagtgaaaagaaattaatgaaacaggttctcagctggatctacttgttattgatacataggtgtcaggagatctgggttgtaattcactgccatctaacctctttgtacctcacttagccacagaatgagagttatggggtagatactattttagattctttccaatgcaagttattgtatattctattactttattcatagaaccaaaacaagcacagatgaatttaaatgtaggcatttggtttttcattttgcctcccccgttcactttttaaaatatgaattcaacctttatcctacaaggcaatattttctatacaattatggagtctattagaaagacttcattttggttgaagctttataatatcagacatactgttgttggtaaagaagatttaaactgagtctattagcctgtatctgagaggtagctgatagaatgcatataatgagaaaattgttcttgaaggacacactaaacaactgtggtttgtatttgtttgtaattctgttgtgaccagacagatgggtgactataaacaaaatatcttcctattcccttctgagacatatgcagggtcgtctttccttcagcactgtcatggagcagcacgcaattagctacagaatgttagccaccctgctggatgcaactccacatctccctctgtggtgtataatagtacaaaagtgacattaaacctatcaaacaatcgtattcaggcagcatggcatcacacaaccccagctgtttgtgttagtgattttgtttttcaccagaggagatttttggggtgaatgtaatgaatggacaggctatgcttacttttaatgaaccccaagttaatgcttcggtctttttctgtccatttaaatgcaaaggagcacatttcagatcataatgaaataagcacactaatacacaacctcctttcttcattctgagcctctgcttccagaattaatagcttcctggtagggcatgtttgacattgttgctaaactctaaacagggatctaattcagagacaaatttacatcagcttatattttgacttttaattcctctggcaaccaaagaacaaacaagcaaaccaagaaagtataaagagtgactttatgaagataaatcagaatgacctgtatgttgaatccttgagaatacatctcttgtggtttcattatacttagattagtgtgtcgtctgtggtgatactctgtaaagcaaaaaatataggtcagattaacaaaatgaatgcaaaaatcaatgcctgcaagaattagtgattcaaaagatagtattaactaaacaaatttatgttaatcacatagttaattcctgatttatgaattatatctctgactagttaaatctgaggtcagttttatgtgttgataattacatgatgttaaataaagaaatcattttgcgtttattatatatattgtttcttttaatataactcagtaacaaggaaaaatgtgcaaattatttttagcagatatttatctagtactttgcagttacattactgagtgcctcaaatgtcctgagccctgtatagtgatttctatataaaatataattgctgcccttatgggctttataatctagggatctcatacagtagtggacatctagtggatcatcagaatcacctagggatcttttagaaaatgtttcctgtagctatacatagaggttctgattcagtgggtccaagtaagaaatctgaaatcaatctttaaagtttcttccctaatttcagtaacacacagaatcggggacttctgaggtaagtaaagtactttcaatctgaaaaagactttagaaaacacccatctattctaacaccttcatggtaaataaaaccctagggattgcggagcaggtgggcagaaccaaaagtagaattaggaggcccgattaagaacattctccatgttcaaacacaggcccccatctttgccgcagctgggaagttgatgagtggcaaggtgatgcacagttctacctctcttacggggtatcctctcctgcaacagagtctttaccctgtgcgggcagtgtgggtgatccaagataccaattaataagtacgagtaatattaagtcatggaaggaaaaataagaagggcagacgggagagaagacatggcttcgcttaaatactactactgtggcctttgcagatatttggaaacttggatttggcatcaccaatctttaataattctatgtctttcaaagtccttctactattttcaaaataggttgaataaaaataggtaaacaaatagagaatgagaaacctaattaagcaattactactatggtagctattactacctacctgttttcttcattagctaagtatggatatggtaatcatatttttaatgttgttgttggtatatgaagctgaagataaagataaattcagaccaaatttcagtcttctcataaatataacattttttcttattcaaaatttaccttatggcctgagacatgaatcatgttataatgcctttggtctttgattttatctctaatcatcctgtttttgaggagtaccatggagtccaattagcaactatagtcattgataagcagtcagttcttccattcgtctgtccctttaattgcttcgtgccacttctgtctttgaaatccatgttatcctggccttcgtaaattaaaaatagctcctctccaatatggtatcaggcctaattaattattcatacattattattttcctaattattcttcttgatgtaaatgacattaaaagtctgggtctatttttggaactcataagaccaaacaaaacaatggctttaagcaaggtgaaccagatgatgcctttgtgtgcggtaatgtaataacacagcaaagccaagcgagggagagagattattccatcagcattgaggactgcttaaagaacttgtattttccaatctgcagaagcagaatttcttttaacctcagctttacttcactatcagacggcgtggagtggctaaatgctagtacctggctgtctaagtgggtctgggccttcctggcacttccctccccaactccccactgatatatacaatggtagaggggaatgcgggtcaccgtaaattctccagtgtactcctgccaccgttttactaccagaggaaagaatgagtcttctcattttcactcctcccgatggtagcaacttcagagggcccttcgcccagtggccattctggctggacaacctgtacaacaagaacagggacctgacagtggagtgggcagggactcctggcagctctgcctgcttcccttggccctgatttcatgacagattcctgtgccaggccaattaattttaagacttccctgcaatggattgcagaagttggagaaaatgaggaggccagaaaggtggttcttccctatttctaactttcctaaagcaagaggaaaatatataacggaggaacctcaggatcttttctgttcattcttgagagtaaaaataacaatttttaaaaaataaaatgaactttaaagatttgtttgcataacatcaataaatggtggtggactacctcagagtccagttggttatttgtgcaatagatcatgcatctggcactttttttttttttttttgatgagggagagagcttcctgaaacagagaggacatggagtaagctggaggtgtgctcctgaggttgcttgcagatgttgtctacacatgagtggaagtagcaaggtcagaggagaccccttcatggaatatcagtctgtatcttggatgttgttattttgagccccagaattaggaaaagtcaagatattatgggctggttttactgaactcatgtaacccagcctcttttattcacaatatccatattttaaagcatatagtcatataaaagtgagtgaacacagtactagatatcgaaaattaattttaaaaacacattcagcattgggttttccatctttgtagtgaaacaaagtcagggtttatataattaatatcaagcaggttaattctgctcaaaaactgccttagtcagtggatagtatcacaattattgaactcctgtgaagccctctgtttcgctttggctgtgcttgatatagccatctctacaccatcagagctctaacagtaagacagacaaggcttgaaagaacagaacacccgacatgattgtaaatgttgggtagacatctttaattgcagacctaattaccatgtgattttggtttgtattctatggttagtaactatatgaaaacttacttttatatcatttttcagtttgaaccatcctttaatttctgtatttacatattcttgctcactttttttttttttttgtgagcagtctcaataaatgatatatataaaatgtcctggctgtgaccagtttaggcatttccagacactgtcatgtgcacagctattattttctgcttcattcgtgaatgcttatattaggaattgctgaaaatatgtaagcaattttaatttaatatttttagaagtgtacttgatttttgtcctttctttttcccactaaataatttatgttctgaaatcttgccttcaaattagtttaattttcctttctaacttagatggtttcacaaatgcacagttgtacaaatgtacacacatacacaatcttctttcacaaagctcagcctggctacaagtgcagaaagacaaaggagtatttctcagtagctctggagtgtcagagggtacttcatgcttagggtaaagatgggccagagaaacaccagagcattgaagtgaatctcccatgatgtcctaagaccacatccgtatgaaagtccaagaagtcaggagcagaaacttggaaggagcaaagtcaaagaggttatgaagctctacatcttggagacgagacacacatgtgcaagaaggtttagtgccaggaaaggggctagaaggtggagagtgtcttgcacaatcccctagactggacaactctcagagtttacaacttgcttttatgagccctagagggatttgttggtgggagggtgagcctgacttaaaggttcagggtggaaaggacgttggtcttgtttgaaaaacgttgataaaacaaaaagaagtccactactctagagccctcgttgttggcagctgtgccccagtagcagttctaggagggggaaaattcttttgttaatgctgtggttccttgacttcagtttggtttgatgcaaataaattctttcatgtgtatctcctgatgaacaccctgattttaaatcctctgttatgatcttaccaccaatcttctatttaaaataggagataaacaaaatgcttatgttatagaaaagagaatgtttgtttgccacataatttcctagagaaacttccaaactgaagtctattcttcaaaagaagcaccttttgttacaaaggacataaagaggtagggttgaaaagttaatcatacaaatgtgtattttaattcaagtaaatcggttgtattttcctgtggaataacattttcaagtgaatatttgtgaaatagcactgtagatttaagcccaatatttctttttctaatttgctttttatttgcattcaaaatcatggccttgctttgaacattctaaggtattttaaaagcctgtagtgactgagcctttgaaataatatagtaagcaaaatataagtattaagactttagtaattatcctggcaaaggattgtacataattatatagttttgaaatcagaaatgaccaaagaaatgattctgctacttgatggcttcctaatggctagttgataagcatgaaacaccttagcatgaagtaaggcactagctccaaactgacatatttaattcatcctctggctccattgtttgctccctgcgtttcttctatgacaacatgatgccgctgttgttcttcctccagcactggttggcctttgctctgctccatctggaaatccccactcactttcaaagactagtttccatataacacaactcttaattcctcagttaattgctccctattttgtgtccctaaggcactttgtacatggtgatattttagtacttgtcatactgtatttttatgtgttttcatgtctatccctgtagacttgtggttctcagccccagacccaaagtatcctttttagaataaacatttggtaatgacttattatgatcttgacataaaatccttagatatgtcacttcacctatccttattgtttttaaaaatcagtgtaaagaagccgggcgcggtggctcacgcttgtaatcccaccgctttgggaggccgcagcgggtggatcatctgaggtcaggagttagagaccagcctggccaacatggtgaaaccctgtctctacaataaatacaacaattaccaggtgtggtggtgggtgcctgtaatcccagcccctccagagcctgaggcaggagaatcgcatgaacccaggaggcaaaggtggcagtgagctgagatcatgccattgcactccagcctgggtgacaaagcaaaactccatctcagaaaaaaaaaaaaatcagcataaaggaagaaaaaaatagtttataatatacttatacaataaattatacagctcaagaatgactttctaacaaggtagaatcagcctctacaaatttccgtaatgcaccctaggagacagtatcttctcctgggcttaggtaatcctcccacctcagcttcttaagtagctaggactacatagcccagactatatgtacataattttccatttatcccaggacctatatagtgagcaaattattgtctataatatcagactgagaattatctgaaagtgaggctatacatcataaatacttttataacctaaatattaagatacttagtaattgcagttgattatgtctagaatgttggactgattcatataagaaatctattaagaacttaagcagatggatgaaaataagtgaccagtctatttttaatccatattataccaatagattcatgtagatttcttatatatgccccattaacttttacaaaagaaggaagagtaagtgaaggaatcaaaatacatgggatgaattgtcatttttgataatttcatatatgccttgaatttagagaacctagaattcagtcttcccaagtcacttttttacttccttaatatgtaggctaggaaatctctcgtaataaaatgctgttgaatacaatgaaaccataaagaatacccaaatggattgtctcgttcgttcagtggctgcattttttcaaatactgttatacctgatttttaagcagtgggaaaataaatatatgtaacttttattaatcccacgtatttctcataaactgtaaaaaattggtatatggtcaattaatgaaacaaaaaggtgctatcgtctttaaaaatactgggattaaataattagaagcagccaataaatgttggttttggttatagaatagttgaacagcttaaattctgtctcaaaaaaaaaaaaaaaaaagagccctgcaagtttctctttgtccatctcttagcaggggtaaggcgatgctgggtgatattttttcagtgggaaaatgctggtaagggatatttacattttatttatggtcttaatatgcaggagaaaatatctctctgattgtctatgcttatcaagattaaaagttactgatgagaaaaatggaaaaatatatagtaagttttaaatcacagaaattatttcagccaattaaattagaagcctaagaaataggaaaatccattgcaggagaccaataaagacagaatttgatgggtacctagatataaattttgcagccacttactgaaatgcattgatgaccaaggaatattggggaaatagactcaggataaattccgaatagactgatatttatggtttgtttagaaataaaggtattaatataagaattggtaaggtcatataaatgttctagaatacatcccagggtgatgcgtaaagagaagcttcctcattaaattgttcttcatgttttcaaagatctagagaataggaaatggaattcctttttaacttgtaggataatcttgttgaatgtttagaaagagcattttgatttgcctcagatgcagcagtccttatggggttgagtatctagagatgattgtatagaaaatagccagtcactgtctttagatataggtaagggaactggggtgccactgtcatggaaaagcagtcaggcaaattgttggtgatattaatactctgcactatatgcctctacttttcttctctttgtcctgttccctctttatgtttttctcttttcttactcattgtcttagattgactctagcaaagacaccccatgcaatattggcgcacacatttattcaatcagcaggtatttattggtccctgactctatgctcattgatttgtctccaggtagagagtggtctagattaactccagatagttgcctaaaatctcttcacacaccgactggcattctactaaactatttaagatccaaattttattttaagtgtctcattttaaattcttaatctgaaagcataaattgtgagtcagtcttaagacttaattgattgcatgctagtaagaaactgactggatttttttaaaggacaataacctgaaataaagctgttatattagctctaaatcatatcatattaaaaatgaaatatatagacaaataatacaggaataagtgtgtgtacctgaggttatgatttattcctcagtgtttatgatgtcttattttctctacacagtggacattgtgctcttactcagaactgatagtgtcattgctcaaggcaaaatctttactaagataatttagggtggagttgtttatgatgctatcgacttgagatggacattctacactttcaaaaaaaagggaagaattgtcagaaagcattgtctaatatgccaaattttaaatcataattattaattcttcaaactaatttctagaggaccaggatgactgttagctcatattcaggtctctgaaataagaattgagcattgtttttattgctttagttacaggagcttgtgggcaacatgtctcactgaggcatttataaggtaaaacttgccttctgtctgggaacgtgtcattgagtcattgcaatggaagaaatctcataaatcacctagctcaattttctaatttcatagaggaagaaactgaagtacagtggatttcactgacattgtcattccacaaggttaattacacaagtggcactagaatataggccacctaacttctattatcatgactttccaccacatcacactgcttcattcattctttcttccatccatccacccatcagttcaacctaatgacacatacatgttgttgctgactacttaccagtcataattacaggggtttaattgatcatttaaagtatgttactttttaagattttctccggagaaaatattcaaaatacttcagttttaggagaacaaaagcctatgtccaatttgaatttactttaatgaatatatatttaataaatatacagatattttgagatcttattatacaattcaaataaaggaaaagatttcaacttgtccaaagtttgtacgagatcatcaggtagttcttccaagtgatatttttgactaattcctaaagctgatattgactagtgttgcaatctaacttgatgtcagcatgcataactgttcagtgtactgtaatagacgcttaacatcaggctttctaattatcttgaatcctagaaatgatataatagaccattcatttttattcctccttaagcgttgtaattaattattgatttaaatgggaatgtttcacaaattttatttcaaactaggaccgcatcacttttaacttaaaattgacttcagctttttcaatcgatttaatataattcttcatcatagttaatgtagactttttctccactttgtattaatgactttggtaccacaggatagtttaagatttatattattattatttagcccatgattctatgagaatatcattggcaattatgttgttataatttctgcaatagtgctaaggaaaaggaaatatctgatttgtgaatccttaggtttctagagctatgttgccagtcaaataatcttataaagacataaaaggtgctgtgcatttgtacatcttgaaaattgacattatgccattactttcattagtgggaatatcattcaagtctttagaaacaaattacatttttatgtctagcattgtttctcaaagaaacattgaataatgctaagctaatctttggggttatctcatttccttttcaacactttatacattgtccctacttccctaaagcaatattttcttcattctcttgtcctttggcggtttctctctacacacatagtccttcactctcttctgcccccacccatcctttccctctctcattcctctgatataaaagttggtaccatatttccaggggttcaaatcaatccataattgcggtctagagtcctgtgtggaaagattttgagattacagctcagatcaatgggaaaggctgctatgatcaaatggtgatatctgccctaaatgtttgcttgaggagtggtagacttttccagctttccttgaaacaatatctccagtgcatttgatacctccctaacatcatgacgattaactaatctgaaaaacaaatctccatatatttattttgagatagggtctcactctgctgtccaggctggaatgcagtggtgcaaacatggctcactgcagccctgacctcccaggctcatgggatcctttcacctcagtctccggagtagctgggacagcaggtgtgcaccaccacacccagctcattttttaaaagagttttttgcagagagggagtctcgccatgttgctaaggctggtctggaactcctggcctcaagcaatcctccggccttgccctcctaaaatgttgggattacaggcgtgacccattgtgcccagctgaaatctctattgatgtactgaaaaagcttggctcccagcttctcatttctcttctagttaccattacttatgtgtagtttaatactgaccttctgaagaccatgtcatttttttaaagctatttttggatagtgctgggaaactgaatttcccctaatcatgctactaagagaagaaactgttttatgacccttaggtattatgcaaaccaagaatttttttttttttaatagggagactgaatacactttgagttttctgacattttaccctttggaattggaacttttatatggaagtctatttaattgtgctaaatgtttatgttttcactctttctgaatattccatcatatcttcttcctttttatttagtcttggtacctaaactatatttatatttaacctttataaaacaatatattatatttcacctttattcttaagaaatgaatgctggcaaatgctattataatcttgatttagtgttctctcacttattaaaggcttggatcataccaaagacatatcagttattttatgatatttcttagattcatacatcaactaattgagaaaaatgaagacaatttgataataaagttaatttatgtgaaaagtgctttagaatgctaaagcacactttctggatttacttctattattaaaatatttacgattgatatttattcagatatctaagagatttttttaaagtggctacatcctgctttagagacaaaaaggaagtcaggagaaaggagatgagtggcctatgtgaagggatcatgaactttctttctaaagatatgtgaggatattttgttttagatatttttttcattatgagtttcaacctgaaaaccgttttttttttttaaaaaaaaggcaaaacaaattaattctggttggtaatcagattagtaacgtgattggatcgatgaatatgatgataattataaagaattgctaacagaattaatgggttaaagtggagaatatgaggtgaaactcataaaatttgccttcctatacaaagatctgtaactgtaaagtaatgcactagaagaaagatatagtgatgaaagaaaatgattctttaaaacttgaactgatttgagtgacactgcacattgtgttcaacataataggaagttaattactgtttgtgtatttagtgtttgaagatttgagtggtgaaagaggtatgaatacacatgtctatgaacactttcatgccaacagatagcaaacaagttgggagtgttgttcctgtggtatgagataccctcccgtggtttagaaaaactgtcttttttcagcatacattttcctaaatttaaatcatttgttcattcatacaaaaacgcatcttctgagtgctggccatgtgccaggcactgtgttaggcactaggtatcccatgttgagggaagcagatgtggtaactgccctcagggagattctcttctactggagagaccagtagaagggaatcaaataagcaagtaactcaaactaaaatacacttacataaacacattgggaaaagggtgttaaggaataaacggtgctgtgatagataaaaatgttactgggagacagtcctaggctgggaaaccatgaagagggaattggaagaataaggaaccagacacgcaaagagagctgcggcactgaaggtagctccgaggtgggcatgatccagaaactggtagcaggacagtgaggctggaggagtggacaccactggagaaggggaaggagggaaaggagatgccataggcgaggttggcaggggccctgtcatgccgcctttcataagccggggcaagtgctttggagtttgcacaaaagtaatgggaagcccttgataggctttaagcagagggtgacttaatctctgtgatttatgctttgaaaagttcattctaacagctgcagaaaaaatggtttagaggcacctaaagaggatgtggagaaactgttagacaactgctcacaggccagggccccgaacagtggcagtggcagtaggggtagaaagaagtggacgggattcagaactcactcatgtttaactcgacaatctgaaacgtggagaaatgacagttggagaacacgcctttcagtttatattccctactgtgcttcctccctttctctaatgcctaaaacatagttacaggcttctaatgaatgctttctccccagattttgtttctaagattagtccccctgttgtaattatagtttacatagtaataagtaaaatataattttatattatattgtaatttatatagttgccattttgggttcaacatggctgaatattgttcaattcgtatgattcgacccaacagactcagagttttacaattctcatttaaacacttggctaacacggatgtattctataaaaaggaaaataatctccttttgtatggataaataaatgaagggtccaatggcatttcagtgatgaaagatccattactgctgttcctcagtccctgaaacatagagcaccctcactgggtaatctgggatacagggggaatggaatgaccactttgttaaaaaaaaaaaaaaaaaaagcccacctatccactatactcagtcaaattctattatccttttattactctgtaattttgagggcaagttcagcgaataactgtagacgctattaagagctgtcatggaaaatgtatctgtccttaaatggaagggagaaacattactgcagaggcagtgctgtttcaatgtagataattctccccttcaagctttttaaaataatgtttattgtttcctacgatgtctccccagaccgttctaacacttgcaattgcagtcctgcctttttcctcttgtcaggaataaaatttatggaagaagcatggcccacgggaaccaatcttgtttcatgttagtgtctacactaatagtgcataacaagggtcaatagtaacttgcaggaaacattgttaaatctacccagcttcttaaagggtaaaaggcccagaaagaggctctgacattcttttctctttagctttattttgggcataagagagagaaaatgtggctggtagaagtcatcataacacatgcaaataacaatattgtggaaaatcactgtattattgccccatggttgctacaataaattgtcacacactaggtggtgtcttaagacatcaggaatttattctctcacatttttggagaccagaaatcagaaatcaaggtgtgggcaggactgagttccctccagaggctctggggtggaatcctttcttgcctctttcagtttatggaagctctatgcatgccttgttctgtgactgtttcaatccaatctctgcctctgtcttcacacaacctccttccgtgtgtcttcttctgtccttttctgtcacttatgagggcattctcattggatttagggccaatcctaattcagcacgatctcaactaaatccgtaattacatctacaaagaccctatctccaaataaggtcatatcctgtggtttcaggtggacataagctttggaggagagaatactatttcacacactatggtcactgacttgatggtttctttcttttttttttttctttcctaattccaatttttattttattttactttaagttctgggatacatatgcagactgtgcaggtttgttacataggtatacatgtgccatggtggcttgctgcagctatcaacccgtcatccaggttttaaggcccgcatgcaccaggtacctgtactaatgctcttcctccccttcccctccacccccaacaggccccagtgtgtgatgctcctctctctgtgttccatgtgttctcattgttcaactcccacttatgagtgagaacatgcagtatttggttttctgttcctgtgttagtttgctgagaatgatggcttccaacttcatccatgtccctgcaaaggatatgaactcattcttttttatggctgcagcctaattccagttttatcaacttttaaggaagctatttattctcaatgctttgcctctaaaaataagatgggaaaatgggataaagacagttgattcataggattgtcagaagatcaaattaccaaacgatctctatagacattcagtaagagaacataatttaatatggaaatatttgatctaattgtaaaatgctattaatttgctcaaccaaactcttgtgatggagactttgaaagaagtacgtttccacatatggtctgaatttatcactttttcatattactgggcttgaagtgataggttcttgggcatagattgaggttctagcttgaagaatgtttgccttttatgtatttgtataagtttctatttcatcagttttatttatactaacaattttagtttggtcttagttcccaatatatatatatatcacatgtgactatctgaacgatcatcctgtatatctctttctatggggcaggaattctgccaaaattccatccattatactctgcaatcctgtatcacaacaggtctttgaatgagatatgattgtccctgctttagagatgatgaaactgaagcttaactgacttgtgccaatacatacaggtgtcagcaagataactgctatttaaacctagggcttcttggctccagggtgcaagcttttgaccactgcctaatgattctctttaaggatgtgcatcctgagtttgggaggaggtctacacatttatcagctgttaatccagtgttacctcaagcctattgcgttcctgagacctgaagcatctttctgggtctcagtgtgcctggcccatgaccttacccaaggagggctcaagttcaatcccttgggggctcaaattgtttcttcagactcctggcaacttggagcagaagcaactgatattgaatgaggagacagagatcatttgccctagcagtatcattcaccttcaactaagatttccccctggatgctatacctattcagaggcagactaaggtcaccaattaagctgaatagagtagctttctctcaagctgaggtatatgccagattaaaaggtggccttacactcaaatgatgcctccttagagctgcccacctgacctctgtaagggacatagtctcttccaccttccccgttactttctgtcagcttattctattccatttttcaccattgctcttatcaaaacctgatatatttttatgtttattcctttctttattatctgtctaccactagaatgtaagctccctcaggccaataacttcataggttttacttctatttccctggcatctaggaaagggcttggcaaaatgctcaaaggacttatgagtgtgtgagtgagtcagtgaatgcacagcgttgccatggttaaaccagtgattcatacctcatttctttccccttcctcttttattttaaagaaattataggacaccactgagccctaaacacagataaaacatcagtattaagatatctattgagctgcagtattcttacttggtgtaatgatgtggggtgagatttatgattactattgggtgagtttcataagagaattaaaagaaaatcttagagctaaagtagctggaaggatgaatgggtagaaatactaattactgctagaaatactcgtgactgaataaaaatatatgctgccaggcacggtggcttatgcctgtaatcccagcactttgggaaggcgagacaggcagatcacgaggtcaggagatcgagaccatcctggctaacatagtgaaaccccgtctctactaaaaatacaaaaaaaaaataaatagccgggcgtggtggcaggcacctgtagtcctagctacttgggaggctgaggcaggagaatggcgtgaacccaagaggtggagcttgtagtgagccgagatcgcaccactgcactccagcttgggcaacagagcaagactccatctcaaaaaaaaaaaaaaaattatatatactgtgtataatgaatatatgtaaatggtaccatttatatgtatgtatgtatatatgtatacacacagaatgtatgtatatatgtatacacacagaatgtatgtatatactacctttaatatatgttaaatatgtacacgtttatatatgtatacacaaacacacaggtagtttactatatctatttttccttttagtaaagggaaatcagcatggaatcatgttacatttatttatttatttacatataaatgtctaccatcagaaaaaaaaacagttgggataaattgttaagccctctaatttagaaggatgggaatgttttttacatttaatcattgactgccaaaaaataagagtctgcacatgatattcctgggtcacagactttaaaggaatagtgatttttgcttgcttttactactaatgaatttcaagagttagacaggatgtgtaatttgagtgggatgcctaacattatggaaagagagacaggcattttttttttttctccaccagaagcctggatctcttaatatggggatatgctgtgtttaagaggaacttggagggtgacaaacagaggaggaaaatagaccgaatttgcttaaggagaagatagatgaggtggaaagtgaaaattctgttttttttttttctttttcctttgactagaaggtttagttttccaaactgccttgtaggattgagtaaagattattggtaaaccgttctgggaacttcaatggagaaggaaggtcaaagcaccaggggtgaccagtgggagggaaaggagacctttactgagggctcagctctgtgtttctactgctggtgaatgtctatcacattatgactttctccttttctgtaatggcacttatagagacaatgaaaaggtaatgggacctcaatatagtgtactctagagacccagctgaagtggtgaagtagcttctaagactcaaaaacacatcaaatggatcacgtttgctgcctttcggtgtgttatgggcaggagtggaaagagactgagaatgttcaacaagtagctccaagaactttaaaggcatttagtttccatttctggggtgtctgctaagttacatacattagtcaatgttttaaagccatatttttaaatcctttttttccccagaagattgatctttattatcttttaatgatatgtgtccaaaatatgtttgttaaaaatagccttttgtcagcttgcatgtatagtttttttttctttttgtttaattactgtcattaaaaaaaaaaaatcttggggacattggtgtcttagttctttgtttccttataagggcatttaccttcacagccactcaggtcactgctatttttatataaactctgtggaaagtcaccagtatatcacaattctcttggtctcctccttgagatctttttgtggctacttaaataaatactatgtgtcttttattatggggaagaatctgctttatcatgggtagtgtgcctggtaatcaaggaacaacttttaccaactttgctatgtgctgtatcaccaagtttgttataatgatatagaaaaaagggagttcatcatggagcagtgctaaaataccagaaattataataataatatactgccatttaaattaggagcagtgtaatttagagccatagggaatatgaaatgttatttagaaaacgattatcctctcctacaagtctaataactatcttctaagccataactttagtataaatttaacttgtcctttttcagggacgtagtagagagattttaaatgatataattacaaccaatgtcactccccataactgatgtctacctggatcagattgattgtgagtcttgatgacaaatgccagctacttttggtcactggagaaaggccatatttctcaagtatgatttgactttcagtaaaataaatccacgacttggttgtacactaatggaaagacctttcaggagtaagtgttgctttgtacagtacaggtttttaatttgatccttttcagatactaagataaatacataagcatatgcattcgttttgttaaagagaaaacatttaagcataattcaacatgcacttcttgccatggctctttttgagtttcaacttgtctaatgattctgccaccccctcagggtgggttttcatttcttggggttctttttcttagcttttaagatttagtggcctatactaaggggcacttatcttgctacaagatagcatgtttcattggctacattcactctggcagatgagttacggcagattctttaatatatatattttgcttttttcctatagatggaccctcatagtgttttgacagttaaaaaggatggggggttattgaacgtctagtttctcagctgctgagctgtattttttgagctatatatcagcaaaattacccagctctcttacagaaggtgttctgttgccagatggtactctgtaggaaacaacttcttagttttcttaaatcaggatttatagtgaaatagaataacacttacatataggaggcttaggtgtctctggaaatcttggagtctcaaatatccttttctctctctgtcttcattgtatcctgttcaattaagctgataactaaatgtctacactgctattcaataactgaggggcgtattcttagcaattttcattgtactgcctgctttgtgaccagactgaaaggttcagctccaattgcaacattagcctggcaactacgaccaatcattaccaatgatttttgacccccctaattgttttttactttattgagcttattcggaaacaatgaaactccatcctgccttttcttaaaagatatttgcacaaagtgcagttgctgtttcttctataaactcatcagcattgccttaaggaggccccttaattatcgattttctactctagctaatagatctcctaatttgcagaaataccccaatgcaaggttttaacaattagaaaattacaaaaggaagtcccaaaggacccttagcttctacacatactgatggctcagcatcatacttcctgctggaagctggggaaccagacggccagggagagaatataaaacacaaaattaaatatatgggcaatgtttccttttttcccaagttttgcacttgtttcaaagcaatgtcttctcacttggattgaaaatggcactttttcactaaccgtagtgaaatattttttacatgaagtactatggtagttattttacacccacatccataacacagggaagacaccggtcaggtttcactaaaccctttgggaagatatgtgtgattagctgttacattcttccatgccttaaaatctaaacccgtgtattttaagcaaatattgattgtttttcataatatcaaaattgtcttgggctgtagttttcatacagaagattcttggagtttagaacatacctttctatgctgcctaatcatttattgttaattaaatttgagagatatagatagatagatatttgagatatatctatatatagagaaaaatatgtatatttgatatatatatatatatatatagagagagagagagagagagagagagagagagtgagagtctctcactgtcgtctgggctggagtgcaatggtgtgatcttggctcactgcaacctctgcctcctgggttcaagcgattctcctgctccagcctcctaagtagttggaattacacgcgcccaccaccacacccagctaattttttgtatttttagtagagatggaatttcaccatgttggccagcctagtctagaactcctgatctcgtgatcgtgatctgcccacctcggccgcagaaagtgatgggattacaggagtgaatcaccatgcctggccaaatttgctataattttgtgacccgtttgagaacattagcattgccagagtaccaagtattttagtaatacaacattcagttttgacatcttttaaaatgctagtttgcttgtgattaaatcccaagcttgaaaatatatgttgcatatgttagaaagctattgcacaaataaggacttagacctgttctctctctctctctctctctcttttttcttttttgtttttgctcatccccagattccctcaattttccacctagaatttgtcatattcttttttgcttaatgatcttcagcatgttccattgtccctagagaatggcattcaagaccccatgatatactcctgccactggaaacactttctctccatccctgcccacgctctcttaagagttgtggttcatagaaagtcaacattaattttttttttcttattccttcctcactttttatatagcaaggctcagcacagtgtgttatgtatagcagagactcagtaaactttggtggaacttaaaaaaaagagttgtctctctttatgacattttcattttagtaatctctgatattaaactcacatttatgctgtttagtcatgttctcctgaatggaaccccttcccctaacttttccaaacatcgaaattgctcctgcaaggatcctttcaaatattactacctctataaagttttatttctacctgtgattttatttcaccagaaaatatcattttctttcttgtattctaatagcattttatgcttgtaactgtcatggagctcatggaatttgatcatcagcatgcatttacttgcacgccttccacattggaccatgagttcctatagaaagtggcccagccttactcattcttaggtttcttttatatggcttagaaccccacacatattatagtaagtattcaataaatgctgattgaaggaactggaaccttggtgattatgtggttattgcctttattgttttgtaagtgaataaaaacaatgttgctctaagaattcatttggtgattacctcaatgtcctcatcagcccctgatagttcctctcttaggttattggtttcttgctttctattcaaatgtaatacaaacttaaaagttaatgaaacatattttcaagttggtgaggctgataggtccagaattatttcctccattttacagatacaggataaaaggctcaagtgatgcaaaccaagttataggtagaaaagcaagtacttgagttaagacctgctctactctaacccttcagagtcatttagtaatcactggaagttccactgtgaatctggtcttgtttctccatgtggtattaggtaattttatttatttatttatttatttattttagaagacacatatattcagtgtcatgatcagactaatacatttaaaaatcaacagcaagggcacaaaaaaatctacattgaaaccctttgtcagaatattctacacttttccaaagaacacaaacttaacactttccacagtacagaaacagaagcaaagtattggcctccactgtcacaggggcacagcttatccctccaaagtgtcctcccttcatgggtccaaaatgtgaagactgactgttgtaattgccaaaatcattgcagattacacaacttccaaagttgattccatcattaccaaatccataacagccatactcactactaccatatccaccaccactatggctaccatcaaagtcactgcaactactaatgtttcttccatgatcaaagttgtcattcccaccagaaccacttgcacaaccaccactaaagtttccagaaccactttgacctctttggctggatgaagcaccagccatctcttgctttgacagggttttcccaacttcacagttgtgtccattcacaggatggtatttcggaatgacaatcttatccacagaatcacggccatcaaaagttacagaagcaaagccccatttcttgccactgtcttggtcaatcattatttcaatcacatcaattttcccatactattcaaaatcatttcttaggtggcattcttcagtgttttctttgatgccaccaacaacaaatatattcttcacagttaaatgggcacctgctcattgagaaccttaatagctccctttggtcccacaactcttccattcactttgtgccaccttccatgccaccttcttcacagtggcatagatgacaaaccaaaatcccctgagtgtttggaactctcattaccaggtagtctgggagctgttccccattgctcctgaatgtctcattggttgtttcaaagctcagccctctgatgaagagcttctgcagctgttcggactttttaggagagtccgacctagacatgatggcagggggaagagagacttcaacaatgtgggcagaaagccattagggaattttagatgtcttactggtaaagtataacttttaattattttccaagctaaaggaagagtcatgtgttaatctatccctgatggaaaataaatgccttagggaacttgtcctatatagtttgggaaaagtagcttagcctttacacctactttatatcctggagaagaaattgaggtagaggtgaacttgacctactggtatcaacatttgctcccatcccgaactaaacacacaatggtaaaggtcatctgaaattgttagtttttatttattttttagtaataaaacatgtgtttattgtagaaatgttagggaacttaagaatatttaaagaattataaaatgttaattatccatagataggaattcactattaaccttttaataataaaactagctgggcatggtagctcacgcctgtaatcccagcaattttggaggccgaggtgggcggatcatgaggttaggagttcgagaccagcctggccaatacggtgaaaacctgtctttactaaaaatacaaaaattaaccaggcgtggtggcgggcgccagtaatcccagctactcgggaggctgaggcaggagaatcgcttgaacccgggaggcggaggttgcagtgagctgagatcatgcctgggcatgatactccagcccgggcaacagagcaagactccatctcaaaaaagaaaataataataataataataataatagaactataagctctggaactaggcttccaggctttaaatcttggctctgtgatttactagtttaaggacaatggtaaagttacctcatctttctaggtttaagtttacccatttatacaatggaaataatatgattgcttatatcagtgattgcttaatcttgtgatgattaagtgattttataacatagagcacttacaatagtgcctgatcacatcatatgtactcccttaactattattattattccatctccagtctttttatttttatgcacatgcttttaaaaatttcacaaccttcccttattatgcaacttttcatcctacattttccatttaagggtataacaaagcatactttacatactaaatattctttagaatatgaatttaattacattaagccatcatttgcaattatccttcatcatttgtttccaacctttgactattgtaaactatactttgataaacatttatacttatatttggatgatgtgcttgggatagatccccagaggaattactggatcaaattatataattattttaaggattttgagttatttatatttaaaaatatccttattgaggtataattcacatcctgtacagttcacacatttgaagtggacatttcagtccatcattttccatttccatcagcaatgtacaaaggttccaatttatccacatccttgtcaacacttgttattttcttcctttttttggtatagccatctaataagtgtaaagtgatatctcactgtggtttttatttagatttccctaatgattaatactattcaacattttctcaagtgctgagtcaccatttggatatctttcttgaagaaatatctgttcatgtcttttgcccattttgaaacagggttgtttacttttaaggaattatttgtaaatatttaccatagaaaacattttaattgccttatattttgtacttgtaacctcttttgctagtggaattaaagttcattagggtcttttcttcataaaatgagcaccctttatgtgccaggtactgtgctgggttacaggacacaaagtatgtaaagctttccaggtgaccacagcctagagttgtctggtttgttcctattgctgactagataaccatgttcttttctccctcctctttttttttttctctgctcaaaagctatttttttttcctaaaaagtcctactcaacttggaagcctgtcctttgccaagtataattatatggtattttatgaccctgtacagagtgtgaaatgtatattcttagcacaaactggcagcattcctaacactgtaagatgctgctaaggtatctgaaagggattatatgaaactaagcatttttaatactttggaaccagtgttgattcttccaatagtaaatttgttctgggttcctttctggtttgctctgtgccagcccccatttcagcactttcaaactacatttaggcagtagcttttcagtacaccttgaattagtcccaaaacacactggagcatggagtgataatgaaatagtataaccagagagaaagatagcatattaatagaaccacccacaagaaagaccaagtccactgaagcaaaaacgtatgttctttttatgtttaaaaatctcatcacagtctctcccattaagctttccttgcagagttttcaaactaaggagtcacatttggatctggtctgggatggagtgctctctggggaggcaagtctgctcagaatgagtaatggtgatttgagaagtggtgtgctttgtttcatatgctacaaactccacttgtcttttcagaaatcaattgtgcaatatcttcattttctttcttactgtcttctggctgtagcaagggaggagtgttgaggacatgagtagtctgctttaacttgtgaatctgcaccccttaccctgagctagagcaatagccaggtgagtgcagggtttgtctcaagtatgacattatattagggtatggcatgtgtggaataatcattaattaatggcagctagcatgcactgaacacttgctataatttaaaccaggtcctatgccagatacttgacatgaattatctcatttaatgttcccattaccctcgagaggcagagagttactatctgcattctaaagacttgactaatgtttctaagatcacaagatgatgaggtgatagaattgggattaaaaattgagcctgtctgagggcaaagcctgtgtacttgactatgtattagacaattgtcttcagagagtgcttttgttgattcagtcccactggctactaatggtattccatgatgccaatcttcttttagtgtttcgcaaatcattatctcaggccagaaagagaaactgaagaaacctttcttcaatggttaccgtgatcagttccctctccccacatctctctcctacacacacacacagacacacacacacacacacacacgtgcacacaagcaaggaatttctctcacattcaccgtggtctctcattctttctcttttcatgtgcatgatctgaaatacccaaggggagtgtccttgatggtgcgtgttctgaatggaaaacctgaaagtgccggaaactgggagtgagcccttagaagggcttgtgcatcttctcttcatacacctattgcaatttgtaatcttactctttgtgttcacttgttttaacactgttcttctttgtcctgtactgtaatctacatgaatgcagaaaccatgcctgatttgtttcccctatgacccagtaccttgtgcagtgcctagcatatggcaagtacttcataaatccgccttgagtgaaggaaatcaataaatgaatgtgtgtgttctctctgagaggatacaacacaggaattcacatccaggcttaaaataattattaatatttcctacgcatacacgagatgctgaagtggacagaaagtttcaggtgacaagatcagaaaagaaatgtgagtgtgactcatgggtctgtcttttcatgctgttgaacatatttacacaggaagaatgaatttcttccctcggtaagtccagagactgtgcaaccacgtggacttggttctttctgaggtgtgccagtgcccctcaaggcagtggtgtttgatgggctttgtacacatggcctcctgcccacaccttccgagcttcccaaatcagtgctgcctaaatgcctttgtccaaaaatgtgtggatctctgtcttttgcagaggactgcatgtgtgttctacaagcttcttttagctcagaaggaataaatatgttgctagaacttagggagtttcaggtgacttgaatactgatcagaagtaggcaagatacaatgggagtcttatgtatataaaactcagtaaattgaaataatcgcataaagctacctcccatgaaagcatattctgattgaacatttcaggactggctgacaaggtgttgacctgcaggtcttaaagtggttgacggggagatgcagctagccatttgagggcttggggctactgcaatctcttagagatttggttttctaagctcacctcttccgacccgaattatgaattctttcttcccttcctttttaccgtcttcctttccttttccttcctttccttttcttcttctcttttgtccctttctttcttctaccattcaacacattttcttcagtgccaacaaaacttggtgttaggcactggtcaaaaaaaaaaaaaaatacagagtccctgttctcataggacttagaatccattggggatactaaggatgaaataaatcatcatagaaataattgcagattaccagacgttaggaagggtagtggcggggacagggtggggggaggtggggatggttaatggatgcaaaaataaaaagaatgaattataccaggtatttgatagaacaaggtgactaccgtcaaaacaatttaattgtgcattttaaaataactaaaagagtataattgggctgtttgtaacacaaacgaataacacttgaggggatggatacctaattttctgtgataggatcatgcattttatgtctgtatcaaaatatctcatgtacctcgtagtatacctactatatacccagaaaaattaaaaattaaaaactaaagaaagaaataattgcaaaatgtaataatgtctttgaggggaaaataaaaacttcagtgaaatactctaagaggggtttgatgcagagctgggggatgtgggaaagtagagataggaaagttgaggagggagggatgggttacagtttgccaaggacagaattacttgagagggtgggagcaggacacacatgtcagggcctctggaacaggaagaggttggtttatggcagaaattgaaagaatgctctcatacacagctcactttcctccttgctttttgtctgcatagcattattcaatatgtagcataatataagttgaaatcatatatcacctttgtggtcttctcccaccagaaatcaggcattatgaaggcagaagggcagaggtatttgtcgtgtgtgtgtgtgtgtgtgtgtgtgtgtgtgtgtgtgtgtgtgtttgacttttgtatttttgctgccgtattcctggtacctggaatagcacttggcagacaaatgtatgcaaagttattcaaatccagtgggaccagaccacagtgaggacagtcaacaagggagggcagggaatgagcgctgtcagggagggtggagtccaggtcactggggttgctgtaagcatgttctgaatttatatgttatccaaagtataatagaaaacactgcattaaaccagacatgtcatatagttaccatcttttctttttctaaaagagaattattgcaatttatttccttattaagtcaatttagattaggttgcactaaaaaaaaaaagcgatattgtttcagacactaggatctactctcttacacagtgtgattagaaaccagggaggatggggttagaagggtattgccaatgcggtaaagagctgaggagaaatcagcttctgagtgttatttttctgtcttcttcatgaatggactttttttttttttttttttttttaatgagaggcatccaatttcaagcttttggaaagcattggctagtttattttttgtgtgtatattaaatgatcatatatagttatttatttatatacctgccctttggttaatatccattaacacggagcactagtcagatagagtaggttttttccttattttgcacatgaataaattaagaataaggttgggggaaggaaactaacatctgagtgtctaccgagtgtctgatgttttacatatttgtctcatttaatcctcatgaaacgctttgagaaaggcgagcattatctcccttaattggacaagagagtgaatcccaaattggttaactaactggtccagtgtcataggacaagtaaaaggaagagtcaggatgagaggccaggtgtttctagtgcttaaaatccatgatttttacttctaggggattttttaacaacttgtgggaacagcagtgctaataaggaatgcaagtatgtatggaacctgggtcttctgactcctgaaccattactgctttttttccactatgagataatacatcagttactgcttctaattaattctccaagtgccgagccaacttcataagcgctagggcaatgcaggagagagagcactcaaacaaaactcagtgtttgtagcacgccatcccagatgtacagtgcggcctttcaccttcttattcttaatgaatgattttctaatctgtaaaagcaggcccctggataagatgctctctggggtcccttttatctctagtattcaatgaaatgtaaagttagctgcatttgatgcatgaaatatattcagttttggaaacagctgaggaaattgccatggccaggccggtctgaatttagggcttgtgtccttagcgctacaccgtactgacagtagccatatgtgccttgatttctatctggaaagctcccaaaatctagcaggtttgattgtatactattcaactaacagccttaaaatatgtgtgagatgagcctttccctcctggtctattccactggaccctttttggaggtcagtgcttcacataatacatgctctacgagaagtcaatctcagcttgcttattggacccattttccaatgtaatataaatagataacttgatcacttcctgtttttgtgcctcctcagacacttggataagactatggaaattgtctactaatgagtatacatatcttgaaaaatcatcgctttgagataatttttttaaaaaaattatgtggatagtacttttaattaggaaaaatacacatttataaatctaattctctaaccacttaagagttgattgaaacctaggcacattctcaatgtcaataaaaataaggatttaataaaagagacctgttaaatgcttcaactccttaaaatagatcagatatacatagaatatttcaatgatctcatatcttactattatactgagaattaaaccattacaaagatattgacactttgggccttcaaaacaataatattctctcaagccaaggttttaggttctgatttaacaagttgattattggtctgaaaacaagacctggtttcaccccagggtgattcaatttcaggtctacactggttggtctggctcttcttttagtaaaagttcaagagcggttttgtgaggcttcctgaagctattccttttcttgtgccttcacttccttactccataatccgttaggttttgaccacggataccgtagacagctattcatttcattataccttattaatacctcatcataattagtggactcatatagagatgtcctctcctaagatggcatagtcaatgctcttttgtagatatttggttaaatttgtagatatttggttaaactactgtattgcaatccaccactaaacactgtttctgtctgattatttcatgtgatcatctctgctgaccactttctggtttataatacagttcttggttttctagtccagcttggctcgctcatgcctcagatattgtttttaaaggcaattggagccttctttgtgagtttaatcaagctaatttttttttctctctctctccagagtttgtcattttatgaattacatatttagttaattcaacatgagctttgtggttgaaaataaatatacatttaaaaattcattttattagatagacctttgtcttaatatacctttcttattggaaattttgatttattatagaataaagatgctttctgtcttcatggaatcatcttgatattatgaagttggcatattttttgaggggatgctgttttcctgggagagagctcagatttctcttatgagctaagagacaaaattgtttcctgttacctcaaatgactaaactttgtggtgataaaagatctctatttaggcttttacctaatacctgtttaccacaattaaactttattttcatttttgaatattaacctcaagagactaaaaaataaaacaaaccaactataacgaagactggagttctgggatttgatatattttggggaacaattaggagggtttgagaggaaaaagcaaacaaacaaaactatagccatcaaggagaacctataattaagaaaaactgaaggcgtggagtgtggaccaggttacagtaaattctgaactaggcttttactcatggcagtggttgccatcataaaagtgttaagtctttacatttttctttgacctcacattgccacaggagtgttattccagttaattttgtaaaattaaattatattagaatatactcatttaaaatataaacaagcatctcaggacgttttgtgtagaaagacaaattcttggtagattgcttgattgattagcttcctaaattacattttaaaatcagtcttattttctgctacatgtattcgttaccactgcaatgattaaacatagtcaggaaaaattttgggatttcccaaaatcttttgtcaaattgtctttcttacggaggtaataaaattcctattccctataaaactttatgataacagaattaggttcaacatttattagattggtagatttctatcaatctgatatttatttatttaattaattagattaacaacaataacagttatgacagtctggttttctttaaaataaatactatcacatagaagatttaaagctcattctggttaatcacctcattaatcaaatacttgaagatgagaatagcaaggcaaagattaaacatgggaatttctttaatgaaatatgaaaattaatgaatattgaggaaagctattctatttaaatttcagcgtgggtatgattattcttttttaatcagttgggtttatttttatttaggaattcctagggaaactggtttataaagaagcaaatatacaagaagaaaaggtagccagagatgctatcattcttatgatgtcctgtgccaccccctccttcatcttgttttcatcttgggttctgtccacacgtgttcttttttgaccaaatccactgtgtggatctatctcctggcacatacactttaattaccggatctgagatatggtgttgcggcaccatcagagtgcacacaaggtatgggattcaaaaatggaccagattcagctatgttctggcagctgtattgaagaatttacagaaccagaattaatgtctagctcactgcagtattagagaaatcctttcgccgctggagtcatcagttctctcatctttataatgaaatgtttgaagtggtaaaaagtcatttccaggtggaatgttcttagtttctaatgtaatgcttttatcattttgtccgtgcacactggggtgcatttccttgaatggaactgagagtgccaatttgattctatgcttgaatcttaccactgaaattttctttaacctcaatataatccttttttttttcttcaaggataagtaaactgatgtttgtcagacttaaaggagacaatgaccagggtaaaatgaaacaaaacagaacaataaaacagagatatgttatataagttatctactggtgtgtaataaactacttccacatgtggtgccttttgaaacatcacacatttatttccttcaatactgctggacggtggggtggatcctctattggctttgcctgggccccttcatgcagctgcattcagccacagggccaattagactggaaagtcctagaggccccactcccatgtctggtagttggtgttgggtgttcagatgaggctaaggctttattgcctgcagtgttagcacagaaggtgaagacataagccacaagtcttcttgaagcttagattccagcatttgcatagtgtcacttctacattctattcattaaagccagtcaaaggacagcccaaattcaatgtttggtgaagtagactctgcctcttggtggaaagagtgatgaagaatttgtggccatgcttaatgtatcacacacaagctatcattttcttcctgcaaaactcatgccacacgatcagttaaaacacttctcaagcaaaattgttgtgcagccttagaatccttttaaatacagtgctccaggcagccaccacaaatcagtcagaactgccacaagaaatgaaatgtttctgccatctggactctgcagtgagttgttggtagcgcctggatggaaaattcaggatttctggctctcaacccagcatcttttctgtccccattagtctgtctcctcacttctagtcagttcattaacatttattaggttatattagaaaagtaatttacttctataagtaaagtttataaaaatgtgcatccttttttgaacaataacttcatgtatgtgtgttttagtagactaacataaaccactgaataacaaactcacagaagtgagacatgaattaagaattaccaatttgtataccatcttattcaatgctaaacttgcatcagtccaagtgatcacatttggatgaaaatggggtactattgtcttgatgtgtctcttgatgtgattcaatgggaagtatgcaactcccatgtaccattcttgccaaatctactcattaaggaaccatcagagaagtacggagcatgagctatttcacgaaacagctaacctgaaatatttaaaaagtgtcaatttcatgaaagacaagacaaaagtgaaggactgttctagattaaagaaaactaaagggacatagcaacaaaatgtaatttttgattttatattggattttgatttttaaaaagaaaatttaaatgggataattgggcactctacgttagattgtatcaatgttaaggttgcatcaatgttaagttgtatattattgttgtatcactgtattgtatcaccaatgttaagtttctttatgtgattaatagtttggctgttatgcaggagaatgtccttatttttggagaaacatgatatgtttagaaggaaaagtcaagatatttgcaacttattttcaaataatcagcaaaaaatgaagtaatgtgtaggtatacatatgtatattttttatttagagagagagagagaaaaaagcaaatatggcaaaaatattaattgacaaatctaggtggtgggtcacatcttccttgtacttttaactttcttgaaggttagaaaatttttagattgcaaagttgggtaaaaaaaaacaccaactcattgtattttatggctgagaccgtgcctgactttgagttattatgataaagtatccaatgtcaaatatctgattaaattctaagggattcaattgcaaaatgctgcatttctaaaaaggcacattttctttacttacaggcttacacaaggagaaaaatctcaagtacaggcagttgtttgaatatggtaattgatagaaaagttgaccaagtagaaaactgtaatatgtcataataaaagatgttgagatatgcctgtatgttatgtggcattatggttcacagagttatatattatgccagaagccttggatgacaagggttccatctcattctgctcagattctgtgggtaactttgagcaagtcattttaatttgtgcaaaatgtggtccttttaaaatggagaagctaattctggtttatatcatatggctgtgtaaagattaatttcctaactgcaaagggtggtaaacaacttttcccatttaaatattcagtcttggaaacacatggaggattgttgtgttgaggagctcagataatgctcactatttctgtgcctttatagagatttttcttacaggattatgtgcaaggttttatccttttttcataagctacaatactaagagaaatctaccagttttaaaaaaatctattttcctccaagactcttaatttcattctggaaataagattggatttgggacaggaggccttggtagaaaaatgtacccctaacaatgtcatctatggaaaactgtgccaactctcacctctggaagagtgagtggttgagagcatgtgaaataactcaatagccatttcaaactatgtttaatcatttataaaaatacagatctttatagagaaggctgagtcttctgtggactagaatagaagaggtgagacatgatctgggtgtaacaggatgggtacagcactgggtagatggaggagacatgagaaaaagaagtcccatgtgggtgttcattaggtgcatagacttatgcaggagcaagtcttgtgtgctgacactaaggagatgtaactggagtcctgtctgactgttgaagcaaactgagcaatattattggataggtgcaatgaaagcagtgcaaaactgattttgagttaatgtctggtgagcaacagggaagaaccagtggtggctgaataggaaattgacagtagcatgattaaattggaaactaagtaatgcatgacaaaattatgcaggcaaagaccagcacagaactttcccttaggaatcttggatagaatgagtactcaggtctgaaaaactggctctggcaaagcactgctagggagtgtaagagagggagtaagttattatggaggtagtaggtaaggagggctgtggttgattagtgatgtctgcctagtgcagggatggggccatataatcctggatgtcacatacagtatttgccattcctgaatgagaggaaagaagtaaaccaaaaatcccagcctatgcaatgaaaaaaataattgaaaactagtttgggagaaagttgatgatggagttttacttatacttcaatctgaggacagtacagtaagtacatttgggaacattgtcacttataattgaagtgagcttactagttagagagttcgtcagactggagggaagtaaaacttctataagggtcaaatgaataaacaaatttgctttatcaagctgcttatttatacatccatgtgttttcttatgatgagtcagtcccatgcaccctagtgtaatctagttgccatttgcggtatatagttgtcacgtattactgccagccagctggcagctgcattgccctactcattagtgattaagatggacaaaagtatataacattcttatttaatccacagtgatttttaagtaactataaacaagagttcttgaaacttgaaacagaaagaaaatagtacttacttttgatatgtcacacttgcaacttgtgcctggaattgagttcatcttccatctttagctaacgtggtctgtggccagagccacacttcctcgctcttggacttgattcccataactgaaaaagggaaggtgttgcctcaactagggatggcaagtgtgtactgcttctctttcaacttgcatctatgataaatgaagaactcttcccctcttagcacttgacaccaattgccttgtggcctggaaccttttgttgttcatacttcagcaaatctcaaaagaagaaaataatattaacaagaatagctatggctaacatttgttgagctttttctgtgtgtcaggctttatgctaagcaccttatgtgtgatactttaagctctatgtaattgtaaacgttttcaattaaggggcgggaataatcaaaggaggatagattttcacgttcaaactgtgagatggggcattgacattaattgaaataaattaaggaaatggccagaagtgtaaaagaaaacaaaataagagtcatttgttcatttccaagacctagcctatacctagtttggtagaacatcaccaattcctttttgattgggtaaattaagggtgaagaaacttgctgtattaggttcttcccctggagactggcctacatccaaagctggcttctgtttcttgatattcaagctggggctgaaagattaatccaagattgagtccagctcagggattcaacctctttcagtactattggatttaatatctgctgacctgttaatcattttattctatagttattcacttgcttctctcagataggaatcttttaattcctaaaacatggcccaattgattattcataggttgcattttttccaatacaaaacctttagctacaaaccatacttctttcaactgttaaataaaaagatgtttcagaaagcactttctatcagtattcatttatcattatttaacaataaagcttaactaggccttgagtatatatcaagttgaagagcagctggtaaagctatgatcacttagtggcatgctcacgggtactaatagggatattatgcctgcattaggactataccctgcctgaaagaatataggtcagttatttaaatgatttacacagagtttgtccctttaataccttgcaaagagtcaggcagagatagtattagtgagttctggcagatgggatacaaatttattacgacaagtcaattttctttttcgtttctaagactactatataataaatgggcctccacagtatattaaattaatggactttatttttcatgtgaaagaagaagaaaaatcttatgaagtgttaccctagaattccaggatagtctttgagtttctggctcataatgtagcttctgaaaagcaattataactttcatcttaaacttctttcaatgacaagtctcgctagagggactgtcactggagtctttctttagagaatgtcttttcttctcaggggaaatgatactcagcagcattcaaaacagttctaggcaaaattcagctatggaaattttatccagccccgacttgcaatgattgcatccatatatgtcaatgacattcccttccattgagccttcccctacttcttgtgtttcccacattacataaacacaaatacattttgctattatccatctcatgactgttgatacccagatatagagagattacatttttagttaagatatttcctcgaaggctggtcgagtccaaaactggcttcccatttcttgatagtcaagttgaagcacagagattaatccatctgctaatatggccctacttgtgttggagtcttcgtcaacagacaccatacctgctgtgtctgttcatgacctgcttgcctcatcatagcccacactgtcaagccaatgtgccacacagtgtagtcacaaggattgctgtgacagtgtctgttcacctccatttattcccagcaaccaaggcagacccttgggctgtactttgtgtcagtctgattatcttagtggctacagacgtggagcagagagtgaaatttttcaaatgttgattgagaaagaaccacttagtgcagtcagacataagtgcgcagataagaaattcccagacagtgggagcacagcacattctgtggttattactattattctctaatcagtatgattctctgggcacacttatagaagttcattctttagtggaatttcaagaagaaaaatattttaaaaagacaacagctctatcttctctgtataaagaaaattcattgacaaaggttctatacaccaatgttactgaaaagccattataggcccaggtgcagtcgctcactcctgtaatctcagcactttgggaggtcgaggtgggtctatcacctgaggtcaggagttagagaccagcctacccaacctggtgaatccccgtctctactaaaaatacaaaaacactagcctggcttggtggtgcacacctgtagtcccagctactcaggaggctggggcaggagaattgcttgaacctgggaggcagaggtcgcagtgagccaagatcatgccactttactccagcctgggcaacagagagggactatgtctcaaaaaaaaaaaataaataaaataaaaataaatagccattatattctctccattattcaaacatgaccctactgaaacgtatctgcatcaacaccactttaataccgtgataacattccttatatgagagtgaagatataaataataagtggagaggactctacttttagaagggaaatgggtgactagtgttagctttattgtacatataatgctccattgacatatgtcaaccaactccattttcagtgcccaattgaaagttgtatagccaccaccttttcaagacaatagtattaataaattccagtatggtttactaactgccaaaggtaccatttaatacatctttcattaaaaaatgtcaggccaagccgggcacagtgaatcatgcctgtaatcccagcactttgagaggccgaggcaggtggatcacctgaggtcaggggttcgagaccagcctggccaatatggtgaaacccctgtctctactaaaaattcaaaaattagctgggcatggtggcacatgcctgtagccccagctacttgggaggctgaagcaggaatattgcttgaacccaggtagtgaaagttgcagtgggcagagattgcactacgtcactccaacctgggtgacagagtgagactccatctcaaaaacaaacaaacaaataaatccaggccattaattgttttatttctggatcatcaaatagaaatatatctacccagaagaagaaacatgttttccaaacaaaatcaagcattatgtgtaaaatcaagcatgaccctgcaggaaggtctggccagcacagtggcagcaccagtcaggctctataattatttacttgtgtgtgaatcctagtgccactttttaccccctcccacagacctgcaatgattaacaaactgtgatgattagaaaataaattacaggtccttccataaattatatctggaaacctgcctagattctttgtataagaaacacaaatttaatttctatcttcatacaagcatagaatttacttgggtgaggactaatggtagatgttgtttataaagacagagaaaagaaaatgtgattatcagtgataaaaataaatccatgttgtgttggtctgagtttatttaggaaaaaatatttacatagaaaaccattagtgttgatttgttcagacagcagtatgagagaaaacgtgtttctctttacacttatggtgtctctagcagatggtaaactccaaatagttatttcacattacgaagaaatgtttaatgagtatctgataggagtgattattgcagggtttaataatcaatatcgctgcaactgagtctatttaaaaatctatttacatgactgtgtataaccctctgagtgaaccaatttcactagcatttttgactacctactacatgatatgaactatataactgcgtgtgagattgcagatctactggatatataaacttaggcctgtcataaacataagtggacccttatttaactttcatctgtcaattcttttttaaaatagtgttgtattttgttctttttttttttttccggaagagatgagtataaagttgagaagttggtggattttttgctattattcagtaatgcaatcatatgatatatttggagaaatgctatgatcctgatagtattatggaaggatgcatgatgctttcacctattttcaaggatgtagattataaataaattgatggtgtatctccttagaatcttcttcattctaatttttccctttaactcattccttgaaatttttcaaaataagtgtttaaaatgataaagaatacacactcaggaataattctgcacttaaaagggggaaaatgccccttggcatattcttcaaaatacctatagtaaaaatcaagttagtttaggtttcattcttataaaatgtgtttcctttcacttaactttcttgtgacacaattgctgaaaatatactgatgttggcaacttcccaccaaaaagaataaacctcctttctgtcacccacttgcactaaaaattaaaagatgaacagggaccacatatttgcctatgctaattataaaccattccaacctggagggtgggaaggaatcttaactagcgacctttgagtggttgcttggttcatgtaaccatgtcaactaggtacttctgctttgttcatgtactttgtgtttttcagtcgaggtggtccactcacattgcttctcaatttccctaacccattcaccctcccctaacagctaagatgcttcattctccatcaattctacacagtttttcctactaagggagaattctttttgcccttttctgtgctcatatagtgcttttgtagcatgcactattatcactggctacttttcattgtaaatgtttgttttgctttcttactccgggactgcaaaattgcacaaattcagcaatacgatcgtctgtttcttggaactctgaggatgaggactgttactcatctttatatatccagaatttagaacagtgattggcacactgtgggtgttgaggaaatgtttcacaaatgaataaatagcgagtagtctgaagtagccagaagtattttaggaagagacttctggtgggaatgagtatgtgtggtgcctgggcagaggaagagaccacggacagcagtttggataggcgattactgtaaaagataatgaagggtttgccaaagtggtgatgatgggaatggagaggtggaggcagatgcaggagatatttatttcctaggctttttcttaaagctcttttcccctccctcttaatgttatgatttgcttaggtgaactaaacttagtcccactttttggcctgttttaatgcacctattttgaataacaaatgatgacaatgaacaaaagaacacaaggttgaagtagaaaatttaaatgttttagcaagaaaacaaaaacaaaaaccaccaatcatctcatttgtgataaacaaacacagttaacatttggttgatagcctccggggctttttattggtaagaatttggagacaatctggtagaatggttaccatgacagactcaactgcattcaaattctggctctgatatctgctgtgaaatatttggcaaaacgtgctctatttctctcatgtgtacagtggggattataatgattgtacttagttcatgggattgttctgaggattgcggaagctgataaaattaaagcactaagttcagttcctggaacataggacataaatatatatcctattcatatatatataacaaccatatcaacgtataaatatggtttataaactaaactttcttccttcttaatggtataaataagacctttccatatttatccatagcatccatactaatgattgcatagcattcatttgtatgacaaaccctcattttcttaatatttttatcgtattttatttttagaaatgtataattctcatttcatagtttaatcttcatgcaaatctaagactatttctctatgattaattttcagaagattagtcactgggttaaatagtatgaatatttttcaggtgtttgatacaaatgccagactgccttcgagaataccatgctttctagcaccaatacagtgtttgttgttgttgctgtttgttctgctttttaatctgggccagtttaataggtgagaagaaagattcctattttaatttacatttatttgagtactggaagatgagcatctttaatttttttaggtctttaggatttttttgtgaacagcctagctgtatctttttccaacttttctattggtacgtgcatcttttttattgacgtgttagaaatgtaatcattgctaaattatttttggagggtgatgaagttcaaaggatctaaaatgactgccttatatatttgatatgttcagtttatcaacatgacattaacaatcttttgtaatttttgaatgacagaaaggtagttttatatggtttaacctaacaatttaaggctttgtgaaattgtcaggcaattcatacattgcctcagacttacaccttaattttgtgatttggcttatgcaactctattagactattttcaattatatgtttgcttgaaaaattggtgttattgagcacttctaaatcactgggtactgtctccttgcctctgtggacaaaagatttgggatacagttgccaaaatgtaggactaaatttaattttccaacaacttgtgaatggcattatcctactattgcactgtagactacaaacattttaatttacagagctggtagagctttactttgtaaacacttatgttgtctaaggaactttaatacattatcacatttgattcttctttaatgtaatttttgattttcgatttttgtgaatacacagtaggtatatatatttatggggtatatgagatgttttgatacaggcatgcaatgtgaaatagtcacatcatgaagaagagagtatccaccccctcaagccttgatcatttgtgttagcaataatccaaatatactctttcagttattttaaaatgtgcaattaaattattattggctacagtgacctggttgtgctagcaaattgtaggtcttatacattcttcgaaactatttttttggaacccattaaccttctccacctcccacatcaaccctccactacccttcccagcctctggtaaccatccttctactctctgtgtccactgaattctcatttgattctgacaataacttggtgaaggacacagggcaacccccctgttattatagaaaaaaacactgaggctccgaggagttaagtgatgtccagaggcttgacagctaataaacagcagagtctggcctagcatccaagtcttctgacttcaagtctagtgcttctttcctgtattccttgatcattgaatcacttgacctggaaatatgtgctttcacctttgtcagaaaaataaagccactgggatttgaatcctggtgagaagcaataatgtgaagcttccaaattccattgctctgtttttattgtgtctgtcttattttagaaacatatgttttaggatgtactgtgtaaatgccagtttcaattttacaatggaaagtgaaaaacagtggcatgagaaaatgtatatttcacttatatgtatggctttcccaaggacatgtttcactttcagtggatttcacagtttttttgttattttattttatttttttagtgacatagccttggagtaatgttaagttactcataaagaagggattttaatgaatatctgtggaagatactcttatttattgctggtgcctttctttcactaactaaatgttatagccagtctctggagcacatcatgatactgaaccagtttttcatcaccagtttccattctcttttgagctcccacacccagaaaccatcatgcagaggatcaatggccttgtagtgtaatctgttctttttctgtgagttactgttccagtctggttcctcctgtgctgaattacttctttcatgaaataaccaaaatgaggtgggggagaggattgggcaggatctcagtattttttgaaatgttttgaagagtaattgaaaatttaaacaaaatcaaagagagaaagcgtggccaagctgtgtgtgagttattttgaatttacaaaactgttgtacacatgtttttaaatatatatccagttaagaaatagtgcctgcaagaacagattagaactgggatgtaaatgaaaaatctatatatggataaaaatcttctatattatgaggatatacttggttttggacaaaaaaataaaaaataaaaaataaacctttccttcagaaatctctcagaagggaacaatttctctggggaccattcatttcatttgtcaacgattcacttctacctgctgaattacagagtcctgattagctttcatactttataagaatcgatactttacttgtcaaacatgattcaacatttgtcaattgtacttggaaatacaaacaattcaaaatatgtctcaatctcagaggatgtccaacttctattattttaatttttaattttagtatttaaaattttttttaacttttaatttttgtgtgtgcatagtattaagtgtatatatttgtagagtacatgagatacttcgatataggcatataatgcataataatcacatcatgataaatggaataaataacccctcaagcatttatcctttgtgttacaaacaatccaattatatacttttagttattttaaaatatacaattaattatcattaactataccctatttttattaataatgctataccatagtattattttattaataacactataccgtagtattattttattaatagcactataccatagtattactttattaatagcactatactgtagtattactttattaatagcagtatgctgtagtgttattttattaatagcactataccatagtattattttattaatagcactgtactgtagtattattttattaatagcactataccatagtatcattttattaatagcactataccgtagtatcattttattaatagcgctataccgtagtatcattttattaatagcgctataccgtagtattttattaatagtgctataccgtagtgtcattttgttaatagcactataccgtagtgtcattttattaatggcactataccgtagcatcactttattaatggcactataccatagcatcactttattaatggcactataccatagcatcactttattaatggcactataccgtagcatcactttattaatggcactataccatagtattattttattaatggcacgataccatagtattattttattaatagcactataccatagtattattttattaatagcactatactgtagtatcattttattaatagcactataccatagtatcattttattaatagcactatgccatagtattattttattaataacattatcagatttcctaaaatatgtatagcttttcatacctaaatttctacattatggtattaaaagctatacatattttaggaaatctgatcataaaatgcatgtagaaaggtctgtgaggaaacatttaatactggtacttatattcaggtcaacatctgggtaaaaatgggactataagaataatatacatatattctctttgtgattagttgaaagctagatcaccaaatttaaaaggatggattcacttgtaaataactttgagtgtgtgtctttgagctttttatggctcagttctctatgtaaaggtatttgaaaaatgttagcatctccttatatcggtaatgtttgtagcaattaaaatactatgttaatgcagagtaacatagaaaggttgcttgcatttcaacctttgtagtttggaaaccatttagaaatgtatttccttatccactttgctattatggagctaagtgcttggaatattatttgaagtgagatttctatgaaataaaatgaaacacaacggaaatgtgtatttttatatttgcctttcaaccgataatacagcatctccatgcggattgaatccaagcctgtaacacagtgaagcctcctattagcaacagttctgtgaggctctttgctgagggtctgcctgtgtgccattccttcatgacagccatcctcctttgatgacaatgttccttttattgtgtttatgaacttgttaagaattgtaggaaccatgtttggagatgacactgtttctacattaaacgtttgaactttaaatataaatacaagcagaattgaagctatgaaattggtctgccctactgtgtctattatattgggagggaaagagaattgtagaagtaggaggttgtaagaaggaaagattaattgtttaattacagctgaataggagaataaaggtaacaggctcattgcataatatctaataatatccaaccccaacacacacacacgatagaacaacattgtttttgcccaaaattactattttacagaaaagatttataattacagagctaaaaagtaacattctggaaagattaatatgcatatagcaccaacaatgttgtcaaacttaaactgagttttcaccgtcctgataaattgatagaagctgttcttatccaccctaatcaaagttactttttctgtttctttataaatatatgtattcaaatgaaaatcatagtcctagtttgctctctgatcccagtttaatgaaggtagtcaggaaaggtcttttgaggaggtgctatttgaactgagtcctgatgggactaccgtgggaaggaggtgtccatgctgagttggagaatggctttcaaagcagaaggaatggaaaatgcaaaagccctcagagggagtgagcttgctatggggatgggtgagagaggttaaaaagagtgggaatgaggtgaggttggagaattctgcagaaggcagattttgctggaccttgaagactatgatatggaatttggatttttaattacaaggagaacccatggaatgtttgaagaaggaaagtgacatctaatgttcattttagaaggattatccttgtttttctgtgtagaaagaaacagaaaacaggagagacctttgcagtcatttgagcaaaatatactggttcagttatgtattcatttgtccagtcaacaaaaattcactggagtcccaccatatgccaaggaactgctgtaagtcctggggataccatggttattaaggtaaggatcttactctcatggagttttgactagtaggaggttcagtagtgttaagtcccatgaagacaatacaggtaattcaatggaatgggagtatctaattacattgagtgtcagggtcatggtggatcctgaatgactacaggaagccaagcatgagaaaatctccagaaagaacttcaacccaagggaagcacgagtgcaaagggcctaagatgagagcacgccaggcataaaacaacaacattgtgtctggaggattgagtgacggcggcgtgggcgggggaagtatctggcaactagagggaatcagctgcagcctcattagctgggtgaagtgactttctgtgagactgttgggcaaatgggcatggagagagagaaagagataaagattgaagaggagtttatggtgctgtgtcaactattaatgtttccttgggactagcacaggatgtatccacctggttaggagccccacactcctcaggccgtcatgtataaagcagttggctcatgaacttcatttttgtcaaattcctgttatcttatttaaatggtagtactggcttttagcattattgttattttgttttaaaaaaaacattcttaatgataattgtcaggaattgattttctgctcactactttactaaattctaaaatgactattgcttagaggcagataaaatatcttgttctttaagaacaacgtcgagctatatacattgggaatatccctcacactgtttaaaaccatattgctttaagtggtgtataatgcaacatttattgaactatttgaaagtccctaatgtgcagattcacgtgaaattaccccatgtgtctagtttgcaccacttaacatccttttaatggaagcaggtggaaaatgtgaaaaaaaaaatgactaaaatggctgtcttgcctattgtttgagcatgtagttgttctgaccagaaagtgaaaattattgaaaaggaaagttgttttttattagcttgaagacctgttccagaactgttattaaagtggatgctaagtggagtatgtgacatttgcttcatatgcacagtggatgattgattccctcagcctaactgatagagtattttttctcctgaccttggtgcaattacattatagttgcaattttcaacattatattttaatagaatttttgaatctctttgttattaataaagttaaatataatcagaaatgaaaatctctgctgaaatattcaccttgatacacttccactttgggctgcttccagttcccgtcattgctttgcccagagtaagcaataaatgcacatttgttggattggatgggcactcttcccccacgattattccatctcaaaaagaccaaggtgtttttcttcaaatggaaaagtcttctaagcaacaccctcgaaatatgaaatcagcaacaaaattcattacttgagatttttcatttagagaaatgatcataatgacatgctgtgttcacaagtgagattttctgtctttaagctcttaaagtatagtttgcctttaaattgcctccttttctaaatcaaacacagattaaacacccacataattacttttcggatagtttctttgccactgcatggatgtggaatgtgttgaaaatttgtagttattattgtttgaattttaagagctaaaataataaaacagttatgaaaacaaaaatcacctacaatctattgaggtaatatatggtgtggttcctttcagtcttttttctttgcgtatattatttgaacttaatataagaagttttgaagatgagtgaatgtatgccaatatttgctcagaacaaaagacaggcagatttagttggcagattattcatatttagggtgatacttaactggtattccaaacatatttttacagtagaataatatcactacactgaattaactgtccaaaatatagctaaaatttttttaaaagcttcctcaaaggttttctctgtaaaaaaggtcttctttgtctgctcttgatggttctagttagcaacatgagagagagaatatgcttacacaaattaaatgaaggccttaaaaagcacagagtagagatttaattaaagactgttttccatataaatttgtgctgaaaaggaaatgttggttgcttaggatgcacattattttaatgctgggagtcagcattgggtagtggttagaaacagacatggtggtcacaccccaccagctccccgtttgttagcccagtggcatggggcaaattacttaacctctttcagagtccctataaaacaacctgtagtaatatctgcctcatatgattctgttaaggaataaattaaacaatgcttgccttgcagttttagggacatgagaaaaattaataaaaataaccatcacacaggactgaatgtcttccgatcaggccaggtgtatctcatcccataactgttaatcaattgtagaacatgttctctaagcaggacagaaagttgagaaagagctaaaaatatcttaggattccatgtttataaaagaaaaagtcaaatgtccctgaatattgagtaatacatttctcattgcttaatattaggagaatgtctagaaacactgtttcagaattttttcctttttatttacatccagaaattacataaagcaaaaatgtttttgttattccacaaaggataatatgaatttcaagtaatttattgctttcagttgttttcagatctgtttaaatgtgcttattttttccgcggttgctaagttattgtagttggacttgatcgtctctctgggaatgatttcttcttgagcattattttctctgctcagatgattccaccttctccaccactccgccaccaacagacttctgatattttcttgactaatggaggtgtgatcattttctcttttgaccttataaaataatgagagctgctggagtgccctttgagttaaatcaatagaaagtgcttcatgtataatatctcattaatagagatggctaatggcaaatgtgggacagtttatgcagctgacaagcaaagcacctgccagtatttaaggaatggatgacctgtgaccaccgagacacttgagaaaaagtacaacttccgtatctggtggaaatctgctcctaccctcctttgcaagagaggatattgtgtctggcttttctttggttcatagctgtgccgcttcttttttccagatacattttaagggtttcagtgtgccccatggtgggttccctgggaaaaacactctgagacagatatttgagtgcaggaagtttatctcaagagagagaaagaaacaggattgggcagaaggaaaagttgagctttgctatagttgccacgaggccctcagctggtgtcacctctgaggccatctgcctctgtgatggtccttcagagctctcaagattgaggcagggaagctcagccctcgtgccccagcatcgaccaagttattggatgttggttgtgttagggttagggcataatcttaggcaaagcagctctcttcagctaaggttggatcccggagagaaactcggctgtaagctgttggcagccaacccttctggcagctgagacatctcctgtcccatccattcctccatcctgatgcggggatctgaatgtcccaccaccacacctactacgcagtgcaacatggaggagttggccttaaatttccactgaactctaaaaatcttttaagactctgatgttagtagcagaaaatagcaaatacatggtatcatcatcatcatcatcatcttcatcatcatcatttttaagtttaaaaatacatgtaatactgaggttgtttttgttgttttgtctacagataatagaaaaaaaatgtgtgagagagaggtttttggtcttatttgtcaaacgttttcattgaattattttattccagtttagttttgctgttggaacttaaagttaagaagccttgacttctgtgtcatatgtttcccgtagattatttggaaacaggaccacatttgaagttactgggaatattaggcccttctctggggaaacactacctttcttcatggatgtttggttatgggacatagtactttctaaatgttgtgcacctacccccaacacacagaccacctgatcctagtgatgagtgtttgggatatacctgtcactttcagggctgggacaagggtagggcaaatgaaatacttactttgggtgcaagattcaaaaagtaatccaaaaaattttcaaaaattaatatatttaatgcaatattttaaaatgaaaattaatgcaaaattcgtgatgaatgaattacaaaagttttaagtagagacagtattttttattttactttttgcctcagcttttactgtggctcggctgggtactggccactttagcaacattgaaataatctgatacaccgattcccacttccatgtacttggttgaatgatcagttccaaaagcacctcaaatgaaatctatgtaaatacttcctatcaattctaaaaacgtagggaaaggaatatatttaaatgtatgagttcattgtacaccaaccacaacctaaggcagacctctgggagctggaagctggcatcaggctgaagaagatggaaatgagaaaaggatcaaaagattaaaccggtttcaccaaacagtcaattccaggacacagccagcggtcaaatcccagagtcactgagtttcaaagctgagaatcagtcctggagtcaaagccaagtcgaaatagtgtaaggatcaccatgctccagtaatctcagaagagagtttgttgtgaaaccagcactgcttggcttcctttctagtgactgatcttgtcaattcctaaattaaaaactgcaaacctctcaccatttcctatggcataaattccaaacttcacataatatggctttcatgtgtctcacccctctcccagctccactttcacaaagcacattacaaggcaaatgtcgcaaatacagacagctctggctgcagccacaataccctccctacccactcccttaggcacaggtgccctgcagcccacggctttatttccttctttgatttctcctcccgccaaatgactgctccaaagcaagatttaattgaatgtcatttcctctttgaagcctttaccacctctcccaggttgggctaagggcagaaacttcttcctcacttagagcccattgtactgatatataattacatgtttacatgtctgtctcctaataggcttttatttgttgttttgttagtaacattactagtagtgatgaaaattattgtaacagaaactgtttagatgatacttcctatagcttctatagtctaggcaatggtaaaagtgtttttattttattttattttattattattatactttaagttttagggtacatgtgcacaatgtgcaagttagttacatatgtatacatgtgccatgctggtgtgctgcacccattaactcgtcatctagcattaggtatatctcctaaagctatcccttccccctccccccaccccacaacagtccccagagtgtgatgttccccttcctgtgtccatgtgttctcattgttcagttcccacctatgagtgagaatatgcagtgtttggtttttttgttcttgcgatagtttactgagaaggatgatttccaatttcatccatgtccccacaaaggacatgaactcatcattttttatggctgcatagtattccatggtgtatatgtgccacattttcttaatccggtctatcattgttggacatttgggttggttccaagtctttgctattgtgaatagtgccgcaataaacatacatgtgcatgtgtctttatagcagcatgatttatagtcctttgggtatacacccagtaatgggatggctgagtcaaatggtatttctagttctagatccctgaggaatcgccacactgacttccacaatggttgaactagtttacagtcccaccaacagtgtaaaagtgttcctatttctccacatcctctccagcacctgttgtttcctgacattttaatgattgccattctaactggtgtgagatggtatctcattgtggttttgatttgcatttctctgatggccagtgatggtgagcattttttcatgtattttttggctgcataaatgtcttcttttgagaagtgtctgttcatgtccttcgcccactttttgatggggttgtttgtttttttcttgtaaatttgtttgagttcattgtagattctggatattagccctttgtcagatgagtaggttgcgaaaattttctcccattttgtaggttgcctcttatgccatctccatcaagctaccaatgactttcttcacagaattggaaaaaactactttaaagttcatatggaaccaaaaaagagcctgcatcgccaagtcaatcctaagccaaaagaacaaagctggaggcatcacactacctgacttcaaactatactacaaggctacagtaaccaaaacagcatggtactggtaccaaaacagagatatagatcaatggaacagaacagagccctcagaaataacgccacatatctacaactatctgatctttgacaaacctgagaaaaacaagcaatggggaaaggattccctatttaacaaatggtgctgggaaaactggctagccatatgtagaaagctgaaacgggaaaagtgttttcaatgtgatgtttcacttgctatcaataaatttcctattatcacattatcacttcattctatactatttcatatcctcttcatcttatttatgaatgaaccaaggcttagggagccttcaaccttgcctgaggttacattcatctttaaacttccagcccctagcacagcaatagcctcataagcacacacaatagtccgttcagtgcaaaatgagtgcacgatggttgtgatcagccagaacaagtggaaatccagatcatgtttgcattccacatgtatacagatacctacacatgcaggcttgtagacttagtttacttttagaaaagttttatgcagtcagtattccttgagaataaagcttttagacacatgcaatgaattttctcttgtgaaataattattcacaccatgataacttcagtactagtattctgctgaaatttgatgaatttgagtacagcaaactcaattagctatattctaggtttgaacctcgtaccatcctagtttttggatattctgccaaatttattaaattgagggcccaatacattttttatgtgaagattttgtttccattattttgataaaaaatgaatttagcaaaaatagaagcagttctgctgaggatttatgtataatataataacacatttcacccattcagtgagactttacgaactagtgtaaggtaacattatggagaaaagatggtcttgcttgtttcacagaaagcaggtattaaagtgtggacacattacagagagaatgttacctaccagggagcatcaaacaaacagcaatccacctcctgctgttacagtttatccaaagagctcagacatcagcttttctttccatttctcagggataaaaatctattttctctccattagaatatcatctgttgaaaatgttcactgcctgaagattaaaaacttctctactctgggggtggatttttcttttatatcctggccttggagacaaatagaggaaaactatcaatgtgtaatgattattacgcagagtgctgtacctactacttacattcttaaatatgttctgcattagcacctctgagattcatagggatattagatcatctctttccatctcttctgagatgcccaaggaatcttatggagagaggaatgttatcaggtgtttttctagcataaaacctcttcttccctatacctcatacagttttttagcctaagcttctgtgaaatattggtttgaataaataaatgtaaatgtgaatacaaaaactattcacccattttggaaatcacacatttaatctcaagtcattttcagataggaaaactgaggcccaagaaatcacactattggttgctggtggcaccagaactagtctttatgttatagcatcccttgatcttggagttcctatcttctacctgcatcccagaattcttcattaaacctggccaccttctgtacactcttaattaaaagtggaattgattgcattctcaggtattgacattatacagataaaagaggggaagcaagtttttgctaaaatgacctgaatttttttattctgctaatgaacaagccaaacactctcctaaagctaattccgcttactttaataggctgcaatactcatacatattctctaaactttctgaactctgtttcttagagcctcctcaaaagaaaaaaaaatccctccttaatgagatttgtgtttatttgtctactccatcaatttcatcaccacttcaggctacaaaggatatttctactcaagtaaagtgaaaacttggcattcgtagctctattagtgatggggaccacaggtgaggataaggtgctttttgggatagtccagtgagtgaggcaaacatttcagcttgtgattatttttcctagctcctgataattgcctctgtctttccctttgcttctcatgtctagacacactgcccattcatgacctgttaagtaaactaggcagcagattaaaacacttgtttttctggagaatatcatgatagtagcccctaggcattctgaaatgagggtctcaattgctgtattggcatctgatatgagaaaaaggacaagcaacgactttttagttgaattcgcagtattatttttttcttctggtcaccattagtgtaagcttgtgttgggctaggtgatacatgtattgtggactgagggacagtctgtccttcatgctcaggtgccttgacccacatgaaataaatgacaaataagaacatctgtgagccaggattgtacttcctcgggaattccaggttacctatggaaacagttgcctgagagtccacattatcctcagacttacgatttgaccaatatgagaaaactccagggttgctttttctttctagcaatactggattactggcttgccaataagcattctttattccagtgtgcccagggcaaaggctgcagtcaagagtgctgtgacaattttactatagtacttagactgtatgggagtgaattctttttgggaaggaaaacatttgtggaagaaaaataaatgacaaattaggtagaatcaactgactgacaaaatagtaactgatgattttttagtcatgtcatgtaaataaagtgatatattttttaagtcttgagaattcttttacttaacctgaagcaaaaagcagaatgtgaaatgtattaagaatagagagagttcctttttatctttaacattattatactttgagcattagcatgatattagttttgaaagtgcaaattgagagaatagaatttaggaaattacttacatgggttacgaaggtatcattttgacatttgtggagttaactatgtgagccatgcccaaagaaaaagaggaaatgacttgggaagctccattagtagaaaacagtaagtgggaagagatgacatagtagatgtcaagatggatagagagataaggcagattgaacaacttgtagaatagacccactgcatctgagcctgaggatctggtgtcaataagcagcaagcactggcagccatactgagtacagaatttacttggcagaacgtaccaatagtaatagcaaacattgctttggctccttaaaaatccttcttatttgctctttatgcctcaagaaaatcctgcaaagtgctcctttaaatgcttatacagttttatgtgtatagagaagagctatatcaccatcaagctattctacatttgaaattaaggaagaaatagtttatcccttcatgaaatgatattgacaggaagcaattttaaactgttcaacaagttttaaaattcagctgatagctctcagactggttaaagtgaatgcaaatgttagaaggctggtagtgagaaaattaggcctggatgtaccattagacctttgtattaaaagattctaccattacgtgtttggagaacaatattatttattttgttttttataaaataagacataacaatctttagttttgcagtttattgaatccaggaaactgtcaatacttttccaagcaggcagtattttgactctcgtgatctggaaattagtatttctaatgccaaactaaacacttttataattattacactaacctaacatttctcatgaagcatttatgttgacctgtgatcaagtcctatgcaatttatggtttatacccttaaggaagccatgtctattttaagctgtgttggaaggaaacatttatgagaaaggacacatttacttagaaaatgtgggggaaacatgaaggttagccatatgatgtctccataaaatcttcatgcactttgaaacttaaataattaagttgataaatataaaaaaatacataacagataattctttaatattgaagataaacaactttatgtaatatttcagagagtgtgatgagtgaaagataagtgaaaattaactaaattcctatcagtcaggagacaaaaatctagcttaattttttaaaaagcacttacaatttgtttatattacattcaaaacacacacatccttaaagtcttaaaatcttacatatgacatatgaaagccatctctgtggaatgatctgagaagaatatgtatatactaggagcctggatattaagaattttgaatgaaggatgagacaaatttggcacgcagaaaaagatggacaacgttggctttggaaataattcttagcaattttattaaactatttatcccagtgcctagcaaatagtatgtgatgaaaacatattgacttgcttcccttcctgtagataagagatataaaacttgtttttcttgaatggatgatgctgtttcctaaagtcagtttaatgaattactgtttggtaaagtcagtttaatgaattatgggagtccagagttctttcatctgaaatgtgtccctagaagtttacttaaaagctataatctacatacgtcaccagatgtcactatcaattgcagcatcctttggtgggatacataatctaactgattcagaatgggacagaagttgtttttcctaatgtaatttaactaataattattgagcacaccctaccaagctgtcataaagacaaattagaggcagtgagttatatgtaagcgttgcctttaccaagttcagattctaccctgtgaacctgaggggtaggtaacgagcaacagtgatgaacagatccatgtatgactctctctccggccaactctttggtgagaaacataataaaggtgtaagtgaaatgtattggcagcatggcaaaccgagcatcagcatcccatcagctgttaagaggaggtgatatttgagctgggccatgaagggtgcagatggtgacaaagaatgagcaagaaccagtcacacaaataaatgaagtggagtctggtggttttgtgtagtgtataaaaacaaaataccttcaaagttgcagtctttctgaaacattttaatatgtgcttctagagaatgaaactcggagaacttgtagtttaaaccacaatggcgttactaatgccccaaaatacctcccttgctaaaagatgtattaatttactacttagtagaaacaagcagtaagtaaaaacaaagcacagtttgcctatattttgtgatgacaaagtgaggtagaaaagtaatgatatttatctctattattctccttttaatgtttttgttaatgaatcagcaacccaaagagagggataaagtatttgtcaaatttctgagggtgaggacagcaaagacaaacagatcttggtggagtttttcttttgtgtctgtgtgtgtgagagagtgagagggagagagggagagagatagaataggagaaggagaaggcagaaaaaaaggaaagaaaaaagaagagggagaaaggaaagaagagagaaaaagaaagactctcagagcttatatttggaaattgttctttttttcacttagaaaaatgtttgtgtttctaaaaactgctatactgagagccataggaagtgtatctatatttgaagaaatctatgtgagctatcagtgtggcattaaaattcaggtaatttttgagtggtgaagagcatatttgaaattgtgatgcaccctgacaaacgggatgatgctgaaatcttgcagtccatgaaatctggttggatgagattcataggaaatattggtatgaattacccctgctggtggcccagtgagggcatagagcaaagctatgggcaggtctttagccagtctgcttttgccactgtgagacctcaacagttatttcactggggccaaatgttttctggtggctcacatgaaatagtttaaattacatgtaaataaatgtggaaggagacagtggggaagaccatggcctttggaattagaaaaacttggttttgaaagttaaccaatttacctgtcttttctgagccccaggattattataaaatcttaaattaagtaaatgcggtacatagtgtgctgatgattgagaaatgtgggactacacgtgtagagaaaaatttatttagctttaagtaaaataagaaatggagatattataaaataataaccttgctaacattgaataaagtgagagagaaaaagagggagacagacagagtcaagagagattttccaggggctgctgggctatggtgggttttccaggggttggtggaggaaaaccgtaatcataacatagtctttgccttaccaatacatagcagattataggacatgaatttttactgaacaatatgtgatttaatgctgacgtgagggcaaggatgctgagaaacatgccactccggatccaaactgatgcagtgagttcacgctatgtatagatgacagaagttgagtcggttcccagctgtgtgaccttgggctagttcctttgcctcagtttctccatctataaaataggataatatgtactatatgaagttacagattaaatgaaggggtccaaagcatattcctcttcttctctgcttgatattgctctctggcatccagggactgctttggctctcaaagtggtgtcggagtgtcatgttggtgatggctttgcctctgcccatgcaaccgttctcacagagtcatggcccacagacataatggcacagaacagatcaatagaaatgccacagtcttatgttgtttcggttcagctactacatagcacagcctatagactgatattatgcctggagcctctggatcttcccagaagaatattaccttgagagaacccagatgataacacatccaaaagaacctggcatatttttggtggaataagtgtataattggggggataaaacattgtctcccccaattatattgtggggacagtgaggaataggccaatctgttgagcccagacagaaaagacaatcctttagttataataagggtaaacaaattagcaagaatggattgtaagccatgagtagttgggaagagtaaatctgcacaggattctttatttagcttgattctcttaatatctgttctgtgtggtggtaaaacttactggcatataatctgtctgtgtcctgagtctgtgcagattgaggctgtagataacacagtttatccccaagtctgatttttagtttttgtttgtttttgagacagagtctcgttctgtcgccaggctggagtgcagtggcatgatctcagctcactgcaatccccacctccagggttcaaactattctcctgcctccgcctcccaagtagctggaattgcaggggtgcaccaccatgcccagttcatgtttgtatttttagtagagacgaggtttcaccatattggccaggatggtctcgatctcttaacctggtgatccgcctgccttggcctcccaaagtgctgggattacaggtgtgagccactatgcccagcctcattgataggtttaatggccaaaattagtaccttccattagaatttattggaataaaagtattgtttatagatcaatgagacatgtaaaataatattggttaatttctttttacttttttatttttggagacatggtctcactctttcacccaggctggagtgcagtggtgcagccatagctcactacatctttgatctcttaggcccaagtgatcctcctgcctcagcctcctgagtagctgggactacaggcatgagacaccatgcccagctattattattattattatttagtgacggatttttgctgtgttgcccaggctggtctcaaactcctggcttcaagagatcttcccaccttagcctcccaaggcactggtactacagtcgtgagtcaccatgcctggccttggttacttgcttatacatgttcttcatatgtcactttaccaaattttttttttttgttaatttgtttgctttgtttagttttgtttgtaaaatcagatatcacaatggtagttcttattattgccccaaatagcagagaaatttccttttactatgccagaaaaccaccaacgaaagaaaccaatttctcccttgagaaatttgaagcaaagcttgcagagatccttgataacacaaagttgccaataaaatctgggggcttctcagtccatgagagtcttcttagttccaactgttgcaagcccagttgtgagtggaggtaggatttgcaacaattagaagtaaagctataaaggcaaggcagatgcaaggatcaaatacggaaattttcagctgactcattcttggatgagcagatttcattgttggattgctgacaccagcaaattttgtagaaagatggactcagagtgagatatatgatgtctcaggaatctgaatgtcttggctcactgataacacttacccttagtgatcccagtgggtttgcagctctcagagaaagtcacctcgctgatcatagtcctggaagatcctagcccatacgttctgccatgatgtacatagtgttgcttaagtaaatccccctgtttgagaccaattgtagatatttgcataagtgtaactgtaacctagaagctagcagctgactattgcaattttatatcaaaaatagaatggaggccctaagccccaatgatcatggaaacctacttgaaagacaagacactctggaatacatatggaggaaaaaatgtcattgtaaatgacattgaaatcatctgcatgccaattctcagtggtaaaagtgaaaaacaagtctttccaatgtatttatagctgtatggataataaatcaggcattttcttgtgctatgtaatgctcttcccagaccacattaaaaatattgtgtaccatcccagcaccatatgatagcatgatagaattccaaactgatatgtatttaacttttttatacggatggttaaatgttctatctgacagacatgctggaggcaatgagagaggaactgtaatggtagggatagtttctggagctccaaggcataaacagaggttcagaaaaatcagagtcacacttctgcttgcccatttaaaaacaaaaacacaggttttaattccatgtatacttagggaatgcttttacttatttattgtgtaatgagcagtttatagccatgaaaaaaatgcaccccttcaaaaggcttgctgcccactaatatgatggacacatttacagattagtgtaatactgtactgcaacaggtcatattctagaatagacagggagacttacagctcagaattcagatttaaaatatatttaaatacaggcatacctcattttattgtgtttccctttattgagcttcacagatagtgcttttttggggggtttgtttacaaattgaaggtttgtggtaaccctgctttgaattagtctgttggtgccatttttttttctcaacagaatatgattaatttgtgtctctgtgtcacgttttaggaatatttccaatattttaagttcgttatcagtatctgttttggtgatctttgatcagtgatctttgatgttaatattgtaattgtcttggagcaccatgaatcatgcccatataaaaaagcaaacttatttgaaaaatgtgttgtgaccgctccaccaactgtccattatgtcatctcttccctttaccttgagcctcgttattacctgagacacagcaatgttaaaattaggccagttaataattctacagtggcttctcagtgttcaagtgaaaaagaggagtcatgtattttccactttaaatcaaaagctataaatgattaagcttagtgaggaaggcacgttgaaagccaaggcaggctgaaggctagacctcttgcgccaaacagttagctaagttgtgaatgcaaaggaaaagtttttgaaggaaattaaaagtgctactccagtgaacacacacatgataagaaagtgaaacagccttattgctgatatgtagaaggtttcagtggtctggatagacgatcaaaccagtcacaacatttccttcagtcaaatcttaatccacagcaaggccctaactcctttcaattctatgaagactaaaaaatgtaagggagatgcacaagaaaattttgaagctagcagaggttcatgatattgaaggaaggaagccatctccatgacatcaaagttcaatgtgaagcagcaggtgctgatgaagaagctgtagcaagttatccagaaaaatagaactaagataactgatgaagatagctacactaaacaacagattttcaatatagatgaaacagccctctattagaagaaaataccatgtaagactttcatatttagagagaagttaatgcctggcttcaaagcttcaaaggacaggctgactcatttgttaggggctaatgcagctggtgattttaaattgaggccagtgatcatttaccattctgaaaatcctagggccattaagaattatgataaatccactctgactgtgttctataagtggaacaaccaaacctggattgacagtgcacctgtttacagcatggtttaagggatatttgacacctattcctgagacctactgctcagaaaaaagtattattttcaaagtattactgctcattgacaatgcacctggtcacccaagagctctgatggagatgtacaaggagattcatgttgttttcattcctgctaacacgatacccattctgcagcccatagatcaaggagtcatttcgactttcaaatcttattattttagaaatacatgtcataaagctatagtttccatagagggtgatttctatgaggcatctgggcaaagtcaattgaaaaccttttggaaagtattcaccattctaggttccgttaagaacattaatgatttatgggaagagtcaaatgatcaatattaacaggagtttggaagaagttgattccaaccctcatggatgacttaggcgttcaaggcttcagtggagcaagttgctgcatacgtggtggaaatagcaagagaatgagaaatagaagggtaatctgaagatatgaatgaattcctgcaatctcatgataaaatatgaacaaatgaggagttgcttcttaaggataagtgaagaaaacagtttcttgagatggaatctacttctattgaggatgctatgaatattgttgagatgacaacaaaagatatacaatattacataagttagttgagaaagcagcagcagggtctgagaagattgactccaattgtgaaagaagttctactgtgggtacaatgctgtcaaataggatagcatgctacaggaaactgtttaatgaagagaagattcaattgataggacacattttattgttgtcctattttaagaagttgccacagccacctcaatgtccagcaaccacttccctgatccatcagcagtcatcaatattgaagcaagattttccaccagcaaaaagattaatgactcactgaaagctgagatgatcattaacattttctagcagtaaaatattttaaattaaggtatgtacattgttttttagacataacgctattgcacatttaatggactacagaatattataaacatatcttatatgcattgagaaaccaaaaaaattgtgtgactcactttgttgtaatattcgttttattgcaatggtctagaactgaacctacaatatctaccagttatgccttgatatggtttggcattgtccccacccaaatctcatcctgaattggagctcccacaattcccacatgttgtgggagggacccagtgggaggtatctggtgggaggtaattgaatcatgggagttctcatgtgctgttctcatgatagtgaataagtctcataagatttgatgattttataaaggggagtttccctgtgcaagttctttctcttgcttgccaccatgtaagacattccttgctcttctgccgtgattgtgaggccttcccagctatgtcgaactgtgagtcaattaatcctctttcttttataaattacccagcctcatgagaatcacttgaacccgggaggtggacattgcagtgagccaagattgcaccattacattctagcctgggcgacaaaagtgaaactacatctcaaataaaataaaataaaataaaataaataaaaaaaataaaataaaataaaataaaataaaacaccaagcttcgggtgtgtctttattagcagcatgagaactgactaatacatggctgaataaggcttttctacagacttcagatatcttcctcttctacgcatcttgtttgtaccttcttgtcatcatttcctaagtacgtgtccctaaaagcattgtttaacctctctaagccttagttttatcctctgtcatatgacaatggcacaaaataattaatagttttattgtaaatgtttaataactgaaaactccagaactgcttagtacagtgtgtggcacagacaatcaacaatacccatatcttactttatcattattacagtatagtagaacaagtgctgcggaatcaataagtgagttaatacacaaataatttagactgtaattttatggccatataatatcttgagacctgataatcaaggccaagagtatcatataaaaaattttctcataatcaacttctgatcatcagtcttcttcacagatgttatttcttcaaccacttggatatttccatgatttctggaactccctgtcacaagttgggcaattacaggcgagagttttgttacctcctgagtttctgccacttggtcacttgtgcagagatgccttagtggagaagcagatggcagtgatggttttcatctgtgggttttattattttgtttgtttttctttattgttatggctaatcaaatttcacagttttcttgcaggaaaagctgaaccaagtgcaatacaagttggaaagtagaaaccatttattccttaatgtcttaccaagtacccaggcacctgctaggtattaggaagggtgtcaaaaagatcacccacctggcttgtggagcttccagttaggctgaataactaggtggagatcagggaggcattttatttatttatttattcatttatttatttttacagcatgcaagtcttgcatttatttatttttttaattatacactgattttttattatactttaagttctagggtacatgtgcacaacgtgcaggtttgttacatatgtatacatgtgcaatgttggcgtgctgcacccattaactggtcatttacatcaggtatatctcctaatgctatccctcccccctgcccccaccccacaacaggccccagtgtgtgatgttccccaccccatgtccaagtgttctcattgttcaattcccacctatgagtgagaacatgcggtatttggttttttgtccttgtgatagtttgctgagaatgatggtttctagcttcatccatgtccctacaaaggacatgaactcatcattttttatggctgcatagtattccatggtgtatatgtgccacattttcttaatccagtctatcattgatggacatttgggttggttccaagtctttgctattgtgaatagtgccacaacaaacatatgtgtgcatgtgtctttatagcagcatgatttataatcctttaggtatatacccagtaatgggatggctgggtcaaatggtatttctagttctagatccttgaggaaccaccaccctgtcttccacaatggttgaactagtttacagtcccaccaacagtgtagaagtgttcctatttttccacatcctctccagtacccattgtttcctgactttttaatgatccccattctaactggtgtgagatggtatctcattgtggttttgatttgcatttctctgatggccagtgatgatgagcattttttcatgtgttttggctgcataaatgtcttcttttgagaagtctctgttcatatccttcacctactttttgatggggttgtttgattttttcttgtaaatttgtttgagttctttgtagattctggatattagccctttgtcagatgggtagattgtaaaaattttctcccatgttgtaggttgcctgttcactctgatggtagtttcttttgttgtgcaaaagctctttagtttaattagatcccgtttgtcaattttggcttttgttgccattacttttggtgttttagccatgaagtccttgcccatgcctgtgtcctgaatggtattgcctagattctcactctgtcactcaggctgaagtgcagtggcatgatcacagctcactgcagccttgacagggaggcaattttaaggaaaccagtgaagacaagttatgggcattggacataaaccttttctctgagaagaaagagtaggagggatggaatcaatccaggacagctagctggggacatgatggttctctgctggatagaacgatctggattttaaacaggaaaggatgggcatttgagaacaaaagaagatagatgataaataaagacatgaattcactttgactttagagaaaggaagtaaagggtcttttggagcaaagggaaaggttaatggagggccctgatatccagcctgagaagagtacatttaatctgatcagtgaaaaggatccaccagaggctcctaagtagagtaaagacataatgaaaaggagtttaggaagattttctagcagcattgtgcaggtggaattggagcgagaaagactctaagcaaagaaaccagtgaaattgctactgcagcctcctggtttaaagtgatgggatcccatactagggtgatgctggtagaaaggagaaaagggtctgatttatcaaactctgtgtgttttgaagattacatgtgtacctgaaatgaatgaatgttcctcagaataacaatctctttactatatacaattttatatcatccttctaccacctcccatctcccagaaactatacaaataaattctaaggaagcatgagttttacaagaataaatttgttcagtattcttccactaggagcttaagtccatgtgtttcagtatcttccaagatggatatgcacagcgatgactacgaatgtctttcatttcttatccccaaacatattataaacaagccagctatatacatttttgctgggaaaatatggcagattaagacaatctttgatttaacaaaatttgagctttttctttttggatatttaattgcctgctaagtgtatatatatatttttattattgaaaaaatcagagggacattctcagttttttatcccctaactatacctatttagaaagtagatactgattggtaatttataatataacattataccagcatttcagttttagctactagttatcttacatccatgtgtgcttgtcttttgaagattgctttaagagttttctaggtcttgttttctttctagaaaacaagtagaagcctttatattaatatctgtatgtgcataacttgatgagcacttttgcttcttagagaacctaacacctatctgcaatcttctcaaagttcaactgtttatccttagataacttgcccattttcttctttgcctatactatttataagtgcaaacaatggtaaaatatcaattttaataatgtgaaactatttcaggattttatcagatgttcagaaactttaatgatataagtcatatttgatgtatggagtcaccgctagggaccaattcttatgaataaatttttttttctggtctttgctaacattaaaatattttgagaagctaattggccaaatgatagcaaaataagtagctgaacgaggagtctggctatgttaactggattgattaggtaataaatttttactgaatttatttaagcacattttgttaagcaccttggtgggggctaagcataatgctcgtaattgggtagcaagaagtgtgtaatttttatggaatatcttatggaatgcatagcccttgagaagaccaggcatattcacaacatatttaatggaagtcagacttgggaatacaacagcacatagtttaaaatgagagtgaaattttttcgtggtgggattgtaaaagatcaaggatatgttagtctgaggttattgatttcacaaataattggtgtttctgggactgttatgtaaggtgtccaatagaagagagaagcaggttagaaatctaggactgaagattgggcctgaagaatgaatggccttaatcatgatctaaggagtgtgaacttgattctgaagacattagaaaagtatctgtgatgtttgatcaaggaagatactttatgacatcagagccataaataagtgctttgtaaaacagtgctttcgccaatgtaaaaatagaaatcatttagaatagcagtaaccattatatccgcttgggagagattatgggattctatttttattccatgaccatagagaatcaatccattacttcactatattttgtattctcaagattccagcagataattatcaacatttattagtgaatctgtttattgattatgttcaattgttgaaaaatgttatcaaaatatactactaaaagtatccacagcaaaaaatttccagtaaaaagtcaaaatgcaattcttctttttttttttttttttttggtaaattggtattaagtggggatgagagcaagggaactgtttttctattaaattttcaaggttcattttattaagagacaagaaattgaaaaattaactcatcatcacgctaccctggcgccgtgtctcacggctggaatcccagcactttgggaggccgaggtgggtggatcacgaggtcagaggtttgagaccagcctgcctaatacggtgaaacttcgtccctactaaaaatacaaaaattagccgggtgtggtggcatgagcctgtagtcccagctacgcgggagactgcggcagaagaatcgcttgaacctgggaagcggaggttgcagtaagctgagatcgcgccactgcactccagcctgggtgacagagcaagactccatctcaaaacaaacaacaacaacaacaataaaaacatgccatgcatgtaaagcaaacaaagaaatatgttcttactttaattcttttaaaatgccctctcatcaggacacaaactctcataaaaatgtaattcaaagctttgaatatcacattgtggttctgacagccaacataattatttccttttaatccttttcctactttgtatatgtcatatgcagttcatttcacatacattttattatttccaaatatgtctaatattttggtagtataattgtttttagaagtagtgtacaaatgaagaatttggtattcttatttcactgagtatggaacttagcattttcttttaaaataggagacagtagtacgttcagtctttcatcctcaaaatatgtaacttactttttattataagctacaccaactctttatatcattgtcacttggtctttgtttatggtgagttggaagcaaacatttctgctatagtcctaaatgttatttcagttaatagtttcttactgaatagagttagagggtattagaggagttggaaaaatatactgtaccaacgtctggagtagtaagggatttttatgtttcctttctttcgtttcgtaaccagcctatgtttaggtcatagtgaatgtgatatcattatctttacagagtagttatctgagtgcatgtaacctcattttctataatgggaggttatggatgaagagcatatcctacttcctaatactgtcatagtcagggctcttaagcatcatttttgtatgtgatgtctgtattaaactaaattgcaattctaggtgaaaggtaatattgggaacatctaactcagttctgatgttttcaaagtgaaccacaattcaaatcagtattcaagaggctcaaacttctctattttaagagaaatggagtctgtcaactcttcactgtcttcttcacatctcctgcagcaatctgcagagcaaattattgctttcaccatgttcctaccatctctagtaatgctaattacactaacttgcatttaattctgtaatgttatgtcatccattctggatgtgaacttgttaatgggatcttattcagcttttctagtgcctagcatattgtcaaggacacagtgggctttaaataaatccttattgaatgaatgaatgatggaaaaatcaaagacaggctacaaatatatgaatgtcaggaattttatttactacactttgattttaagcaaatattaatggttatacaaagaactcttcaggaaagctattctttttaaagaaatttccactgggctttgagacagaggaaatacaccttcataggcaaatatggcagagagggtgaaggaaacggataaaaaggttgtctatcagaataaggacagatagtgtttttagtaatcatgctaaaataatgggagataataggaatgattgaaagaaatcttcttgggtttatgactaaaccagacacctacttgttcactttttaaaattcaattgtacatatattttttaaacttcctaaggttaaaccttccaaggtcaagagtaagagtatagggatgttgtagctagtttggaatgcattccatcctagctcctgcaagctcctttcactcaaaagtgctcagagatgtgattagaacccccagtttttcatcctagagcagacttcctttgtctaggtctttggcctgaaaattcagcatcccacgtgtcttgctgcaccactgagatcatctttgttaggtaatttgagcactcattcagaaatactgcaatcacaaattattttgcagtgattctagataggagggtattagtagctgctaggatcatcaatttagctagaataggtttttacagccaagttgggtttttatgacccattacaaaccactctttgtacacatgaaaaagcagcagaagtggcatgtctacaggaataattagacatagcatgatgactacaacccgttttcttgattctcctcagttattttgtctgtagtagtataaatggagctttaagacactgctcaggatgaattgttcgattgaggtaacaatgtgactgaaagatatgtagaaattgtctcttgctgttagattcgatgtttgctttttctttgaaaatatgaacttgaacgaggttaatgttaataaggtacttctgtagctttattttttaaactgttgaaatttattttttgtgagtgtcattacttttttattttttgtttgataagtttcagatttatgaaaataaaaaaagaatttttaaaaaaatcaatgccattagcagaaatataaagtattttactaatttttttgggggggtgggtggtggtgcttgctgtgtcaggttctctggtttgaaaggccagtaacctgccttacatcacagagtaagcaagaattaagtaggagactgaatctaaaatccattcatttagccaaatgcatcatggctgcagactgctttgctatataaggggccactgaaacttgattctagctgtcattgtcattaactcatgactttatcaaattcttatgttagtggcaaaacagttacagtataaagttgagaatttgttgcttctttatatggaatttctcttctattagctgtaacatttacattttagatattcaggttcaaaaccaaattaaagcaaaaacatgcaaatgttctcatcacatgtttaggagagattatgttaaccttttttttctgattttgcccatcatcagcatgtgcacagaagttttttagagtaaaataccttcttccacagattggtttggcacattagaccataggttaattccctctgtccattctgctccatctcaccaaagttacgtgatgaggaaatcaatcccttttctagaaaaggatgcacacattacttttgatcaagacattctaattggccgtattccccaaatgagcatttctattaaatattcaaaactcaaacttaaaatgatcatgcaaaacttaagtctttagttcatatacatgaaatgttatataaactaaattatcagtcctttcaatttcaattatcagatgagtttatgtcttgataacctggatcttggttatacatttctctgtacaattttcatcgagttgccttggaggagttcaatgcctgtttgtataatagcttttcattgtttcagtgaacctctcatcattatcaaagggtttttcagaaaagagttaagtctgatagcctgagcattaatgaactaaaccaaaaatagatttaatcaggcatgtgcatgccgctgttcataaataatgtctattcattgctgagttaaactagatgtcaagtttttttccctttaatcttgtacatgattctgcacatagggccaaggaaaccacacctatgctgtatacttttctctgtgtctttcttaagtatctgtatgatggctttagttataaacaacttccttagagtggagttagacttaattaacaatgaattgataattacagacatgtgcttcataatgatgttttggtcaaggatgaaccacatatgtgatgatggtcccagatgattgtaatatagcttaaaaattcctgttgtgaaatacttatcattgtggtataatttccttacattattcaatagaataacatactgcacaggtttgtagcctaagagcaaaagactataccatatagccttggtgtacagtatgctatatcatctaggtttatgtaagtacactctatgaggtttgcacagcagtgaaatctcttaacactcatttttcagaatatgtccctgtcattaagtgatgtatgactacgtgtgaattttgagcttcttagaaaggcatagtgtaagttgaagtactttcatggaggatatttttccatatgaaaatcaccatgatcaaaagctcacaaaggactattatccagatactaattaaataagaatataaataggagacttgcctctgtaaatattgtcaaacaagactgagtaacgtaatctggatacttgcattaacatttgattttattctgttttccatatctaagtggaactgttttattatatatgaaacagtgtttttatcaaaattcttttgtcccatccagtaataaatgtcttgtataagattcaataaggaatcctcctttatcaagcctcagaagacattcctgctttcaaacttccagatacttaaaatgacaacaacaacaataaaaacaaaataaaacttctttgagcatctcttcattcattagttaatctgcttctttattaagtgaacatttattgattgtctactacatatagaaaggtacaagaaacataattcagaattctcatcttcaagtagctaagggcactgtactgtgtaaaggcacaagacattgaattcttgagccaaatacccatgactgagagcagggatagatatagtataggcacttaataaatatttgtgaaatgagtgaacaaagcacaatgtaaggatgcccatgcatgctgtgataaaagtacagatgaggaaggttccttaatccataaggaagggtccgagatgaagtataaggaaagactaggaaaaggaggaagtcaaccaccacacattaagggatgggttaggaattacaggcattgtggtattgccaggacatccagtatgaaacagaggctgtctagaattaaggtgtgaaacgcaggtgggcaccctgtcatggaggtcctgatggtcagagattgaaatgagttttatttattcacctagatgatgattgttggctgggttagtctccttagcagaaattctttcttctgcactccatggatacaaataataacaccctcttttattaacaccctctttaaattaaaaaagggactgtaggccgggcgcggtgctcacgcacataatcccaacactttgggaggccgaggtgggtggatcacctgaggtcaggagttcgaaaccagcttggccaacatggtgaaaccccatctctactaaaaatacaaaaattagccaggcgtggtggtgggcacctgtaatcccagctactcgggaggctgaggcaggagaattgcttgaacctgggaggcagaggttgcagtgagctgagatggtgccactgcactccagcctgggcaatagaaactcagtcaaaaaaaaaaaagagtaaagtataaaaattgcagagtagatccagttttccaaaaagaacttccctgctttgatgaacttcatccacttaatcatgttccactcttttttttttctttgagacggtgtctcgctctatttttagtagagatgggatttcaccatgttggccacgatggtctcgatctcttgacctcgtgacctgcctgcctcagtctcccaaagtgctgtgtgcgattacaggcgtgagccaccgcgcctggccaggttccactcttgctcatagttctctagtgttcattatttgttttatccaccactggagtttttttctcacttccagttagtagcttctcagactttatgtttgtgcatttttatcacaagagccaaatatttacagttgagcaagacagagaaagtaacataaaaagttaacaattccagggaggacactaaaataacaagtcagccttttgttaatttcttcttcttagcaatacactggcttcctgatgtaatctcatcacatgttttaattatgtgagcctcctcatctgtaatcccaaagtgctttgcagatattttatgtcaatttggaattgagccataagtgctcattcttattttatgagtaaggaaagttgttgtcattcaacaagtgtaaacttagaaaaacttcagtacttgttgctgcaagaacctcccactcccacacaataccactctcttctttgcagctgtggggactggtcaaaggtgtttctttctgatgcatctgcactttgcatagaagagatataatagctccctcaacttctgcatttccctgaagaatgcgtacttctgtggaaggagtagaagctgctaggagctccaacacttcccactttttagtggctgtatttcataaaatacagtttaaggtaaggatgaacctttaggaaatagtttatttatgaaagatcttgtaagccatgacaaggaatttgtattttatcctgaggacatatgaagtcattggcatacatagaagagttaatatgatcaatttgtcatggaaaaatagaaagctccagctgcaatgaagataatggactggagtccagtaagcctgaaggcatctagaccagtgaaaaggttgttaaaataatctaagcttgaagggatggtggtctataacaggataatacattacagataattttgaaagttatttaagggcaagatctggcaggagcaagtgattggataagtttaagagagagagaaaagaatcaaagataatgtctaattgaagggctgggcaactgggtatatcattgagatagacagcatgtggagaggaccaggttattggagcaaggaaatgagtttgtctttaaaagtaatttatattactcacaaaattaaagctttagctttttctccagttaaaaatgtattgcaaatctttgagctgagaaaacttctgctctatgtgtagttcctcatctagatcttttcctagttcattcatttagatgttgtattaaaatagggtttggcagactatggcctgtgggctaaatgtgccctgctgtctggttttgtgtggcccacaagttaataatggcttttacgtttttaaatggttgggggaggggaatgttttaaagaatatttcctgacaagtggaaattatataatatttaaatttcagttttcacacataaaattgtgttggaacaccatcatgcccgttcatgtacatgttgtacatggaagcttgtgtgtcatagccacagagttgagtagttgcagcagggaccttattacaatgcctaacatttatgctaactgaccctctacaaaaatgttttccaatccttactaaatgattgtctcattctcgaatttgatgatgctaaatttaaaacaaaattctttttaaaaattcaatagcattctagttgagggatcaggtactttcgggttttcagatttataagctgtgtcagccaccagatgctccaatgtaaaactcgttaatgcatttaattactattgactttttctaatatctatgataccagagcagtgtatttcagaaaagatgtagttaatctaggtggaagaaaaaattgagatgccatcttagctgggtttatctttatgctaacaataaaaaataataatagcaaatgctttctctgggtcgcttcaagttgcagtatcattaacaatacagcaatattttatgttacagtaaactttattagaatgtgttaggtagtgaggtgatgctatgtgctacatggtagctgttatagctgaaattggtttgcagtcatgcttcagcctatttgcttttagaaaaaaataactttatccagccaaccatagtaataactatttttcaagtagcatctcatactattttcaggattataagtaagccttgatactatgagacagatttttctactgcatacaaagcaaggcattgtatattcacttgttcagtttgcttaaagtgatataaaatattttaaagtatattagaaatgtattcctcagccaattaacaatagctgatctaataagcattaccctttgatttggaaacacttgagtcaattgtcatctgttttaaaatatgatatcttttgcttcagcgcttctttgagaattactatcatatttacatgacggtcataattataagatgtctatgagtattaaccctttttaccatgaaatagtaagcctcaagtggaagctatacaacttgtctttttgtttatactaatgatcaaatgtagtggcactttggcccattgttttgcttcttttagtcttaccaatttatttacattgagattttaaataaaatttgaacaactaagacatatttgtgtttattcaaacagaacatggattaaagtagatattgagaagcattggtgtatattacatatgggctaatgatggtttcctaatccaaaactcaaacagaacatggattaaagtagatattgagaagcattggtgtatattacatatgggctaatgatggtttcctaatccaaaactcttgccatttatgtcactggttcatttccccaattcctgtaatgtgccaacctttccctccagcatgacatacctttgcacatatgaattagctttgtaagcttaacttatgtaccctacttgtgttttgagactactttgagtgattcttaaatgataagctctatttgcatgggcttaataaatccatggagccttcaaaacatttgaggattattttgtgaaaactcttcagccttggacattgcctaattcttgaattattaactactgatggcgtcgaagacccaagtcattcctgaattgcattctctggttctaaaatctgctttctctaattctaaaatccttcctcttcccccactttcattcaatatgcccctgtgtttaatgtggctttccattcctacctttcttttgactagccttcccagtttatggtgtgaaagcaagttgaaattagaacattgagtgagatcgtcaagagtcaggcattagactttgtggagtgcttaccatgtactgtgcactttacacaagttgaagttgagtttatgtaaatctcataagtaacttttaagggaagtattgtgtccggaattggtgggttcttggtctcactgacttcaagaatgaagccgcggaccctcgcagtgagtgttacaactcttaaggtggcacatctggagtttgttccttctgatgttcggatgtgttcggagtttcttccttttcgtgggttcgcggtctcactggctcaggagtgaagctgcagaccttcgcggtgtgtgttacagctcttaaggcagtgcgtctggagttgttcgttcctcccggtgggctcgtggtctggctgacttgaggagtgaagctgcagaccttcgcggtgattgttacagctcataaaagcagcgtggacccaaacagtgagcagtagcaagatttattgcaaagagcaaaagaacaaagcttccacagtgtggaaggggacctgagcgggctgccactgctggctcccgcagcctgcttttattcttttatctggccccacccacatcctgctgattggtagagcggagtggtctgttttgacagggcgctgattggtgcatttacaatccctgagctagacataaaggttctccgtgtccccaccagattagttagatacagagtatccacacaaaggttctccaaggccccaccagagtagctagatacagagtgtggattggtgcattcacaaaccctgagctagacacagggtgctgattggtgtgtttacaaaccttgagctagatacagagtgccaattggtgtatttacgatccctgagctagacataaaggttctccaaggccccaccagagtagctagatacagagtgtccattggtgtactcacaaaccctttgagctagacataaatgttctccaaggccccaccagagtagctagatagtgtcgattggtgcactcacaaaccctgagctagacacagggtgctgattggtgtgtttacaaaccttgagctagagacagagtgcagattggtgtatttacaatccctgagctagacataaaggttctccaaggccccaccagagtagctagatacagagtgtccactggtgcattcacaaaccctgagctagacacagggtgctgagtggtgtgtttacaaaccttgagctagagacagggtgctgagtggtgtttttacaaaccttgagctagagacagagtgctcattggtgtatttacaatccctgagctagacataaaggttctccaaggccccaccagactcaggagcccagctggcttcacccagtggatcccgcacccgggctgcaggtggagctgcctgccagtcccgcgccctgcgcctgcactcctcggcccttgagtggtcgatgggagtgggcgccctggagcagggggtggagctgtcgaggaggcttgggccgcacaggagcccatggagggggtgggaggctcaggcatggcgggctgcaggtcccgagccctgtcccgcaggaaggcagccaaggcctggtgagaaatcgagcgcagcgtcggtgggttggcactgctgggggacccagtacaccctccgcagcctctggcccgggtgctaagccccttattgcccggagccggcagggccggccggctgctccgagtgcagggcccgccaagcccacgcccacccggaactccagctggcccgcaagcggcgcacgcagccccggttcccgcttgcgcctctccctccacacctccctgcaatctgagggagccggctccggccttggccagaccagaaaggggctcccacagtgcagcggtgggctgaagggctcctcaagtgccgccaaagtgggagcccgggcagaggaggcgcccagagcgagggagggctgtgaggactgccagcacgctgtcacctctcagtatgattatttccaaacgaaggaaaagaaactcaaggaggttgatgttttgatcaactaacaaatctggagcctgccttcagcttgggtatgtttggctttaaaacctgcagtttttccatgtcacctgcctgtctccccaagagaaaagtaatatatggaaaagaatagagaggtgaggaataagccttggagaaatcactctttagcaggtagactcaaaaatcaagagccaggaaagaaaacccaagatggaggcaaaaagatggcaagaaaatgatagtcattatctaaaaagccatggggtgtgggatttctaagagaaaggaattattatggttgaattggttgaagtgaggctggtggaaggtcctagttgctggcctaacaggcatgtttcattgtgtctcttttctccattcatcctgttagtctgcaagtattctccctcgagacccctagtactctgtgcaggggactaaagacacaaccctctcaaatatcaagcatctaccgcttttctaagttctgcgtcatgaactgctgttcatggagtgtttcatttcagaaagaaagagtcttgtaaaataaagttctctttatttactaggccaactaactaaaagtagaatacttatttttttagacggcatttctttgaagttgatgtgtttaggtgctatctcagggagccagctttgtagctgtttaccacatttcctgaggcaaccttgtgcgagggctggagaattgtaacaagtgtcttgactttctctgcacctggagattaatgtgctggtaaaaactttatgaacccttaatcattcattgcaaacatattggatcctctaaagcttaaaagcttcagcattcataattaagagacaacagaacaggatcatgtaaatatgaaaatggcctccgagaaagttgaatgaactttctcgttttctttatttaagttgtggacactttaattttgaacagaagcatattttcttagttatagaaatcaggtataaaattatccctactgttaaaatgataatgaaagaaattttaaatgacaagtaggtaatttcaggaaaacagattgtatctccttgttacttactgtaactattagttgttccctcctctcccctaacatacattatcttctgcttgaaacaatagatagttgtattagaatagtgtattcatttgctggggctgtagttacaaagaaccgcaaactgggtgacttagcagaaattatagtctcacagttctggaggctgaaagtctcagatttgtatgtcacctgcctgtctccccaggagaaagataatatatggaaaagaatagagacgtaaggaataaggaataagggtgtcagcagggttcccttttagggctgtgatctgttttagcatcttgtagcttctggtggtttgtgggcaatttctggtgttcactggcttctgctccatcatcctactctctgcctttatcttcatgatatggtttggctgtgtccccacccgaatctcaccttgaattgtaataatccccacatgtcaagggtgggatcaggtggaaataattgaatcatggcagtggtttcccccatcctgttctcatgatagtaagtgggttctcaccagatccgatgattttacaaggagtttcctccttcactccgctctcattctctctcctgccaccctgtgaagaggcaccttctgccatgattctaagtttcctgaggcctccccagtcatgtagaactgtgagtcaattaaacttcttttctttctaaattaccagtctcaggtatgtcttcattagtagcatgagaatggactaatacacttcatatggccttctccctctatgtgtgtctgtgtccaactttcccctttttataaagacactagttcttattggattaagggaccaccctactccactatgaccttatctttacccaactaattacatttggagtgacatatttccaaataaggtcacattctgagctactgtggggtaggatgtcaacatatgaattttggagagacaaaattcaaccctcaacagataatgtaggttattctgtgataacagatgactccaaaattccagtgtcttagaaccacaaaggtatgtttctttcttaaatttcagtggggttcttggtacttcttctatcatcctgcaagctgtggctcagtgttgagccttcatgtagcatctgcttccatgatctcccaagtaagggaagaaagctccgaaaggtttaggaccagcaaaaaaaaatttgtactggaaagtgatgcatgtcttgtactaaaattttattgactgaaatgtatcacattcctcacttaaattcaaagaagtagagaaacgcagttcatcctatgtgacaagaaagaggagaaccagagatactaatgagaaggagtataccttcatccatgtatctgtcgatcaatattaaaaaaaaaagaaaactagacatctatttcgaagtcttgacaagatttgtagctgtctagctaaataaggttgttttcctaggacttgaaatgttgagccattaattagttctcctttctgcctctccctcactcagggaggattcattcctgaaatgaaaatggaaggtgcatctttatgagtaaaagctactctagtttatattgtggggagtatttgttggatatactatggcaattcccatgcacagataaccatggtacaaggctgaaagaacatgtgtatgggtctttctcagatctaatttatttgttttgtagaaaggagaatcttaaaggtaacacaataggactgtgatcacacatactgctcaggagagacacagttacacagtaactttctatatggtctttagcttgaaggaattccagaggaaatatcttatttaaccctcctccttgtgaaaatgtcctcccctagtactcttcattgtatcatcctgtcttatgtccttagtagcatttatcacacagccatttttgtatttatttgcttgcttgtttcttaccttccctgcactttatgaaacatcctcctccctacccccccatataagttccctttcacgcccaatatattgcctatctctgtttctcacggatactccagcattgagaaaaatatctgcctgatactgaagcaaataatggatagattgaatagatgtaataagtattacattaaaaataatgtcttaatgatggaacgtagaaaattggggaaaatatttggtcgctgttaaagtctaggtaatgggaactagaagcttacaaggtaaatatttctaatgtttccaaaacaattatttttctttcctagactccatggtatgtatatttctcctgaggtctctttggacaacatactatttattatcaaattatattcatttatcttattttctgaaaacaatatattttatgttcaaaaatatatgccatccactcacagcggagttgttgcacagggcgcatgatttgaaacttgtccttactgtatttgtagggtaatttgaggtaaatgaatttggacagaagccattaagtaaaatgattctttcctaaattaccttaagtggttaattttattactgataataccgtaatggagacgttcttcatataattttaagggaacacgctttgattaaaatcatatttgtattttattattattatttttgagacagggccttgctctgttgctcaggctggagtgcagtggtgccatcatagctcaccgcagtcttaacctcctggattcaagcaatcctcccgcttctaccttctcagtagctgggactacaggcatgggccaccacacccagccaattttatattttccaattttttgtagagccagggtctcactatgttggccaggttgatctcaaactcctggcttcaaacagtcctcccaccttgacttcccaaagttctgggattataggcgtgagccaacatgtctggcctaaaataatcctttttaaggaaagatctgagttttatttgctgtttaaccataaaagacaaaagcattttttctgcttatatttttttaaaatcatcagttgtcattgaaataattataaaaggattcattggtggtctaaatgaaaacaacggactttaacagtagacctgtatttgcagtacaacccaaggatctccatgcactagtggttttcttacatagacgagttcagagaaagtatgggtccccgggtattctaatctgtaagtatcagtgtgtcttcacttttaatgtaaaattatgccacagtgtcattttttggagattttgtgtgctctcgatcctcccctaatttttcatttagaacctgtttcttggctattgtcttaaaatttcccgacacagttaaggttcaagctttagctttataattttagaattagtgctactggattttaataagatatcaacacactgcattctaggtaaatggcatcccctgaatttgtggcatgtggtatctaaaattaggtttaggtggccaagagtgtgagaggcaagccacattgagttttctaaatcaatgacacctgttcacatgttaagctgcccttctcaaggctaacttttcttttggcttctagggtgtgtgttcaccattatctaccttatggttgtctttctccattgtgaggctgaaataacttctggtggcacctttctgacagtaatatctagctggcttccatacaaaattctgtctttgcttctactcatttaaagtcattctgcccagtttctggttatgaactgttgtcactgtgatggatttcctgcccttgaggctgtggcagccaagctgatatcatactgtattttgtgtctctgttttttgactggataaatggtctttaattactgctggttcttcaaccttggggaaaactctggcagtattatcagtttttgtagctgacagtttggaaatagggaatcttttgccataatattttcaattaaaggcctaaattcacatgcttttctactgaattttatacaataaagttaggttaagaattccacaaacatttaaatctacacaacacatttactgcatttaatactgtatttaatgatgatgacgattatttaaaaatcattttctacttgatgaaatatcataacatagcactaatataaattaatattagcagaattaacatgtaagtttttcagtgaaaagaactcttgatgtattggaaaacgtaatgaaaatattaataattatctagacatgaaagtgacgagtcaatatttctctggaagtttatggccaaaaccatactttgaggcaaatattgcattagtggttttctatattgatcagacaaaccaaataactaatattacccccccattgtgatatgttgcacctttctgcaattgattattagtgttatattccttacataggcagttttgagtaacaaggttttaaaaataaattatatgtatcttgcacaccaatgtaattattactggttttaatataataatgtgtatataaacttatgattgaaattagttgtatagaaaactttataaaatgagggctccatcagctattccattctcatctagcattggtaaggagtaaatacttagtaaaacttgatgaatgaatcttgcagtggtggattcaaagccatatgtgtgtgttttgtttttgtttgatgggttttttgttgttgttctccaatttttttatcgtaaaatgtataatactagtgccacaaattttatttttattagaacatatagtagtctacagcttaataactagcagaaactaaatactagttttggtcctgctactaaaaaatttcaagtaagacctgaatttaaccagtattgtatttctttaacaaattatttaggaatatggttttcataagggcaatgagagtcagcaatcaagtttttccttctgaaattttagatatgaaaagcatctaaaatttctcaactttctaaaattttaaactgcacttacaagtaaagtattattcttttaaaagcttaaataatttagttaaataactttacaattcactgatttccaaaagggtacctacatactgtttcactatataagtatagcacatagtagagtccatctaccattgtctaccattgtcttctgaaacaatatagggaactttctaaatcataggaaatctaaaaaatcagctagttcaagccatatgtttcatagctgaagatactaggtcccggcgggggggttgggggggggtgttgatgatttgctctaagtcacacttgttaaaatctagacatctttgttaccagcctattgttcccaaagtcaacattctgtgctctgatgcaatgctgattttaaaaaatcattcgttcataacctcatatcatgcctttttaaaaatctcttctttgcatttccctctttacgttatctcattcttacattcccaaggcctgggcacacagttggtgcagctatttgtagttgaacttaactggattaacatgaaggaacataagaaatttatatggtatcacataatacatcaagcattttatatctcatccaacccacaagccatgccatcttatgtagatacttttgatggaaagaaagaagaaaaatcaggataaatgcctcaacagctgtcaatgttaaataatcccttaaagctgtgaaagccttcatttgctttcaggagttgtgacatatggtcaaaaatagcttgaagatttattatgtcatatctgttggatgagattcaaaatatactttaagaaagattccatccttcatcatccttgaaaagatctttcagaactcatagagtatatagaaagcagacggagaatgatgatgttcagctgcttcaaaatgacagactctaatcaggattgcccacctatcacaccaaattaccagtaaaaaatgcaaattttctaccgacatgacacttttaaacacagacatctcacagacctccagaagccctgggtatagataagacttgaattactttcctccaatgttacattaggattggaaggcagattttaaaattatgtttttaaaaagcggtcattcttccccatgttaagaatttaaccttaaagatgaaaaagctaagaaactgaagtttgtcagtggattctagcttctgtaaaagttggaagaaaaaaaaaatccacttaaattttgtaaaaattgaaaaaaaaaacaactaaggaataaaaaagaaatgccaagaacatataaatgaaagagcaaaagaacaacttgagtaaaacattatagtaaagaggtcacctaacttaataaactctcctgggttcaagcagaagtaatcaagcctactgtgtatataagatgaaaagaatcaaaggggaagctccacaaagcgacttctttggtcctggcagtgtctctgcatcacctgtgtccttccttttcccgtgccctgccctctgccccgcttctgctctactttcttgctatttgcctcctaaggcttcaaaatactgctaaacacatttctaaagccttctagacataggacagtttgtgtatgaatcattttatttaagaattaggacaatcttttttgttggaagtagaataaattgtgctccaatttcaggtgcttatgaaaaatacattgtaccacaacctgaatattatgttgtgtaaatccctccagccatctcatttggggcaacttttagataaggaatgaaattacttgtggtataatctataattatttttggcaaatgcatgagtttctcctgcttgaaatataaatgttttattaggtagccacagtatttggcccctgcatgggtgcttaattgaagaaaagaaagaaataacatctaaagatctgtgtttcatggacgtttgcgaaaatggccgtcacaactcatctggtagaccagaagaccaggtggacgtgacttatattaaatcttgccagagctggacatctggctcttcagttgttctggtttcaatttggatgtgaagcaccgttcttagtgtgattcaagtactagatccacttaaagagttcttgtgtagcccaggtctctgccatgtttgagagctgtggtttgttttttgacaggaaacctccatcagagtttattgtaggtatctcattagtaatttttagcatgccactgtgtaccaatgttgaactttatcagttgaattagagaccatgttaggacctgaatgacaacttccctaattaacctgaaccacattctggaacgccttttgacatattgttgccttgtaagtaaatggctccacttttttttttttcttttttcatacaaagacagttttctatctatcctcaagcacaccaaccatgttgttgttgttctgacttacggcatttgcttgatttattttccaccctgctcttctttgcttacgtaagtcctcaaatttctgcttaattgtaatgatccctgactaccttataaaggcatatctctgaggtatggtggattcagtaccagaccacagcaataaagcaattatcaaaataattaagtcacacaaatgttttagtttcccagtgcataaaacttaagtttacactatactgtacactgagtattcaatagtgttgtgtctacaaccggtacatatcttaatttagaaatactttattgctaaaaaaatgataatgatcgtctgatccttcagtaaatcctaatctttttgttagtgccacaacttgactccatgtttttggctgctgattgatcaggagggtagttgctgaaagttggggtgaatgtgacaattgccttaaataagacaacagtgaagtttgttgcattgattggctctttctttggtgaagtatttccctgtagcatgtgatcctatgtgataacattgtagccatggtagaacttctctcacaagtgaagtcaattctttcagaccctgctgcagctttatcaactcagttatgtaatgttctaaatattttgttgtcatctcaaagatggtcacagcatcttcagcaggagtgcgttccatctcaagaaactgacatttttgctcacccataagaagcaactcctcatttgtttgtttgatcatgagattgcagcaattcagtcacatcttcagtctccacttctatttctagttttcttgctctttataccatgtctctggtgattttctccattgaattcttggacccctccaagtcatctatgagggttggaatcaaattcttccaaacaactgttaatgttggtattttgatttcctctcatggatcacaaatgttctttatggcatctggaatggtgaatcatttccaggaggttttcaattgactttggccagatccatcagaggaatcactatctatggaagttatagccttatgaaatgtatttcttaaataataagacttgaaagttgaaatgactcattgatctatgggctgcagaatggatattgtgttagcaggaatcaaaacaacatgtacctctctgtccacctccatcaaaactcttgggagaccaggtgaattgtcaatgagaagtaatattttgaaaagaatctgttgtttttctgaacagtacatctcaagggtgagtttaaaatattcagtaaactgtgctgtaaaacagatatgctgtcatccaggctcgattgttctgtttatagagcaccatcagagtacatttagtataattcctaaggtacctatgatttttgaaatggcgaatgagcattggcttcaacttgaagtcaccagctgcattagcctctaaaaagagagtcaacttgtcctctgaggctttaaattcagttacttattttctcctttttagctataaaagtcctacatggcatcttattccactggaagcgtgttttatctacatggtaaatgtgtttagtgtagtcaccatcaattcttttttaagctagatcatccagataaacttctcgcagtgttccattagcacttgctgcttcaccttgcacttttattttatggagaaagcgtctttgcttcaaccatatgaatcaacctttgctagattcaaactttttttctgcagcttcctcacctctctcaactttcatagagatgaagggagttagggcctaatctaggctttggcttatgagaatgttgtggctggtttgatcttctatgtagagcactaatagttcctccatatcagcatgaaggctgtttcagtttgttattattcgtgtgtgcattggagtaacacttttaattttcttcaagaactctccctttgcattcacagcttggctaactggcacaagaggcctagccttttggcctttctcagctttcaatgtgccttaatcgctaagcttaataacttttagctttttctttaaaatgaaagaggtactactcttttttgtgcttgaatacttagaggccgttgccagattatcaatttgcctaataatatcactgtgtttcaggaaacaggaaggtctaaggagacagacagagatggggggaacggctggttgatagaccagtcagaacacagaaattattaaaataattacaataataacatcaaagattactaatcacagatcaccataacaaatacagtaataaggaaaagtttgaaatattgggagaattaaccagaatgcgacacataggcatgccatgagcacatactgtgtgaataatggtgctgatatactttcttgatgcagggttgccacaaactttcaaattgtaaaaaaaaacagtatctgtgaagaacaataaagtgaagtacaataaaatgaagcatgcctgtataaagtgattcatctagatattctttgattcactcatttgttttcgtcacgtatatcacgtgatgtataattattttctgaatatttactcattttttaacagtcttctcagctgttatgtaagctctctgaaacatagaaaattttgctaacctgttaaagagttacatttctagcacttaacactatccttgatatgtggtaatggtcagtaaatatttattgaatgagtcgaggaattgtgatcatctgtattgtttaggttacagaagagttaatttaaaaaaatagtatattttggctttccagtggttttagttgagtgtgattgtttaacaaaaatgtattgagcaactagctggctgccatgggggatttttaaagtgatggacagggtccttgtttctcaaagaatacgcattctagtatataatttggcatgtgtatggaagagtcaatgaaagattacgaaagacaaatggtggaggctcaaagctatgcttttattctcatgtgctggtggagtactactatggatctgataacagtaaatttgctgtctcatcagttacaatctgttcttcactattaattgagttataattctgggacactcactcagtccaaatctgacctgtgatattatcctcaaaataaatgcttgagaacaagtattatcctaaatttactgacaaagaaaggggagtctatgaggtaaaatacttttcttaatgatacatagttgtcaagatgcagtcaggggttcagccccatgttttctaaatccaagtcttaaatatttttctgtatacaacgttgcctttcttctttctaccccctttataagcaaaatgttaacaaaatgttttttctttctgcataataatttgacctttagttaactccctgcctctgatctgataaccttataaaagtggtacaccaaccaagttactaagcaaggttgctatgtcatgacccctgattggtaatttgcatatatactgggaagaattataaatgaattacacataccagatggtgctgccgtaatgttgtgattcctgagtatggtgacttacaaatggtatgcaccaggagggtggtcctgaaagctatgtccatgggattaatttagtacatatggactcctcgtggagcatgaggcttgtaaccaggatgactgtcatacccactggtatgtatcttgtcttcttgcacctgaggaacagtgtggattgctcctgataattctgcagaataatacctgatgctaccctgctggcaagctgtgattcttttttttttttttttttttttttgagacatggtctcatcctgtcacccaggatggagtgcggtattgtgatcacaatgactcactgcagtctcgagctcctggacccaagccatcctcccacttcagcctcctaagttgttgggaccaccggcatgcaccaccatgaccagcttattttttatttttatttttttgtagagacagtttctccttatcttgcacaggctggtctcgaattcctaggctgaagtgattttcccgccaaggcctcccaaagtgttgagattacaggtgtgagccactgtgcccagccaagcggtgattcttgtcctgtaaccttctaagtgtttgatgccaggtgacacttgtggtggtcttgtgagcttgaatgtttagctgaacctgaaaactcttgggtagagtcctagcaagtaaaatttttgatttttttatccacagataaacaaatatcttcaatcatttgtcttgatcttaatggccattgtcctgtaatgaatgaatttgggctttgaattttgtgagcttgaatgttaattgaacctgaaaactctttagtagagtcatagaaagtaaaatttttcattttatgcccacatatacacgaatatcttcaattactggtcttgatcttaatggccattaccctgtaatgaatgaatttgggctttgaattcaaagatattccacagattagttcacttattttaatgaagtttatgccttaaaatgagacagtttctccacttatccctatgttccacatgagaatattgaatgtcatttcttttataaaaaagagttccaaattcattgtgtaaagcatcctcatgaagtctgaagatttaatttgcttatatatcttattgtaataaagaagcaaattataattcggggctggggactggagtttaaaagaaatactttaaaaaatatttttaagagttaattagctttccagagtactgtgcatttaatatgtacatagaaagtgaggcttacattcacagcaatcagaacaaacaaagccacaagtgtgatattcagcaatgcacacagccctagagaagagcatgcataatattcaggccaacagaaaaatcactttcagataaactaacagaagaaggaatacctaaggtaaactaactggggcaatttctaatgaatgcaattgcactatgcaaggatggggcagtttcaataggttaaacaaaaataaaagtttggcttgattgttataatttgtcaaagtaaaccactgtaacatttaactacctcaatattttattgcaaatgacactaattagactgtgggttttttgtttgtttgtttgttttttggttcttgctttctcagagggcagagttcttaggcttagttctccacttcaatttagttcctttctgatactaatcaccagtgtaattaagatcattcctaagggcatctgagaaaatgcaaaaatggctagattttgcgctttgcagctttacctaagaccttaacaaaaatatcataatgaagctgaatattatgtatttttagcaataaataaatgtattataaatgaaattttgaaatcccacttcaaaattcaataattttgaatgaattattgaaattcaataaaattgtattgtattcaattatttcttatatttttaaataactgtctacttcaagtggtttttgtcattgttgttgcacaggtctattaattttaacacctttatagatttggtaaacatcattatattcaggatatgatacaagataaaagtcctttgctggataaataagttcattgcagatattaatatttttctcaatctgttaccccatcctttggttctattaacaatgtatcacagaaaaaaactcttcaattttataaagccaagtttattactatggattatgcatttggtgtcataactccagattggagtggccatgataggaatatgaatgaaacgaccatggttgcaatgaaagaaattatgtttggactcatcagcaccaatgtttgtttaccaggctttctgtgggtcatgcttttggtgtcataactccagatgacaaagatcttctatctgttcctctaaaggttttatggttatggattctatgtttagatctgtgatccattttaagttaaaacttttgtagaaagtatgaaatttacactaggttttttttgttgttggtggtggtgttactttttgttctgcatgtggatgttgaatggtatgaacaccatttactgaaaagggaatcttttttcttttgaattgcttttctgtttttgtcagaaatttaatgaccatattgggggagtatgtttatttctgtgttccttattttctattcagttggtcaatgtgtatatcctcccaccaattctgtatagtcttgattagttttacaggaagacttgaaattggatagtgtaatttctccaactgtgttcctttgccatttttttggtaattctagatcttttgccttcccaaataaattttaaaatcagcttgtctatactgacaaactatattcccatagagatttttttttcttgtcttattgaagtggctaggattactcaggacagtgttcagtctttcttcattaaatgacattgtaggtgtagtgtttttgtgaatgtcatttaataggttaggaaaaattatttttatttctagtttgctgcaataattttttaaatcgttaatgaacattaacttcttcatattatttttctgcatcagttggtaaaatcataagggatttcttttcggactgttaatataatggcttttataggttgattttcaaatattggtctggccttgcattacctggataaatccccctgaattgtggtttttatcctttttatatattgttggattcgatttgcaaatatggttttgaggattttttgcacttgtgtgaatgagggatattagaatatagtttacttttttgttcttgttttctttttctttggtactgtttttctctggacttgatatcatggtaatgacatccttataaatgatttggagaagtattcccttctcttttttttctgaaataaattttataaaattggtgttattttttctttaaatatttagtagaatctgccagttaaactatatggaaattgagatttctttttcaaaatttccttttttttcaaaatcaatttcttttaaatcggatgataaatgttatccatttcatcatcagtcatttttgcaatttgcagatttagaggaattggtccttttcaactaaaatgttggatttatgttcatagagttgttcatatattgctttattatccatttaatgtctgtagggtctataataatatgttctctttgattcttttcattggtaatctgtgtctcctaaaggtttaccaattttgttgattttttaaaaatcagtttttgttgttactgatattctcaattgcttttgatttttcaattccattgattttggcttttcatattcttattttcttgcttcaacttgctttgtgtttattttgctcctttttttctagctagttaagatggaaattttgaggtctctcttcttttcttatataagcatttaggccgggtgcagtggctcatgcctgtaatcccagcactttgggaggccaaggcaggcagatcatgaggtcaggagatcaagaccatcctggctaacgtggtgaaaccctgtctcttctaaaaatacaaaaaaaaaaaaaaaaaaaaaattagccaggcgtggtggcgggtgcctgtagtcccagctacttgagaggctgaggcaggagaatggcatgaacctgggaggcagagcttgcagatctcgccactgcactccacgctgggcgacagagcgagactccatctcaaaagaaaaaaaagcaaattttctcctatatttagcttcattttataaactctgtcactatattttcattgagtttaaaatattttataatttctcttgaaattttctttttgacccatagattatttagaagtgtgttgttagttttcaagtgtttaatgggaattttatgttttttttattaatgttctctgatttaattcagttacagagaacacgctgtgtatgattttaatgacttcaagtgcattgttgttagttttatgacccaggatatggtctatcctggggaatattccagatgcatgtgcatagaatgtatattctgctgttgttgggcagagtaacctataaatgtcaattagattcagttgacttatggaaattttcagtgcttctccgttcttgctggctctttatctatgtgttctatctgttaccaagagagaagtattgaagtcctacactatatttgtagctttgtctatttctattttcacaattgttggttttagatttacggatttagttctgatttttgtgcatacacaactaagatggttatgtcttcttggccacttgaccatagtgtaatggtatctttttaatgtcctttcctgtgcaatcgagatttttcctgttctttatatgctgagtaattttttatattatcttgaacattttatttttactgatctttgggatgttatttttctggccagaaacctgtggctgctggtgccttttccgcattttcctagggcccacagggcccattccatcctcttggcctagcaggctgcactcagctcatgctattggtatggatcacatgcctccaagggagactgtaagtcatggaggtgtggagtggtgaggggtgtgtgagcaagtgtggggtccggccactgtgctgtagacacgctggctgctgcagtagagtgggcagctccaggtgccggcatgggcgccggctctccaagaggctgtgattggaccaggcgttactgcaaacagcttccctgcctggcactggaaaatgtgggggtgcccggaagcttggagatgccaggaactgcagggccccaaagagggagtcacaggcctggtctggcatgtggagctcccaagtttgggctcctagaagggccacaaactccttctcttcttctctcctctccttctctttgcaatgtgttgagaaaggggcatctttctgccctgtttgtgttacagcccttttagctttgccattcagtaggtccgagttcttctcttgcaaccaggaagaatgaggtacatagacaagtgaagggtgagcaagacaagaggagctttactgagcaacagaacacctcagtctcccacagggagaaagctccttagctcctagcagagaaggtagctcttctctgcagacagattgtctcatgtgcttactcaaaggagagagggtagctcctccctgtagctagttgacccatcatctgctcagctgtggctgagcctggggcttttatgggcctcacatgggaggaaatgtgcaccaattggtccatgggtggccatgggtgggcccagaaaagtcactgcaattcccacttcagtgagtgggactggcagcctggcctgaaggtagggcctcaccagggacctgcccccttttgtccaggagcctgtctgcctcctgctgccgtccatgggcccaggctgctctcaccaaggggcacctataggtcagtgttgaactgccctaagcccctacttgtttcccccacccactctttggtgcccaaagtatggagcaggccagggtgcagggggatgatgtgtcagcactgctggagcgtgcacacacctggctgggctgtgatagcacccatgcttggccccaaccccactacaagatcggagcaggcactgggaatggggaaaggccaggaagtgagagcagtcaccaccaagcctgtggggtcaggagggccttcccagacccctgagggtgcagaatccagagatgcctgggacctgcacatgggaaggcagtggagcgcatgcatatgcacttggtagagcatacaggcagcaccagttgtgcctcctcacagcctgatttggggacttcaggtcctcacagggcccctctttgcccactcctctgtgcctgaccatgctgctcccctactggcagatggcttggcctggccccatcatggtgtctccatggaatgtggcaccatcccaggcccagctccacctcctccctgtgtcctccccacagcagcatcaggcaagagtggcgacacagggccgaatcccaagccatggattttatagtctgggcctctgggtaggtcccacctggctatgtgaaggtgggggtggtgtggttggctgtgtagtcggctgccttgggtatgtggggcaaagagacccactgctgccactgctgcttcttcagttccccctgctgccatcactcacatctccccactgcagccagcaccatggcagcagctgctccggattgcctgtagctgacatcattattacatgagactctgtcttgtttaaatgctgtggaaactgttgatatttatatttttagtggtcagttaagctggctgagtttaggccacaactttcaacttgccttctgtaggttgtagtcctgatgtcagataagttttcaagtcttcacagtgttacttggatctgtttcttgtgtgtaccttccagggtccaacttgagtcctgggtggtagactatatatggattcacttctcaaggtttttagtgtgctgaataggatcaagtctacatttagggagctgtagatgagcccaggtgtttataaaaatgtttgtggttactttctcaacattttctctgccattattctctggaattttccagttgtctgagccttctttttcccccaagcagagtgctgagactttagttaccactgtttaccatgaccttctgtaactgtgccagcacccagggccaagttttgggagggcagagaaaaaacatagttggtcctaccttctggaaccccagtgtgttgagttcagcccaggatatactggagggaaaaaattccaaactcattattggattaatggtattttgaattctgatcttcttctctactcttccatatactgtgtacttttcaaagccttcaaatagctggtccttgcagtctgtccgggttttgtggctgtcttcagtgagagtcatgttggaaggtgatcactcccatcttacctggggtcgaaacttttttattccattttttaaagtaattataatgctattgttccatcagtgtgatttaaattaatacttagtgccagggatggtggctatgcttataattccaacaactcaggtggctgaggcagaaggattgctggaggtcagaacttcaacattgcaagacccagcctctaaaaaaataaaataattaggcaggtgtggtggcatgtgcctataattgcagctactcaggaggctgtggccagacgattgattctaggatttcaaggctgcactgagctatgatcatgccacgacactccagtctgggtgacagggtgagacctgaatccttagataaataaataaatacacacacacacacacacacaaacacacacagcaaccactatgatgattgaaacatgtcagaatgcaaaagcaagaacacctctatttaataactgtaatataattttggagaattgatgggaggcaattgcttgcatttcttatagactattccaaattattaatgttaattacttaaaatgattttatttttacactgtagagttaaaataaccaactttcttgctgaatgaaactgtatgatagtaccttaatttacgtttcatttgtgtttcaatactctagcctaaaatcagtactttttctattttctatagaaaataataaaactttctatatctgaaactgtatacaggtgatgagctttgagttggatgcacagtaagatgttttgcttttaaaccagatatgcaaagagaggcaacgatctatgtggctttagcaagggaaaataacctgttgaactatttctttcactatatgttcaagagagtacttagggagaaagagattaattcatttttaatgctaggaaaatacagtcattaaaaagcagataatataaaacgccagaaatgcttttaacattactagaagtgcacttctttctgaaatagcttgttacttttggagatctagataggctgaggtattaaatattaaaatagagggtgctttttaaaatgcagtgtttcttatcagaaaaaacatttgaacaagcatttctgttgtataattcatgatattgctaataagatagtctaggagaattatttgttacgcttttgagaatgactgggattttttttttttatgagagagtattccctgttcatgtcctcttaaatatatatgagtactgttaaactatatgggatagtcacctgactgattttttcatattagtatggtctccctatattttatgggaaaatcaattcaaataagaatattaatgtgaattttgctaccttcaacagcatgagaagtcagcagcacattttaaactattgatgtaacaggaaaataagtgttggaaggatgtccctctgaacatttttattcagattttctgcaatagaaattagtatgacttgctattcctatttgtgtgtgtgtgcgtgtctgtgtgtgcgtgcgtgtgtgtgtgtgcatgcgcgcaactaaataatataaacgtagccactggtcttcaaaagaatgctcccctcttgacttctctccagtcttagtcatccattggcatgtcagtagctttttttatggtaggaacaagcaatgaaaagttgcccaacttgtttcaaataacaatccaactgcggggttctgcatgccacctcagttcatcagtaaacactatttacaaaaaatgtatccataagtttttgctacatcgtacttgaattattttggtggatagagttcttaatacataattgttgattactgtaagtgcttttccaaactttcacatttctatcactaaatagctaacatgtaaaaagtagaagtaatttttcaaggcatgttggttactgcctttgcttcagcattttctgcccttagaactatttatccaatattaaatgacttttttttgtaagatggcagaccttttattttgttcacactattttataaataaaatattggggtgtataaacatgattaaaatatgctatgtacaaatattaatatgtgactatgaaacatgattattttcttgaagcctattccaataatttagggaaaattttagaatttaaacattttcctgttaacattatgttataatccacttaaaaacattatgttataatccactttctaaatgagctgatatcagtgttcattattttataatagctataagaaccgcatgtagatattctgaggaaagttttgatgaaaaacacctccattgttctctgactagttataaatactgttggggaatgggtgatgcattcccagtggtttcatgtttaacattatttatatttaaatttttttatttatgaaaaacaaaagtgatattttagagtatcccagattttaaaatatttatttaatttaggaagaaaaaacaggtttttacaaattcatagaattaaagacaatttttgtaaattcaaattgtgtagttacctgaattcttaaatcatataaactgttttttccatgaatgagagaaaggaagatccctcttgactttatggatgttagagctgccttcacatgctagaggcattgctctacaatttttcttttgcaacattcctctggtttgggctgatagtaacatttttatgatgtttaaacaagttttcatgcttccaaggaaaactgaagagaatgactggattagtaagatcttgcagtagattagagaactgccaaaactcagttaatttaactatcattagcaaacagttcacaaataaatagtttattttcttaaaaaaaggaggatgtaatcagagccatatttgaaaatgtgcatataacttacagaattgagagttggtactcttttaaggataattctcatatattgagctaagagtgcacaaatcagtaaaatctggctacataaaattattttttctccaaagaagctagtatttgagagttcctttaattactgcttccttaactatttgtttcttatgtgcagagtgagtacagacttaacagcaggtgttcattttaatataagaacaaatgtatgaaggcttttaatcttaacatagtaccgtatatgagctgcttatttagagttattaatatataagatagttaatggtacttggattatctctttgcattttttttgtcttattacatctgtttaaatggaggcttttagagtagctagagcctggtcattgggcattttggggacatttactatgagatggctattgggaaggtttaaatctggtcaagaaatgatttctctctttagaaaattcagcctagaaatcatagaacaaactagaaatgttagatgcccaggctcggtgttttaatctatgagttataacatagttctagtctccagtgaaaaaagtcgtcaataagacatggcccaggtctcacagccatttttttcttcagttcttctctttaggccaaataatgcctaaatgtgcttgagaagtacaggttgaataaatgactacctgaaatccccatttacaaattggtctgatacagagtagatttctcagaatgtcttcaccagacagtatagtttttggtaaactgtatctgtgtaaattgtcaccctgacatcaacaagtggcaccaacacaggcataatttaccagaaaaaaattcctgaaattatcatggttctataagcaaattctggaggtgaggtgcagttgtttcaaatacatcctcctccttcagagtatttatctgaatcttctggatccatagcacatgaaggagaatttcagagtgagatcacctggttttggcactgggagcaatgtgatcattgttatggcagtgattatgtgagggacatgttactagtaaaacttaaggaaatcatgttacaggtcagtcagtatatgatgtgtctctatgaagtgtacctgaactttggaagataacctcccaaacttaccaaaactacacacccaacctattttactggtactttaaaggacaaataatactgtcagaagtaattttggaaatagctctgaagactactatattataggcatgttggaccttttgagagagggggagatatttacaaagtcctgtagctggctacatgggtgtactcagaaagggaaattttccatgcaggctgtagcctaagctactggagtgaacaaaccataaagaattgtttgctggaggcttgttgaaccagacatctagattttgaaggataggccttgcaaccagaataaagctacatctttgttaaaaggagcacacctgcttggaagatgggtggaatagaattatgtcttgggaaactattaccaattcaaaaaatgtgaatttagcatttatctctttttaggatagttcctaaaaaggaactaagaaccagatccaaaaactatagatttaaatttgaagggcaagctcgatttgacaattgtacaagtataaaatttctgagcttggaagcaaacctacaagcaaaaaacaggctgagcaacatcaagcacgataaacatttcaaaatatccatagggaaagcataaaagcaggattgtatgtagctacagaggacacaaagatgatctgagaagttaaagttaggagaagtatctaacaattagcgctgttcagcatgggatgaagggctcgacgtggtggctcatgcttgtagtctcagcactttgggaggccaaggcgggcagatcaccttaggtcaggagttcgagaccagcccagccaacgtggtgagacccccccccatctctactaaaaataaaaaaattagctaggtgtggtggtatgctatcaaaagttagaagatttaattcagcaaacatttatggatcatctactttgtactgtgatctacattacctttaggatcacttgccgtcagcaatgttgtgatttggggatcattataagagagagttcatatagaaggctgaaaattgtgagtaataatcatacggtgtagtcttctggattaaaacaatgatttatttctcatggagagtgagacagaaacagccctggccatatctctatggtttaattcattctggaaacaaataaatgagacatgcatatagaggggaatctgtgaaatcattgctgggaaatgaaatttacaacaaaggcaagataagagttgcattttagaaacattgataagtgaatgtcaaatcatacatgagacagttttgttactttggcaacatagacattattctttatttctgataagcagtgttactttaattcccacctgtggcttttgtctctgtgtctccaagggacattaatgcttaaatgaaaactaatcaacattttaaactgtaatatacacattgatttaggggaaatatgtttctttaatattgttctcaatgcattgtagaaaattatccaggtgattcctttacttacatttctttaaagggtaaccttttgaattaaataaaaaaatttagttatattttctcttttcaaacggttgaaatggatgaaatataagcttgatactatgaacagaagttttgcaacagaattatttattttgctattttataagatgagtttaaaaaccaggtagggggacaagaacgtgatttttggaaaaaataacagctttatcatgttataatttacacacaataaagctcaccatcttgaatatacagtactgtggttttaatatattaataaagttgtgctttgatcaccactctcgatttcttgaacattttagtatcactcccaaagaaaccctgtatccactagtggtcactccgtattgccctggttccctatcccttggcaactactaatctaccttctgtctctatagatttgtatatttctttacttagtgtagtatgttcaagggtcatctacactgtagcacatggaagaatgccattcctttttattgcctaataattttctattgtgtgaacatgccactttttgtttatctgttcatcatttgatagacatttgagttgtttctgctctttgcatattatgactaatgctgttatgaacatttgcttatatgtttttatgtgagggacatatgtcttcatttttagtgagtgaatacctaggagtggatcgtacggtagttccatatttgactgtttgagaaacatccagattgtttcctgaagcatctgtggcatttttcagtgctactagcaatgcatgagggttccagttctccacatcctcaacaatacttgctatttgtccctttgattatagtcatcgcagtggtcgtaaagtggtatctcattgtggttttggtttgtattttcctgatggctgacaattttgagcattagctctttgtaggagctgattgtttgtatatctcttttgaaatgtctattcagatttcttattcatttttaaatgaggtgattcatctttttatttgtgtattgtaaggagtatttatatatttggaatatgggccctttagtcaatatataatttgcaaatatgttctctcattctgtgtattgtcttttcactttcttgatgctgtcctttgatgcacaaaatttttcaaattttgttgttgttgatttatcttttttcatttgtcacttgtttctttggtgttatagctaagaatccaagattatggatctttactcttgttttcttatatgagtgtttatagttttagctcttacatttaggtctcagatcctgtagccttatttttttggtgataatttttgtatattttgtgaagtagggatccagcttcattttttttttgtacgtagatactcagttgtggcagaatcatttgttgaatacactgtaatttcctccattgaatggccatggcacccttagccatacggacaaggatttatttctggactctcaattctattattgtctgtttatgctcatgctagtagtacagtgccttggttactaccattttgtattaagacttgaaattgaggagtgagtcctgcaaatttgttcttttacaagatcatttttactatttgcgttcccttgcatttccaaaccaatgttataatgagcttgtcaatttttttaaagggtggctgagattttgacagaaattgtattcaatctttggatcaattttggagtgttgccaccttaacactatttagtcttgtgatccatgatcatgagatgtctttacacttatttaggtctttaatttagttcaataatattttgtaaatttcagcgtacgcctcttacacttctttcgttacatttattcctaggtactttattcctaatttcattttcaggttcctctttgttagtgtgtagaaacacaagtgcttttcttctgttaatttcagaattaacagccttgctaaactcatttattaattatataattaacaaattttaaggattttctatatacaagattatacatctctgaatattgtatctttatttcttcctttccaaactggatgctttttaatttcttttccttgcttaattgcccttctgagggtctaattaaaaacaagaattaattcaccaaagataaaatgccaactaattcgttgtttctcctatattttactacagttaatttgagaatctgttcatagaggatcctaaaatatagcacaatgcagtttatattaatcaaatcaaaagtaacctatcatgaagaaataaagttaaatttagaggtatattagttgcattctacttgattcataggcctaagttaatgggtaagaaatctcttgctcaggaatagaaggcaaaaccacagaaaataaaagaaaagaaacaaaagcaccaggtggcatggaatgtttaaaatatactgggattcatatattttgtattttcctttttgttacaggaaattatagaccccaaattgagatgtatgaaacaaagagttgtgtagcaagtacgtttgtaataatcaaatagtatttattttcattttacgcaatttaccatatggaggttttctaaatctatttaagatgtctttgttacgtgcatttttgaaacgtgctttgtggtctgtaagtctgcttgcattttagagtacaagagtgcatagctggttttccttaggagaccgtaaatgtgaccaagagcctaaggacttggctcagtgttacccatgacagacaggcactcatcctgatagccaggtggagattttctgactttgatcacttcgtacatgcatgttacaatactggcaattgttttattaaatatttctttaatgcataatcttcattttcattttagcaagggcatggagacatacgtagtttgatttctcataattaaatcctggagtcccacctttcactgatgtatcattttattagaaattggacaaaaaactttaggttctcaattaaaccaatatattgaaatcactgtgcttttttagttaactgatatgattactattgtgaaacttatcagtcaataatcatgtagcagagatgcttttaactagataagtacttactggtttgatatactttgtgttgtaaaaagtaataaatcattagttattatatagaaattagaatgttaattttctagtttttaccaatatctgattatttctatccattcagtcatctattcaattatatctaagatacttttaataataaacttccaatcgatttgcaggctttatgctatcctgcaataattctaacttaaattattatattttaaaattgacttgctatttccaaatgtgatagcatatatgtttgtagtgtaatttagtaataaaaagagccctaaaataatgtttagtcatatgtggttttatgttttaattaatcattcggcaataagaatgcggctcatggtagaaacagtgtttctaaatggtggctgcattgtgctattagcccacagagtgttgtttcaattgtcagtgtgactaaaattatattagatcacatttctccctaacacagctaatgctggaataacttatttggaaattagctacatattgtgtgccctgtatttgaatgtcacaagacttatttgtgtagaaaacagaacactcaccaaggtgtattctttacagtgggttttgaatcatttaactattttccttgtttagactcttagagcaaattggttttaacttaatcctgggaaaagatgcacttttgtacaaaaaaagtattaaaattttgtaaatatttcagaaaatgtggtgcttatggatccagggtgtgttatctccttcagcatctgccatagcaacagtttttttgggttattctctcactacttgatgtaaaatgtagttcattctttacattatcatccttgttttaataacagatatcattttctgtaggatatttttatcactttaggaagtgaaactgtttttagttctccaagaatctataattaattgttgtgaaacagataccctagttaaatcaggtatgtcagtataccttatgcaaattgtctcactggtatttgtttgtaatctcacagaaatcaatttgacaaaaggctgtatattctgaaagatttttgtctctaatcccgagtatgctgtgaacctcttttgggaatattataattttctgcttagaataatatatccttaagtttttccatgttaagataatacttccttgcatattatcataaccattttctcttttttgcaggttttatattactagttatacttttttgaattaccattttatttaaaatacatttgaatctttgcctttgaaaacaatgtcaaacttgaaatattgcttaatttcttgtagtctattaaattgaatgtatgtatataataaattaaatgataatgaaatacagataattatagcttagtaactcaaaaattctttgaatttgtcaattctgtgttagcgatgactattgctatgacagaaattttagggaaatgtactttcattttaaagcactcatcaatatttaagaaacattaattgtgcattactttcaaagatctaatgaatttgtagagttattcttcaataaataaatacattaaaatatacatacagcatatgtaataaacacaaattttcttatagtttccaagtcaggaattattaaacagcagtatggtaaaggcaaagaggtatttacagcttgatgtgataacacaaagaaggggcagttagccccccctggagatgttctatctggagaagaacaacagtaatggaaggctttttaaaggaattaattcttggactaagttttaaaatacgactaaaattaaccaaataatgaatttatgagaaggaagagaaggacattctagcacaaaggggagtcccacaggtatgaaagcacaggtggaaaaaaagcttatgtgggacaggcggtggcatcataagattttgttctagccaaaagcataatccagccaaacttgaggttcagtagacccattctgatagctcatgttagatagagttgggaggatcccattagatctgatgaccagtcaggagtcgtagtaagggacagatttcgggctcttgagaagatggaaaatattacatgaccattcatctcagatgctggacatagtcttgtttatgctatttacttcattttcattattaatagctctctgtacactcctttagtcccccaaagtttcttgatttcgtagataatttatatagttaccttggacatgttccaaatttgtttatgaataagtttaattgagtgttgagaaagcaaaatgaccctcagattcctggtacaatccaccaggtggacagtgatgccactagtgaaaacaggtgaggcggtttgatggggttcaggcaggaggtggggtacagtaatggttagtttattcttgtagctgttgtacctgtcaggtttgagatttttgcagttcttcatatatatttgtccaggtaatgatggggtatatgattctgaagctcagggaagagatctggaatggaattcagacttaagacagattattatatcagcaagatcattatctgttatctttcttggataaacttggaattaagaagagaaaatgactaactatggaaacctgggaaatatgtacactttagggtaggtggaggaagaataggcataaaaggcggagaaaataataagccaagcaagaaaattgttgcatgaatgtgaccaagaaagagaatttcaaaaataaagatatccctcagtgtagtagagacaagtggtaagaaaataatctaaagtaatctgtgggatgtgtcaataatgtggtgttggtggctcaacaggaatcatttcagttgggtagaactgaactcaggagaggatgggaggtgagcaaatgtcacagtgaaggtagattatattctgaggaattatacatgacaaggaagagacatatgtagctccaaatgttcatggcctgcagtggtcaaggaagattttatttttaagaaacataaatatttttatagatgcacaattcccaaactgtgtttttggaatactgttaacaggtgatacatgaagaatttattttctaaccaatgaagtcacaaaaactctggatttaataaagtaaaagagatttctgaacatccattagtttctcagcagccattgatgtgctaataaacattgtttatatccaaaataggaaaaacaatatgcagtgatttctaaatattttggcaactgactgctcttttccaaaacaaatctattaactccatagtgtaagagaccatcttggccgggcacggtggctcacacctgtaatcccagcactttgggaggccaaggcaggtggatcacgaggtcaggagatcgagaccatcctggccaacatggtgaaaacccatctctactaaaaatacaaaaattagctgggtgtggtggcatgcgcctgtaatcccagctatttgggagcctgaggcaggagaatagcttgaaccagggagttggaggttgcagtaagctgagatcgtgccaccatactccagcctggcgacagagcgagactccatctcaaaaaaaaaaaaaacaaaaaaaccccaaaaaacacaaaaaaacaaaaaaacaaagagaccatctcaaagtcaagcataaactggtgtgatgaaaataatatacacacacttacagcagggctgatacctcgcagtttgctcactcccttattcattgtttgtggccagaggccattctaactagtgttaaatatcttgactgtcattttcataacatcacagtccaaatatgagtattgaaggagatcattattgcaagattcttttaaatttttaaatttttttttaacttttattttaagttcagggatatatgtccaggtttgctacataggtaaacgtatgtcataggattgtgttgtacagactgttttcattacccaggtactaagcctagttatttttcctaatcttctcccttctcccatcctctaccctcagacaggccccaatgtgtattttctcctctgtgtgttcattaacatagcgcctgctagtaaacgtgtgttattaataatttcttaatattattgctgttattatctgaaggaatacctttaagaaacccttgggtaacatgagtgtagaactatatttggaggaggaacgagggggtaaggaagacacagaaagttgaaaaagaacagttttggattgagggttgatcatgtatcttccctgtccataccccttgttgcttttacttgaccacatcatttgtattggaacactgtgctgttcaggaaagaagtaggatgacatttaaaaacatgatatttttctttcttcattttgtagaagcagtaacgtgaaatccgcatgttctaggggaaataatagtagtcacttaagcttatcaaaaccaaattaaaattaaaattgttttgaatctgttttatttactgaaaattttagagacaaagtactatcatctatcttctctacctcatcatactgccaaggcatttacaagttaaacaataaaaataaacaaaatctataacatatatattatttatttacatatacacacttttttattatactttaagttctagggtacatgtgcacaacgtgcaggtttgttacatatgtatacatgtgccaagttggtgtgctgcacccactaactcgtcatttacattaggtatatcgcctaatgctatccctcccccctcctttcaccccacaacaggccccggtgtgtgatgttccccttcctgtgtccaagtgttctcattgttcaaatcccaactattagtgagaacatgtggtgtttggttttttgtccttgcgatagtttgctcataatgatggtttccagcttcatccatgtccctacaaaggatgtgaactcatccttctttatggctgcatagtattccatggtgtacatgtgccacattttcttaatctagtctatcattgatggacatttgggttggatccaagtctttgctattgtgaatagtgctgcaataaacatacgtgtgcatgtgtctttatagcagcatgatttataatcctttggctatatacccagtaatgggatggctaggtcaaatggtatttctagttttagatccttgaggagtcgccacactgtcttccacaatggttgaactagtttacactcccaccaacagtgtaagagtgttcctatttctccacatcctctccagcacctgttgtttcctgactttttaatgatcgccattctaactggtgtgagatggtatctcagtgtggttttgatttgcatttctctgatggccagtgatgatgagcattttttcatgtattttttggctgcataaatatcttcttttgagaagtatctgttcatatactttgcccactttttgatggggttgtttgtttttttcttgtacgtgtgtttgaattctttgtagattctggatattagacctttgtcagatgagtagattgcaaaaattttctcccattctataggttgcctgttcccgctgatggtagtttcttttgctgtgcagaagctctttagtttaattagatcccatttgtcaattttggcttttgttgccattgctcttggtgttttagtcatgaagtccttgcccatgcctatgtcctgaattgtattgcctaggttttcttctagggtttttatggttttaggtctaacatttaagtctttaatccatcttgaattaatttttgtataaggtgtaaggaaaggatccagtttcagctttctacatatggctagccagttttcccagtgacatttactaaatacggaatcctttccctatttcttgcttttgtcaggtttgtcaaagatcagatggttgtagatgtgtggtattatttctgagggctctgttctgttccactggtctatatctctgttttggtaccagtaccatgctgttttggttactgtagccttgtagtatagtttaaagacaggtagtgtgatgcctccagctttgttcttttggcttaggattgtcttggcaatgtgggctcttttttggtttcatatgaactttaaagtagttttttccaattctgtgaagaaagtcattggtagcttgatggggatggcattgaatctataaattaccttgggcagtatggccattttcacaatattgattcttcctatccatgagcatggaatgttcttccatttgtttgtgtcctcttttattttgttgagcagtggtttgtagttctccttgaagaggtccttcacgtcccttgtaagttggattcctaggtattttattctctttgaagcaattgtgaatgggagttcactcatgatttggctctctgtctgttattggtgtataagaatgcttgtgatttttgcacattgattttgtatcctgagactttgctggagttgcttatcagcttaaggagattttgggctgagatgatggggttttctaaatatacaatcatgtcatctgcaaacagggacaatttgacttcctcttttcctaattgaataccctttatttttttctcctgcctgatggccctggccagaacttccaacactatgttgaataggagtggtgagagagggcatccctgtcttgtgccagttttcaaagggaatgcttccagtttttgcccattcagtatgatattggctgtgggtgtgtcataaatagctcttattattttgagatatgtcccatcaatacctaatttattgagagtttttagcacgaagggctgttgaattttgtcaaaggccttttctgcctctattgagataatcatgtggtttttgtctttggttctgtttaccaaattaaaattaaattgttttgaatctgttatatttactgaaaattttagagacaaagtactataatctgtcttctcaaccttatcacactgccaaggcttttacaagttaataaaaataaaatctataacatatatatgatgtacttacatatacacactatttttaatccatgttttgaagttggtccactattattatttctttttttttttttttttcaacttgagtgatttttttttcttttttttttttgagttttttttttttttattattatactttaagttttagggtacatgtgcacgttgtgcaggttagttacatatgtatacatgtgccatgctggtgcgctgcacccactaactcgtcatctagcattaggtatatctcccagtgctatccctcccccctccccccaccccaccacagtccccagagtgtgatattccccttcctgtgtccatgtgatctgattgttcaattcccacccatgagtgagaatatgcggtgtttggttttttgttcttgcgatagtttactgagaatgatggtttccaatttcatccatgtccctacaaaggacatgaactcatcattttttatggctgcatagtattccatggtgtatatgtgccacattttcttaatccagtctatcattgttggacatttgggttggttccaagtctttgctattgtgaataatgccgcaataaacatatgtgtgcatgtgtctttatagcagcatgatttatagtcctttgagtatatacccagtaatgggatggctgggtcaaatggtatttctagttctagatccctgaggaatcgccacactgacttccacaatggttgaactagtttacagtcccaccaacagtgtaaaagtgttcctatttctccacatcctctccagcacctgttgtttcctgacattttaatgattgccattctaactggtgtgagatggtatctcattgtggttttgatttgcatttctctgatggccagtgatggtgagcattttttcatgtattttttggctgcataaatgtcttcttttgagaagtgtctgttcatgtccttcgcccactttttgatggggttgtttgtttttttcttgtaaatttgtttgagttcattgtagattctggatattagccctttgtcagatgagtaggttgcgaaaattttctcccatgttgtaggttgcctgttcactctgatggtagtttcttttgctgtgcagaagctctttagtttaattagatcccatttgtcaattttggcttttgttgccattgcttttggtgttttggacatgaagtccttgcccacgcctgtgtcctgaatggtaatgcctaggttttcttctagggtttttatggttttaggtctaatgtttaagtctttaatccatcttgaattgatttttgtataaggtgtaaggaagggatccagtttcagctttctacatatgtctagccagttttcccagcaccatttattaaatagggaatcctttccccattgcttatttttctgaggtttgtcaaagatcagatagttgtaggtatgcggcgttatttctgagggctctgttctgctccattgatctttatctctgttttggtaccagtaccatgctgttttggttactgtagccttgtagtatagtttgaagtcaggtagtgtgatgcctccagctttgttcttttggcttaggattgacttggcgatgcggtctcttttttggttccatatgaactttaaagtagttttttccaattctgtgaagaaagtcattggtagcttgatggggatggcattgaatctgtaaattaccttgggcagtatggccattttcaccatattgattcttcctacccatgagcatggaatgttcttccatttgtttgtatcctcttttatttccttgagcagtggtttgtagttctccttgaagaggtccttcacatcccttgtaagttggattcctaggtatttaattctctttgaagcaattgtgaatgggagttcactcatgatttggctctctgtttgtctgttgttggtgtataagaatgcttgtgatttttctacattgattttgtatcctgagactttgctgaagttgcttatcagcttaaggagattttgggctgagacgatggggttttctggataaacaatcatgtcgtctgcaaacagggacaatttgacttcctcttttccctattgaataccctttatttccttctcctgcctgattgccccggccagaacttccaacactatgttgaataggagtggtgagagagggcatccctgtcttgtgccagttttcaaagggaatgcttctagtttttgcccattcggtatgatattggctgtgggtttgtcatagatagctcttattattttgaaatacgtcccatcaagacctaatttactgagagtttttagcatgaagggttgttgaattttgtcaaaggctttttctgcatctattgagataatcatgtggtttttgtctttggctctgtttatatgctggattacatttattgattggcatatattgaaccagccttgcatcccagggatgaagcccacttgatcatggtggataagctttttgatgtgctgctggattcggtttgccagtattttattgaggatttttgcatcaatgttcatcaaggatattggtctaaaattctcttttttggttgtgtctctgcctggctttggtatcagaatgatgctggcctcataaaatgagttagggaggattccctctttttctattgattggaatagtttcagaaggaatggtaccagttcctccttgtacctctggtagaatttggctgtgaatccatctggtcctggactctttttggttggtaaactattgattattgccacaatttcagctcctgttattggtctattcagagattcaacttcttcctggtttagtcttgggagagtttatgtgtcgaggaatgtatccatttcttctagattttctagtttatttgcgtagaggtgtttgtagtattctctgatggtagtttgtatttctgtgggatcggtggtgatatcccctttatcattttttattgtgtctatttgattcttctctctttttttctttattagtcttgctagcggtctatcaattttgttgatcctttcaaaaaaccagctcctggattccttgattttttgatgggttttttgtgtctctatttccttcagttctgctctgatcttggttatttcttgccttctgctagcttttgaatttgtttgctcttgctcttctagttcttttaattgtgatgttagggtgtcaattttggatctttcctgctttctcttgtgggcatttagtgctataaatttccctctacacactgcattgaatgcgtcccagagattctggtatgttgtgtctttgttctcgttggtttcaaagaacatctttatttctgccttcatttcgttatgtacccagtagtcattcaggagcaggttgttcagtttccatgtagttgagcggctttgagtgagattcttaatcctgagctctagtttgattgcactgtggtctgagagatagtttgttataatttctgttcttttacatttgctgaggagtgctttacttccaactctgtggtcaattttggaataggtgtggtgtgatgctgaaaaaaatgtatattctgttgatttgtggtggagagttctgtagatgtctattaggtccgcttggtgcagcgctgagttcaattcctgggtatccttgttgactttctgtctcgttgatctgtctaatgttgacagtggggtgttaaagtctcccattattaatgtgtgggagtctaagtctctttgtaggtcactcaggacttgctttatgaatctgggtgctcctgtattgggtgcatatatatttaggatagttagctcctcttgttgaattgatccctttaccattatgtaatggccttctttgtctcttttgatctttgttggtttaaagtctgttttatcagagactaggattgcaacccctgcctttttttgttttccatttgcttggtagatcttcctccatccttttattttgagcctatgtgtgtctctgcacgtgagatgggtttcctgaatacagcacactgatgggtcttgactttttatccagcttgccagtctgtgtcttttaattggagaatttagtccatttacatttaaagttaatattgttatgtgggaatttgatcctgtcattatgatgttagctggtgattttactcgttagttgatgcagtttcttcctagtctcaatggtctttacattttggcatgattttgcagcggctggtaccggttgttcctttccatgtttagcacttccttcaggagctctttcagggcaggcctggtggtgacaaaatctctcagcatttgcttgtgtgtaaagtattttatttctccttcacttatgaagcttagtttggctggatatgaaattctgggttgaaaattcttttctttaagaatgttgaatattggcccccactctcttctggcttgtagggtttctgccgagagatccgctgttggtctgatgggcttccctttgagggtaacccgacctttctctctggctgcccttaacattttttccttcatttcaactttggtgaatctgacaattatgtgtcttggagttgctcttcttgaggagtatctttgtggcgttctctgtatttcctgaatctgaacgttggcctgccttgctagattggggaagttctcctggataatatcctgcagagtgttttccaacttggttccattctccgcatcactttcaggtacaccaatcagacgtagatttggtcttttcacatagtcgcatatttcttggaggctttgctcatttctttttattcttttttctctaaacttcccttctcacttcatttcattcatttcatcttccattgttgataccctttcctccagttgatcgcatcagctcctgaggcttctgcattcttcacgtagttctcgagccttggttttcagctccatcagctcctttaagcacttctctgtattggttattctagttatacattcttctaaatttttttcaaagttttcaacttctttgcctttggtttgaatgtcctcccatagctcagagtaatttgatcgtctgaagccttcttctctcagctcgtcaaaatcattctccatccagctttgttccgttgctggtgaggaactgcgttcctttggaggaggagaggtgctctgctttttagagtttccagtttttctgttctgttttttccccatctttgtggttttatctacttttggtctttgatgatggtgatgtacagatgggttttcggtgtggatgtcctttctgtttgttagtattccttctaacagacaggaccctcagctgcaggtctgttggaataccctgccgtgtgaggtgtcagtgtgcccctgctggggggtgtctcccagttaggctgctcgggggtcaggggtcagggacccacttgaggaggcagtctgcccgttctcagatctccagctgcgtgctgggagaaccactgctctcttcaaagctgtcagacagggacatttaagtctgcagaggttactgctgtctttttgtttgtctgtgccctgcccccagaggtggatcctacagagggaggcaggcctccttgagctgtggtgggctccacccagttggagcttcctggctgctttgtttacctaagcaagcctgggcaatggttggcgcccctcccccagccttgctgcctccttgcagtttgatctcagactgctgtgctagcaatcagcgagagtccgtgggcgtaggaccctccgagccaggtgtgggatatagtctcgtggtgcgccgttttttaagctggtctgaaaagcacaatattcgggtgggagtgacccgatttttcaggtgcgtccctcacccctttctttgactcggaaaaggaactccctgaccccttgcgcttcccaagtgaggcaatgcctcgccctgcttcggctcgcgcacccactggcctgcgcccactgtctggcactccctagggagatgaacccattacctcagatggaaatgcagaaatcacccgtcttctgcgtcgctcatgctgggagctgtagaccggagctgttcctattcggccatcttggctcctcccactattattatttcttaacaaaacttaactagtgttaatcaaaaattttaaagcctggggtttacattcaacactgctttatagagacagacaacatattgcagtggaggagcatatagactttggagccagattgtctggctctgccatttacaagctctgtgaccttgggcaacttacttaatctctctgtgcttcagcttcttcatctgtaaaaactgtggtaatttagaacctattctatacagttatcatgatgatttaataagttaatatttgtgaagtgctttaagatgtgcctgacacagaggacttattttataaatagtctgtgttaaacataatatatacaagattgagtctgctaggatgaaaaatacagatttataattttttttccttcctgatctaaacattgctaggcaattggaggattatgaacaccaacccaagttgcatttcttgtcaacctgctttcgatgcgttaatccgaggaaggttgcaatggcttgtgagatgatgacactgatgccctcgtgctgctgcagcctgactctctatggttgattctgtctgcatcactttaggagtaaaagattaaaacaacaaaaatctagatttttttcctcaggtttcatgaaagcataatgttttactttcacattggatcagatagtagcctagggcatctacattcacattgtgtcctgattgctcatgtgaaagctaaagtaacaccactttctttatcataaggtgatgagacttgtcaccccgctttatgaacagcaaattcttagctcagggagcagccaggggcaggtcataaaataaaggattacagagcaaagatattagtgaaagagaagcatcagcgcttcttactgtatttaactcaaagacgatgaggtctgcctggggagctaataccacttaactgtgtttgggcaaaaagccaaaaggaaattgtatttcaaagagggaaggtctggcattccatatgctgggtaatcccagtcagttaacagggatgtatggccatttatcacagaaaatgaaggctaaaaagaaacttttatgtgaaagaacacaatgttgatatagtttgaagctgaaggacaattgataacgtatcaggtctttaaattattcaagttaaaatagttgagaaacagaactggcatctttgtggaccaagtctcacataaacttagtttgtaccctgtattaactgaaccatagaaccagtaatggtgatcatgacaaataaataaatcaaatgcattccagaagcccccttagagttccagagagccagggctgtccttggggaaatcttgtagttcaaatcaacttctgcctaaagaaggtgtattggagggtaaaatgcagttaaacctattgtctcagatgtgttggggtagactgtgctcaaatatttctaactttgtagtactggttagaaagaaggatgtcatcttctatatgctttcttgagtcactgaagagcttagaccagttgccccaggtggccgtactttaaggatagcttcaagatatggaataccataagctggctgccatgtttcctcctaatttgccaatttgtttctcctgttctttctgctcctggtgagttcttagaagccactagacaacctgtgcagctaatgatcaaatattgtccagctctggcctttggatgtctttcccagcttctggtcctttcctgctagtcacttgggctgcttttgtccctgccattagagccctcactcagtacatgcttaaatacaacagtcatgatacccttttaattgagggtgaactgtctgatttcttacatatacctacaaacacctgaggatggcatttaaaacatcttattgtctgacctggtttggctgtgtccccacccaaatctcaacttgaattgtgtctcccagaaatcccatgtgttgtgggaggaattgaatcatggaggttggtctttcttgtgctactctcatgatagtgagtaagtctcatgagatctgatgggtttatcaggggtttctgcttttgcttcttcctcatttttccccttgctgctgccatgtaagaggtacttttcatttcccgccatgaatctgaggcctccccagccacgtggaactgtaagttcaactaaacctctttttgttcccagtttcggttatgttgttatcagcagcattaaaatgaactaatatattgtcccatttgtaaatatatgtgtgccatattctttatgatattactttatctgttttttaatttcattgccatccagagactttttctcaaaatcctagttatttaaatcttctcatagttctcccatgaattggattatttgttagcataatagaatgcagggtagaggatctaaagtgcctatatagaaagccttgtgttttaattttatttctatgaattcatttgtgtattcattcagcatttatttattgattctggaaatgtatttgagtaaggaaacaaaaattaacatagtatatccacaatccttaattgtcacacacacacacacacacacacacacagaaacacatacacacatgttttgagggcaaaggcagccacagtttacagtaaagtctacttgtgagcaaattcagctgactatccatgtggttcttatggaattattaaggatatggattattggttttaagattaaaaaagagtttgtttccacatctgcttagttgtcagagatccaaattcacactaaactcaagagtttctgttgtcataaaagggagtttgttaggacaaggcaaagtccttagaagacatttagacacttgaacattctgtcaaagtcatcagtcagctcctgctgccactggggtttccatttttcatattggcattcacttcatgagaaagaactgccatcctcatctctaagcgtgtcctggaacgggactgagttagggcacttgtcctctctgacttcatatgccagtcatagaataggcaatggcatggattatactgattaattcatgagctagcttctcctgcatgtgggaggagtgaacacctgaatgaaaatctggacaaagttaggaaatagaatagggaggcggatgctgagtggacgacatgctgatttctggcacttccttgcaaactgcaactaggatctagctctttcaaacctcagtagagaaatgaatatatctctcattatttatgattctttccttagatttgttgatgtttgactgtgacagccacgagttgcctttcttgtgttacaaagttagatgtgacttgactgagcttttagtatagtaaattgtaactgcttttaaatttcaaggtatgccttaggatgagtgtctgtggaggcttttgcttgtatcttcccagcttcatctgtgaatgacaatcttacacactcttcaaggctcacttggcccgtttctgccgtggaaagtcatcactcttcagtgcttacagcacttcctgcttgtcattccctctgtttctcagtgctgaatccttttattttttggcattctttggcatacttaaacccaccacgagcagataggacagatgctgtaagcaattccaggttggcatttggtgtgagctacagggagggaaggcatggaaacaggaaatcttaagtgctggcagaagagtaactgtgggactaacggatttatctgatgattcctgtaataacttggtaaggaataagaaagcaaaacacttagaattttgaaaagagagtgtagagacctggatgatgtcaaggttgtggctagtgaataaatttagagcttcagatcgttggaataaaagagcatttgaggaacagttggagccggcaagctatgccagggccagctagtaggagaacattttcatttgtgcttctatgaagcagtgaaaaaactcatttctatatgaaaggcatccaaactgcaaaaaaaataattgcatattacttaatatcccacgaacatatatctattttacatcctcaaagctcttcttcaacattaactcgtatgttttatttggaaccaaatcaatgcatgatagaaatattttttaaagtttttaaacagctctgtttaaatatcagttttccataacgaaaatcttgttcttgcaccatgagagggcttccatataatcattttttaaggagtgtagaaagtgttatgcttaaaaatagacaatgagcactaagaacattaagtttgtaacagcaattctaagctgtttcttccaaaactgttgcccaatctctcccacaggaaagccttgtacaacatgtcacactcaagacattaatccatgtggatgtgttagaaattacacctgaaaatggcaatgacctcagtctaggtctgtgatgcactgttgtgttaacaagaactttttgttactttatgcacattttctgtactatctgagagatgccagtatcttatccacacacgagaactttattctaaatatttgtaaattttccacctgcagtcagtcaattattataaataagatgaaaaacacttgtactgtttcctgtaaccaatacattgtttaattaaggaggattgctaagcctgaaaacataaagatagttggtagtgggttttgaagtcatagaggacattttctaaaatgcttaaatctcacacttctgggtaccaatttgattcagactcctctaaagagaaatagcactctgggggaataatcagccccaagaactatacctattagaaaatctctcaccttatataaggtagagaaccagaagtggtgagaaaacttccttctgtgaaggaatcagggcttgaggtcccatacgcttatttctagaacagaaattactttgcaaaattttctatgaaatcttccctaaatttcagactgtcaaagttgacataaaaatgagtaatagttttttgttttgttttctttgtttgtttgaaattttgcacaactttatccattcagaaatgtgggtgttgaaccacaaaactgatagagtgccttccaaatattaactgaaatatgtattagaaaaattaagaagtgacaaaaagaagagtttactgcatcttcacatttcatgtgagacactgagttcgtctccacataaatggaagcaaaataagctgaaacacaaacaaacctgtggtttcaattcggcttgtggaccaccagtttgaaatatctaaattactgccttgacttcatatctttacaaatgtttcatataaaccagaaattacttaaccatagtagtagtcttttcacataattcttttttacagttttcagataactaaagcaacattatatccatgtttaataatttgaaatgctcacttctagtagaatgtagaatagtatatattaaagagtgttaacttgaagatcagagattttatgctagaatatatattggtcttttaaaatgtttcttcctcaatctaaagtaatagacccaggcacatttaaaatcttcaggctttctgtatatctagttcattaagtagcaatatgttcagttgtgggaaattgttacttttcaaggtaacaatgtagatcccaaaagccctggttaacagttcttaaacataaacacaaaacaggacaaaaacaaaacaaacaaaaataaatcagttctccagaaaaagagagtgagagggagggggagaaagagagtgagagcgagagagcaagaaagagagagagagagaaatttcactaatgtaatgaatatgccccacatactttgtaaataacaatattttaaatataaattccatatagccaatggactcttacagaatgtgttcttcaatttttgccaaactcttacatctatacccaacctgtggttttaattgactaacaagtgtagtttgaatgttggttgatgtttttgtttacattaatgagaaagacaaatgtgaaattaccaagatgtgttggaacttcatttgttcatcagtgatgtgagtaactgctgaattggataatagttttggaacactggaagaatatttcttcaacattttttatgctattcacagtgtgacagctatagagatagtatgttataacgtttttctgtattattatcatgctttctgcttcttagtctagacaatcagcaaaacaataaacaaagccctgatttgtaatatttgccaatttccatggggtaaatgctcctaccacggttagcttcaagttagcaatgtgatgtcactgtatgtagaattaggaagggctgcgtgtagcacattattatataatatttctaccagatactatagatgtaactaacttcaaaagcataggtaataataaaatgtactaaaataattatgaaaaaagtttaaaattttaaaaaaagaagagtttaaacatttgccaactaatttattgtagataaggttgcactttggcaaaactgtgaagtagatagaaaatatttttgtaatccattcattgttttacctcccttccatacatcctcaccatgggcataccatcctgtatcatttaggactactagttatcaattcatgtacatcatctcatttaatgtgcacccattttataacaggaaagttgagtctcagggaagcttattgctaccaagttctaaattacaactatgacaaatactgcacatctttgttgtctcacacaagtttatttcttgctcacacaagttatttgttgctgtgggtctgggtgaatctttagggcagcagttagcacaattttctataaaggaccagacagtaaatattttaagcattgctagccaaagggcaacattgagcaataatctcgctgcagggatagcagttattttcatatttcacttttcaaaatgtaaacaccatttttagctggtgggccacagaaaacaggctgcaagagggatttttcctctaggtcagtgtttgctgactcctgctcttagatagcagtcctcaacatggacattggtgaatggtgataatgcctgttattgctggatattccatttgtgtgtatatcggaatctactactggaagctgtagcaatggaatcttatgtggtggggggactagatgagagaaagccatagtaagaattctagggcttgagtggtacagcattgacggaagctgtcatctctatcagaaagagaaaagtgaatgctaataacctcaactactttgtgttaagtataatgttttaaaatagaaccagttacagagaggttgtgacatttttggtggatgacattgacattttcatatttagacaatatgagatatagtatataatcacttgtaatttttgagaaataagataaaccctttagatttagcaccttcctttctaatacaacattcttccgagaaaaaaagtttgatattttgcctttttgattgttttttgattaaatgcttaaggaaaaattacaaaaagtgcattttacttacttttcaaactataaagaaagagtacaacattaaggtactggcgggttttgagtaggagagagaaaatgatcaattcaactgaaaaacataacacctttgattcgataatcctgttagattaaaattaaagatgtggaatgtgttaaaaacaaagacagatgttattttgatatatggtttaaaagttgattttcccttcaaaagttattagaattagcaaataagaatataggatgcctgattaaatatgagttccaaatattgaacaggacatacttacaccaacaacatcctaaacatatataatatatgacacataccttgggttctctcaaccccttctccccacttctgtatgatttacagagcatcctgcatattctgccaacacattataaaaataaaaacaacatagtttttttttttttttttctgctttccctcactggattgtaacttttttggggtgaaacctgggtcttattcatcattgtatctttagtgataagcccatattttgttgcagtaaaggtactttattagtattaaatgaatgaatgcattggctcaaatagctggagggaaggataaaggtcagaaatcttgaggtgataataattattcttaaaaagaaaaataacatttccaatagtataataaaataattaccaataattatctaaaaaaaacaacaacattgagttcctactatctgccattcacatgccaaagaaattttctgtatggtgtttagtcctctgacaacctcaggaaactgagcatcagaaaggtaaagttatttgttcctgttcatattactagtaaatatatagccaggtacaagtcaaagttatgtctaaccctagtgctgttctcttacacagtacaaatctgtacctctttgagtgtgaaacaaaccatgacagtttaacaaaataatgggccaatgtaataatatgttgtgttgctgtagtttattttgagacatatttgatggaaacggatgtgaaaggaatacaaaggtagttgatctggagttcagattgcattaaacatagcataatatttacagccatgttatggtgatacaattaatatagtagtatattagtcaaaatgtcatattagcaggggcctaagagaagcccttggccttgctttagcctcattttttgcagtagttatgatctgtaaactagctgcacactggattgccaaatattgaacttttgctcctgggggaaatacatggttaggtcccctgtaagtctctagttacactattttcattagcttattagcatacatccttgttttatgtgtgttactgtttaaaaactctcattctctctctcacacacgtgcacacacacacacacacacagagacagagagagagagagagagaaagagagattaacattgcacttacagccagtggcactcaaccaacactctaactcgtctgagtgaagcttatctgacatgcatattttcttataaggctcatcactgccttctgcttagggacattagacagcagttcagcactacagctgggggccattttaaacagtgaaatcaccaaggaaaagcacaaaaatgcaaaagaatttatatatggcactaaatagaccatgaaaggggcacttgtttaagtgtgacaattgaaacaaggcaaagcattgctttgtttgtcctcagctgggaacatgtgtatcagatgactcaaactgcttgctgctctgcacaggttagtgaatgactatgaaagtgctgtattactttgggacataggaataaattgtagtgaataagaagatttgcaaaacaggacctgcaaacattgaggactgcctgtgtatctattataaaatagactcgttattcccattcctaagatttgggctatgtgcgtttttctactttatctcattcttctcctgttgttgtcattggatacagttattgctgccgaggttatgtcctgtgaccactaggctttgtttgctgtaagccatttcttcagataggagaaagttgtttattgggtctggtttggtatgttagcatatctgcacagttcagagcccactccaccccacttctatcattaatgaagtgagagaaaggttaggagctctccattaaacccacagaatgtattctaaggtggattcatttgtttagaggatttgcaaaatttgaggggggctgtgtacttggtggattgtttcatgcactttcagctagccaataagaaattaaccattttatcttgggaaatgtttcccgtgctttattccagtaagaaaaactgagagttcactaacttggtagctattaggatattactcaaatgatcattatactagcatgtccggaagtcaaaaggaagaggtaaaagataactcttccatatgaggctgacttaccaatatgtactttcctttccctgtgggagggctaggcatttctggaggctataaactcttccaggctaccagtgcatctcagaactttaatttttgaaatggtaccctagaggtcttataattgaggctctaagcagacaattaatggttccataacccactttataagcatggtggtttctatttgaatatcctggctctaaactttctctcttctttcagactataaggaatgtactttaaaaagcccggagtaggccgggcgtggtggctcacacctgtaatcccggcactttgggaggccgaggtgggcggatcgcgatgtcaggagatcaaatccatcctggctaacacggtgaaaccctgtctctactaaaaaaaaaagaaaatacaaaaaaaaaaaaaaaaattagccgggcgtggcggcgggcgcctgtagtcccagctactcgggaggctgagacagaatggtgtgaacccgggagggaggcgaagcttgcagtgagccgagatcgtgccactgcactacagcctgggcgacagagcgagactccgtctcaaaaaaaaaaaaaaaaaaaaaaaaaaaaagcccggagtatattcacactcagacaaggactggtcaacttacttgctttgtgtggagcatccctgtgaaagataaacaggaaagtaggaaagtggaaaacaggaagtctaggagcagctctgccgttatctacctgaagcttcggccgaattaatcagacttaatagatcacatcgagaagactggactagagcccaccttctctctcctttctctctccatttatcattctttaatttggtgacagtttctttactcttcctgttccacagcagagcttagataccatcaactcttcaaatcttttaatcaacgaagatgcaactaactcctcccttcccccaaatctagtaaaacacttgatattattacacaacacatttaaaatagctatttatagaaaaagatctataggtcagctcactactttaattccaatgagcagcttcagtccatggaacttcagtattatggataatgatatagccagcaaatatctaagtgttatagacatagatcgtattatagataatttgtctttttatgtttttcttttttggttcgccaatatcgacatgagtgacatgagtcagtagggtataaaaaattctcaaaaaattacttttcctgtcctgacatatagaatgtttttcgaggtaggtggaaagttatcacttgtctctttattgacaggagggaatgaggagcaagatatgaatgtttttctgtttaataaacacattgattagcttgtctctaccaactactgtgcttaccgctaagcatatgaaaaaaaaaaagtcctctgtgatttaaaagtctaagagatttactagagagttaaaaaacttaagaaatctaatatttatttattcaacaaatatgcattgagtggctcccatgtcccaggcactgttttacatgctgggaatatagcttctggacttaaacacttttattctagtagagggagagaagatttaattaagcaagttgtaaagaactataatctggcaacaaatattataaggaaaactaagcagggtaaagggataaagagtgatgagaggtttattttaggagggatagtcaaggttgtattttacaagggatagtccattggaaaacaactgggaataggctactctgatttgttctttaaaattaggcagttatagaaggcctcccttttaggggatgtgtgagcaggaattagggaaatggaaagcaagtcaccaactgtctgggagaagaagcttcctgacaaagggaatacagagtgcaaaatccctgaggtgggactacacccagcatgtttaagcaaggtgaggctggtgtggccaaaggaaacagaaaagggaagatactacaaaatgaaggcagagaagaagcagaggctgaaatcatcttgggccacaaaggctggattttattctgagagagctagaataactttgaaagttttgagtgaaggacagacatgattttacttatgtattaacaaaaggtttactcaggctactgtgctgagaatatattgtagaaaaagtgttgagtattacatgtccagcacaggtggcagacggatggtgaattcattctgttcctaaaggtagagaggtattgtcttcctaggcatcagtacagtcggagcagggctttagaggaaatgtggatcttttctagggaaagggtggagggaagacattgcaggtaggggagaaagctgagctaagaggaagtgagcagtggtatactgtaaagtgaaaagactggcagtggtatgtgttgagcctggaaaatgtatctgtatgtccttctgaagaattaggcttcatcttgctaatggttggaagcccctgaagacctgtaagcaggggagcttatggtcggtcacctgttgagaggtgactccactgggaagatggagggtgattgatggcagagcaagccttcagagtagtgagggaagcagtggttccagtgacttgagcacataccagttggggtgaacagaagaggcaaaattaataggtgcatttgagttagacttaaaatcatttgagttatcctttaaaactaaaagcacatcatgctaccaagttcattgaaattgtgcaccttccaatgtaaagatttattgatggccattttatcaggcaacaagtcaggtgatgacatgttaaaagctgtttccaaaatgaattacattctccatgtagtataaatatcaaatgaatgtagtagttatgccttaatagtatgaaagaattgggctgccttcctctccaataacacgtcatggttgacatggattcaaaggctcatttgttgctgctcttcttgactcaaagaaagggtacatcttcatttaactcagcacagggtctgagaacaagccttgtgaaatcttagaacaatataatgagtaaaccaaatgccttccattgatagtcttagaatgcccttgaagagtatttgcttattcataatgatgattattttcttaaagcttctgtctaaatgttaatatctgtggacataccaaagcaacttgcctcaaacatgagagccctcaccgagttccacaggctctttgaagtatggatttaacaccatttgttccatgtgttttgaacagcaaaagtagtaaaagacatgcaggtgcttgtcattgagaaaaagaaaactctcaaatattcatgaagtgcctgctattgcattttaatttactttaggaaattgcctactttgttattcatttttgttttgcataatagttaggacagctctgcttggtttctgattcttaggcgcctgtgcagatgcagatttctcagatacctagcacacagatttttctgttgaatcataaattgaatttctttcatgagaaggtaatttatactttaaggcatatttttgttaataaactgggttcttctgaatgtttttttctcttcagcactcctgaaattaaacattatgtctgtctctctaatattttatgccctcaaaccaattttggcataattttatgggtttttgtgaaattttgttacatgtaatgtgtagtgatcaaggcaggatatttaggatgtctatctcttgagtacaatacatttttgttaatatggtcaccctagtctgctatcaaacattgaatttgttccttctaactatatgtttgtatccttcgacccacttctcttcatcttccctctcccccaaatcagccttctcagtctctgttatctatctttccactctctacctccatgtgatcaacatttttagttcccacctataagtgagagcatgcaatatttgtcttttttgtgcctggcttattcacttaagttaatgaccttaagttccatccatgttgctgcaaatgacgtgattttatactttttaattgctgaagagtattccattgtgtatatataccacattttcttcattcatctgttaatagacagtttgattccttatctttgctattgtgaatagtgctgcaagaaacatgcaaatgcaggtatcctttgatgttttggtttcatttcctttgagtatatacccagtagtgggattcctggattgaatggtaattgtgtttgtcgttttttgaataatctccacactgttttctactagcgtgttaccactaacagcgtataagctttttcttttctctacatcctcaccaacatgttattttgtctttctaagactagctattctgaccggggtaagatgatatctcattgtggttttggtttccatttccctgatcataagtgatgttgagcagtttttttgtatacctcttggccatttgtatgttttcttttgagaaatatatatatatatatatatgtgtatatatatatgtgtatatatatatatatatattcatgtcctttggccattttttaatgagattatttgtttttttttcctgttgagttttttgagttccttgaatattctggatgttagtcccctgtcggatgaatagtttgcaaatattttcccccattcaacaggttgtctctttactctgtttattatttcttttgctgtgcagaagcattttaaaaattaagtcccttttgtctcctagattttattgtctgatcttttaaggtcttagtcgtaagttctttgtctagaacaatatacaggaggggtttccttaggttttctactagtatttttatagtttcaggtcttatatttaagtctttattttgagttgatttttgtacagtgagaaatagaggtctagtttcattcttctgtgtatggatattcaattttcccatttattgaaggtggtttcctttccccaatataaatttttttggctttgtcaaagattagttggctctaaatatgtggctttatttctgggttctctattatgtttcattggtctgtgtatctacttttttccaatactgtggtgtcttggctactttagccttgtaataatttttgaagtgatgtaatggaatacttccagctttgttctttttgctaaggattgctttggctatttggagtctggttccatatgaattttaggatcgttttttctaattctatgaagaatgacattgttattttgatagagattgcattgaatctgtagattgctttgggcaatatggtcattttaatgatattgattcttcccatccatgagcatgggatattttgccatttgtttgtgttttttcaatttctttcacccaagttttgtagtttgccttgtatagatctttccccttttgtttaatgtattccaaggctttggggtttttttgtttgtttgtttttgtagctattttaaatgggattgcctgcttgatttctttgttgactagatcattagtggtgtacagaaatgctacaaatttttgtacattgcttttgtattctacaactttactgaattcatttatcaaatctaagagatattttggtggaatcttcaggctttcctaaatatgaggtcatatcatcagcaaaaatggacaatttgacctctccttttccaatttggatgcattttatttctttctgattgctctggctaagacttccagggctatactgaataaaagtagtgaaagtgagcatccttgacttgttccagttctgacaggaaaggatttcaacttttccccatttagtatgctgttagttgtgtgtttgtcatatatggcctttgttatattgaggtgtgttctgtctatgtttagtttgtttttaatcctaaagggatattgaattatataaaatgttttttgtgtgtcagttgaaatcgttttttctttcattctattgacatgatgtatcagcttaattgatttgtgtatcttgaatcatccttgcagtcctgctataaatcctacttgatcatggtgtatcatcttcttgatttgctgttggattcagtttgcttgtattttatggaggatttttacatctatgttcattagggatattggcaagtagttttctttttttgttgtgtcatctgatattggttatcagggtgatgctggcctcattaaatgagttgggaaaaatttggttaggagaaggaagaagatactagttatttgtgaggttatgtggtaactgcaagtgggttgattttaggataaaaatttgtagctaaatggtaggttgtttcaaaaattggcattatctagatattaaacaataatatgctaaaaggattttctatacacaaaagcagataactataatatcagagatattatagaactgagaatgataaaactactttttctaaagtatatatgaaaatcagatttaaaaaggctactacagtgcaaggtgtccatttaacttgagtaaattagctatgctagatattcatggctgatctgtatcatatgctaggaggacttgactttgttagctattgtccttgaaaaactgagccattgctgtaaactggattacaaacttgagtccctggaattaatctttgcttttcactggttctctctccagtgtagcttctgttgggaatcaagcgggagtaagatgaacactttgtgtagtagtttccaccttttttattacagctcagactttaaatctacattttactctcatcaatagaatcattcttaccacctcacctcagtccccggatgcccctgggatgataaaccaatgacagttacaattgaccttttgttttcttttcattttctgccttctttcaattgtgtaattgtaaaatacatgtgttcaacataaacctagccaaatcaaattggtgatctttgccctgaaaattcattgtaattttactattgtcaccttatattgtttgactatgattctaggttttacctttgtgtctggtaattagtaaatgttggtattctcaaagtgaatcttatcatgttcttctgccttgtggtgttcattataatgcaccagagatattctaaaataaaagcctggatttgggatttaggcaattactcaataactcctcctgcccttttgcagtctcttggtagtcactcaaaggacacagctattgcacgattgcacgatttctgtgatgccagacttgtctgactaaacctctactttatgcagactgaatatttttatagcccttcattaaagtccttgggttgtaagtgctgagaatcagcctctctgatgattttcccaaacaccagtggcatgaaatcccatgaacgaatcctttgctgaatgatggcttttttttttttttttttcggtgtttcactctcgttgcccaggctggagtgtaatggagcaatcttggctcactgcaacctccacctcccaggttgaagcgattgtcctgcctcagcctcccaagtaggtgggattacaggcacccaccaccacgcccagctaatttttgtatttttagtagaaacagagtttcaccgtgttggccaggctggtctcaaactcctgacctcagtgatccacccgcctcagcctcccgaaatgctgggattacaggtgtgagccaccactcctggtcacattcatcttttcactagtaaccagaaagacttggattatttgagaagttggttggctgaacagacgtctgtgtggcaggagggaagccataggtgctctgttggtttagagagccttactgcactcaatcccagaatacaagaagagtcaactgttagcagttttgcggtctattttaccttttctcataatattctctcaagggaaaataagactcacaaccactcaataacattaaggaacaagaataaatatggactccaaaaatgttagggcaaaactctacatggggccagaagctccttggaacagataactttgaggctgtattgtaaatacacagtgagtataatttatcttttcagagcatctcacatccttggtaggcatatgcaatggtcattggaactactcccacatatacagattctcctgcgtatgggcacatgttagaattttatttcactattcccttttaagttaggtatggctacatgatttatttttctatgaaatgtgagtagaaatgaactgtctcgtttccagatggaggctttaaaagtcagactgggatttgttcagagaagggaatgagttagcctgaattattgagtgttcatgagggacagaatcccctaccaacctgtattggacgtagagtcgtcgtgaggaaaaaaacaaacaaacaaaacaaacaaacaaaaacacatttggcattgcttgttatatgaaaattacataactcattgctatgggctgaatatttgtgtgtctcccaaaattcatgcattgaagctcgcatccccagtgtgatggcatttagagagggggcctttgtggggtaaccaggtgatgagggtggaggctcatggtagtatctgtgtgcccctacaagaaaacagagagcttgtctcctttctctcttgctatctccactgcctgtctttgctctcactctcgcttttgtcctctctctgccatgtgagtgagtatacggtaagaagatggtcatctttaaatcaggcgaagggtcctcactagatgccaaatctgctggcacctgggtcttggagttttcagcctccagaactttaagacacacatttcagttatttaagccacccagcctatgatcttcttgttacagcagcctgaactaagacattaatctggactgttaccatttatttgtttttatagctcttttaaattgcatgaagtaatgcatgctatgtagggataatcaaatatgtttttataatacatttaatagatgtctattcagcaatttcttttggagatggattggagcttggattttgcctccaccaatggctaacttcagaaacttgggcaaattatttaaattttgtgagccttatgtttcttcaattgcaaatgatggcaataccacttacctcataggtttgtcctgaaaatgaaatgattaattgtatgtaagtcacccagtaaaattccaaaggcaaaataaatactgaaaatatattcattcttactagtctgtcttttaaatactgactagtgacgtatcatgttaaataaatgctcttgctctcaagtatcttgtagtagagtatttagacacacaattaaccataaataaaatacaaagtgaaactcactattaaggatccacaaatgaagtacttgaaatctcagaaaaagtcatatctatagaaaaattctatagaaattttgagctctaggcacacacgcagaaagccaaggaaaatagtaaatatctagcaaaactcacatagtggcttatgtaagtcatttcctaaaaaattcccaaggtatttttttaacttgttttatcaaaatccatttagagatcgacagcttttcttgcaacattggtgaaagctctttcagaactctgttactgtagaagcttgccatgtgaaaaattcattagcagcaagtttgaaatcttaaaagccagtgtgtgttttagaggagtagctagcccatcagtaaaaagagtagagtaaaaggttcacatcaaaagagaaatcttcacagcaccgatgttatcaactctctccagatgtgcagttttctatgttgcactcactttttcatgtgtcattagcaaccttatatcttaacatggaatgcttgaatggagtccttattaatgaagtcgccaagcccaatctattcatcaaatatggtcttggggttagaacattctggaatatgcagggaagaatgcccagaattgtggacctcccatactgccaatttaccaggagagttttgccaggaagtggggcacaggtacaattggaaacaagctgtgaatacatttttcaagagacaggcataggttttcaacaccagtaaaaggtttctgaacaaaagcaaaaatcaatgtaagttaagttttaatgggaaataaaaaaaataattacttataaaagtaggaaaagaagaaacccttcaagatagaacaacatgggatatcctatctatgcacaaagcaaaacaaaaccaaaaaggtatttattttgcatttttatattatgctctgtgagcaacaggtgtataagaacatatatgtgggatgaaggaaattggtagcttagctgcctgtgggctcctctgaatttttaaactataaaatcacctccagcttttgaattgggtggatatgcagttagctaggttttgcagcagtctctttgaattagaaagatcattaccatcagtagcttggtcaggactgtatgtggtggggccaaagctaaccaatagtacaaagagactttgaatacatgttctatgccaggcattatgtagctctctcttgctagaaaagcaagatgtggattttaagggaaaattattttgaactcacttgttatttttagatgcattcatagacaaagagagaattactgtgtactattgtcaccaaacgttaaagagaaatatgaggtttaataaggcaacaagaatcacctgatacttttcctcttgtaccttgtgtctcagaaacacctttcatcacaggaatgatggagtatctaaggaagatgtacttaggaagaacaaatgtaagataatatgatttcttgcctcatatttaatttccatggccctttggggataatgtgttttcaaggccaagcctccttttcaggcaaccagataataagaagtgctacattttcatatgctaacttgggaaaattattcatttttaaaatttaattgctttaattcttgaagttcatggctgtaattttcagatgatgtgaatcactcagtggaggttttgtttgttatttgtttgaaattagattctttttccattcgccataattaattcattcacatttggtgctctttgcatttttatgttctttatgctttatttgggaagttaatttggagagaaattaactccaactagacttcagtggctgttgtaatttttttagtcagatctgcccagaacatcacttaaaaatgaccatttcataggtttgtttcaagcatcagtatattgtgggtgttaacctatcttggcatgtactacagcaagagctcttaataactccagtgagggaatacaaatctttctttgggtagagtgacaaggagtgccatgaaaatgccttcatattagataaggttcacatttaaaaagcacataagtcagcaattttagtctattcaatgcttaaaatcagtggctatttttccttttcagcaaatctctcttctaattttagttatagtaaaattcagggaagaaattgcttattaatattattattattatttttaggggtatatgtagtaaaactgtaagatgatacttacatccaggtagtagcttcttggagttttgaatgtcaaatttattcatttatcaaacagtttttcagttttgtttgggatacaaagttgattcttttaaaggagcctcagagcacaggagctcacagaatcctgaattttatgtctatcgaagagaaaatggtggttaaatgctacttcctctctgaaaacttatctagacagagttttgatcattatctatgtcctgttttggagacttcccggcttccttaattattttctttatgtggatacattcaaatgtaaacctataagtgtgcctctttttctgagcacagatgggccttaatctagttccgtcaactcttcttgcttctccacttttccaatctgttagtcacacctctatcagacacctggaggcaaaccctactaccgtctttgacacctctctcatccttagcttcacttcttgaaaacagagcctttgacatcctaattcatattctgatatttaaaatatgtataaattgaacatttcattagggaaatcaaagttccttaactgttatcttagtaaacatcaagttttctcatagtgagctacaaaataatgccagcagagggaagataacacttgctttgggactctcttgggccagtagttaagcctctgtgagcctttgttttcttctctgcaaatggtaaatgcaatagggcctttctcaaagaattactgtaattcttaaatatgattaagatttaaaagcactttgtttcccaagtagcaatataaattgtgtttattatgcaggactgtgttgatagttaacaaagtgtaagacatcagtataaaagaacaggatttctaggctaaaccagggattagcaaactaaggtcagtaggccgtacctagtttgcacacagtattagtaaataaggttttattggaacatagccacactaattcatttatgtattgtgtatggctgctgtcatttcagctacacaggcagagttgagtagttgtaatagagatcttatgtaccgcaaagactgaaatagttaaaaatattaaaagcctaaagtatttttctaaaatttaaagcttaaactatctggccttttgcagaaaagtttgcttacttctgcctaaggcacctaccaaaactggtgtaacttttctgtattcttctacattcaaactgaccatcctccaatttatagaataggttttagaattttatctcatttaacatttattagtttaatgaactttaaacaaattatagaagatgttacatatgcaaacatgcacatctgtgtgtttctgttacacacacatacacacacattcttccgtaaaagtggggcaatttccacacattagcaatgtacaaaaagcttaaactacattttcctagtacaaggccaagatagaaacactaaacaaaatctgatcttcaacctgaaaatcactttctgcataataatgtctgagttgatgaagggaaaaaataaaagggatacactttaatttgcacttgagtagattatttttttctgatgtgattatgacagttaaaataaaacactcaccaaagcacatcttagcatcacagtcaatgtttgagtttgattgcattccagtctgctgggttctgggaggcggatgacactcccctcttagagaaacaggtaaccattcaatagagcctaaatagatgaggctctttcatgcctggctcagactgtaattaaaagaaaaatctaaaagttatatttctaagttactctatattctttgactctgtattctttgtgaaacagaaaatgtgaaaattcaacgtctttaaaagaatgctttgctatggttttttataaaaactgaaacgaattttgtcatcagctaagaattgtattaaattgaattttgtaatgaaacagtgtaactattctctgcaagacttatttgacatcttaattttcttgcctattctaacatagaaagtgtcagctgttcattcatcatagattttactaaacttcagcatataaacttgtgatgaatgattaagacacattaggccaactgggttggctctagttttcattttcaagaaccttaaaaagctttgatttgcagctgttagaagcaagttaaaatattatcagaataccaccaacttggaaagtgcagctgatatattactggtgactgtgcgaaattatagcattgtccaatccaggtaccagatggtccatcttccttgatttgaggagcattggttgactacaaattttacttgctgccctaggcttgttattgaccattagcatgtgagttacagattccttaaattctttgccaggtgacaaattgacctattaacaagtcactttctcaaaaaaatgcattaatgtttttcaatcaaaggaccagttgcaaatgagcaacattttaataagtattagttttgctttaaaggaatcagtaagtatcctcacaagccaagttgctgaaatagactttaaaaaaaaaaaacacttgaagatttttaagagtgttggaaaattttgaaacaagtcttttaaaaatataattaacatgtaaagattctctgtgttttaattctttaatagcatgttcttttggtgattttctgtgaatagcatttatggagtatagataaagtagaaaacataataaatttggactgtttttcatagtagataacttacatggacaaactatacaggcatggagatgacataataaacttatagacaaactatagacaaactatactatagacaaactatatatacttatagacaaactatacaggcatggagatgacatgatattggagttcagaaacccacctttttacttctgtctcggaactgatgaggtgagccaaagagtttcatctatagagtgtggaggtcacgttaagtaatctctacattatcttttacatttaaaatataagaactttagtaatctaattgtgattatcaatggaaatgtacacgtatatgttagattttgtatttaagaagtaatttcattagtacttgaaatttaagggaatataaggaaatcttttagtggaatactgctgtctctgaaaaccatcacctataaagcatctagttgaacagattttaggaatctgttgagataatttattctagagtcttaaactggaataatattgcattttctttctaagagagatacagaagtctaagaattaactccaggggaagatttattttcttttcttttctttttttttagggtgaaagtggtatatgtactaaatgaaattatcttgatgcgatagaccagtatacttggtaaagctacttgatatactaatttcatcacttaaatgtgacagccactgggatttccagcagtgctactattctggacctattaatgcttcagaacttacttgtcttatgttggcaggtgcttgtgaacgctggtgcaggctgattagccattgcttttacagttatcacttttactttgaactgtctacaatgcctgccttatttctgaaggagggtgccccatgggcttccatggctcttcatacagcatgactgctcttgaaaaatgctaacaggttgtgacaaatactaagataatatactgtaacatacttatatgaggtgattggtggcaaggcatcatttcttgtgctaacattaagttctccagtggtattgggctcattccccagctatgtgtttaaaataatgacatagttgagggtgtattttcaggtagcttttaatgatgggaaaactccaaaatttgggaagaagacaataagtgcagtttattttatcatatgctaggttttaggtatagactttctttttccttttctaatttgttaatcttttctagatacacatagaaagactaggttttatttaagtcacctttatccttagctttccttttaaaataagtatcaattactttctattgtgctgtttcattttatcttaaatttatattttagataaaagtgtgacagactttgaaacaagtcaaaatgattgctgggtatctttggtggaaaactaagcagtttctaggcacaccctctgggttatctgattatatggggtctctgcgcctgtcattatctttgagctattttacaactctgttggttagagataattgatagcaatgcaaatgattcttgtctgtagacatgcaaattaattttgtcccatagaagcacaactgatttttagcttccaatctcaccccattccgattcctggaataatccagttttgtgttcatgtataattcatttcatcattaagttttgctaacatttttgtggttttttgaattcaccattgaactagttgtaacttcttacttattttcccattaattagctaaataacatccctgacaaatgtttatcttacatatgtatggactatgattatatcctctgttaaatattatcctttaacaatattccctttatggcagaaatgttggagatgtgttttattatatacttatgctccggtcatgctagatgaatcctgagaatctggcttccaaaaagatcatgcttcagaggagatgagctaagtcatcaaagacaaaacaaaacagtggatgtagccagtgtgagtaactttggctctcactgattccttcccgctgctctgcagataggctaaaatccggaggcatttttttggctatcaaattcaaacttagcagcagattggaagcaagtcttttctttgccatggaagaggttgaaagagaagtgctggtggctcctatctgaattgctacttggctgcacatttcagtgattttgtttagcatctgaaggagacaaaggtggagggaagaggaaggaaaaagcagtttgatgtcagaaagttatttctccaatatcatctatgtctttggatcaaaaagaaagagggaaaaaatatatatatatatatatacaaatacatacacacacacacatatgtgtatacatatacatatatgtgtgtaacatggtgtatgacattttacacacacgtgtgtatatatgtacccatatatacatatacacaatattatccatatatgtacatatatacacatacatatacacatatatggataatattgtgtatatgtatatatgggtacatatatacacatatgtacatatacacatatatggataatattgtgtatatttatatatgtgtgtgtaaataacatataagggtaatatttaaaagaggatatatatatgcatgtgtatatgtatataaacacatgtatatatgtgtgtatatgtatgtatgtgtatatatatatcctcttttaaatattatccttacagttggtgtatgacattttacacacacacacatacacacatatgacattttacacacatacacatacatatatgtgtatatacatatttgtgtgtgtgtgtgtgtaaaatgtcattgtataccaactataagttacgcacttcctcatttgctgcaatatgtcatcttcctcacagtgctgtgattatgggtattttgttatgcctgattttacattttacacagctcctaagttgaaagacaaagattcaaatgtatgtctccatgatcccccaaatcaaaagtcttgatgttgctttgctaacttttccatttgtttggaatttttttctttgttcttttttgctttctatcagaattaacttccgaaagctttctgcttttctctcattttgaatagcttttgttaaaatctatatgggaatccacatctccccatagaccaggtgcactggaagatttgaggggttgggaggagagtgtggatgcagaccagtgtgagtctagaataagcctgtggcaacctgggaaaaacagggtgggaactcaaaagaattagagagatatcctcacattagatttcagtggaaagagaggggggaaagtcatgtatactggagcattcctatgtgagttcaaacaaattgcatgtaaatttggggctcactaataagggctgtgtgaccttgaacctgactttcttcaactagtaaaacttaaagacaaaaatacccaactctttcaggcaaggaggagctgaaataccagtaaatgcactaaagggtaactttgagaggtttgactttgtccaacactcagaatcaccactcacctccttaaccacaaatcactagaaacaggcatgcaatcaaagacaaacaggagtatgcttcctaagtgaggccagcttcaagaaggggtgaacattggaagtaagttgcttcacctctagagatgaataaataggtacaataaaacctgccatagagcataacttgagggtcaaatgaggggagcttgcagactgaatttatttcatttgactgcttcagtccttatgtcatcctctccccacaggatgtagccttggacaagaaagtttacattggtccacctctaatatggacaaggagatccatgtttgcctctctcatacatgtacacaccctttattcaagtcactttagtcatccaaatataattcttagtttttgagacactattgtcaacattgagacttctgtacccaaaggttattttagagaaagattcatcgttatgtttgaagctggaagatagaatgcactcagctacatgtgctttctgtgaaatgtagttgggctgatgctattacaatctttcaagtaccaaagcccatatctttaattctttttcccatagcatgaagtgccaaaagccagcactgaatgtgtgtatgtacctcgccatgtgttgctgcaaatttagctgtaataattctgcagagggcgataattctgcgggagatcttcttcagaaggaatcagaaattagcaattaaaagtcactattttgttgtaaatggtcaagaccttcttcatagtaaaatccgtatttggtcgttgactctaatggaagctgtagactcctactaatatttgtttagggatgaatcccatggaagctgcaagcatggctagattccaccactccttgtacataccatgtctatatcctttggcagggcaatcatgaaaagcaaaattaatttgaaaggagaagaaaagagaatttactctgaatcccaagagactgcatgctttgaacttgcaaattacagccatttgcacagcaaagtgatgaaacaaatccttggatttcatttgctctccactgtgctttgggcaaagtgtcaggaacatgccccccaagaggtaactaaagatcattctcacaaaatgtgctatcaaaacccaattgtctaagagcatgtgtttggaaaagaaaataaacctgagtgtcagtgaaacagaatagcttctaggattttatctgggaaaactgtcaggttttcttctaataggtttatacaggttcactcacctctgactccttgccttatttctgggaatttctcctggaaattgaaacttttataaagtacaacaggatagactcttctgagcactcgaagtggaaaaactgaactaatttttgatttgttcaggagccattctttttattcaccaaccttaaagtacttaacaaaaaaaggcctgggatgatggttgagcttgaggtcagtcaatggattttcaaactagagcacaaggctaagtttctcagatggttaattatttataggtgccagagctatctccttataatagtaggcattcaatatatgactgaaagaatgagtagagaaatgtaaagtgattgtgaataaatgaattaataaagaaccaatggtttcagcccagtggctcacaacctactcacacaagacccttatgtatttgctatacacatcttatgtttagaaggagaatgcacaacattgtaggatcctagagtttaaaagtgcattgtttgtttaaccttgacaattattaggtagttaacaaagatgtatgatatcttgccatgaattatatctttctgtaagatgaagacacttgttcagcatccagcacaacttttaaatattctgtcccatactctgatagctaaaaattctgtttgcgatgaaatgagcctagaacctaagtccacttttctatcaaaataaaatatggaaatatgggcttttccataaatcgccatacatcagggtgcattagaatgaacactataatagatgcacagaccaaaggtaattcagttacgtgggacatgtaaatgaatgtcaactaaggtgatcagtgtaagtttctttgaggagaaattatttaaattgggaggacttttcagggattaaagatgtagaccccgaatacttattatgcaaggaattgtgcaggagccctgagaaggcaaacttagtaatccagatcacagaagtaacagacatattataaattgggttaaatgctatcaatatcttccttgtgtactattaattgcctgcacatatccttatatattttctcttccccgagtacagtaacatttaatataggaggctaaaccacagagtatgtaactggcaatttcaaataacgattaggagatgcaatgacataggctgaagttaacttttctgaagcaacatttgcccttcaaagattgaatgtcatcccactctagcccttgcattaaaaagtctcagttcaagacccttttccattaatgtcttactttgaaagagccaatctgataaattaagtatgttcttaggttaaatgatattgatttaatcagattgttattttgcatattttgatttaaatgctaggtaaaagcagggatacatgtggcttccagcagtatcataggatgtgtgtaactgtttattctgcctgttttgttggcagtctaagaactttatcccaaataaagagattataaacatgaaggaaaagctgtgattattcttagtgtgccctaagcattgtgtttttattcctactgagatattttaagttttttttttaaaaagctttctgtaaaggaattatttagagtttttttatattttaaaacaatgttattttgatatacatatacagaatgaaatgattactgcagtcaagcaacttatcgttagcagtcaaacaaattaacatatccatcacctaccatagttaccttttgtgtgtgtgtggtaagagcacctaacatctatctcagcaaatttcctgtatacagtataatattattacctatagtctccatgttcaaaaacattacgttcgatgtaaagacatttttcactcttcctccttatgcagtgtattccttaaaactcagtttagcgtttcactacttttttagagatatggggtatgtgctttaatttcatgagtctttgtttctccctcttcagagactctgaactccttttggtttaaaaccatggctgagctttaatcacacaaattatttaatgataatgcttgactgtactgctgttacctgaacacagacattttaaagccctaggttggaaaggatgctagaatttattatatcatttgaagtggtatcattttaatatttaggtacctatacacaaattttagaaagagacctcttgccctttattaattgaaaaagtgatgccaggggaaaagggctgtctcctttttgttggcctcgcatcccccatctgtgaaatagagactgagtgatatttacctatgggcatccatcttaaatgattagtgggaattaaggtaattattataaattaatggctgtgtgagttataaaaggttagatattatggagttccattgtcatggagggaggcaattaaagaaatatacacttatagactgtaccatagatcttgtgacatttctagccactttgcctttcatcgttttactctatgtgatatgatcagtgttgtagtcatgcttttacagatgcctactgaaattgcactattttatagggaagaaaaataatttttcatgaagtcttacaggcagttcaatttgattatgttcttaatcactctcacctagacttggcccttttactgaattggtctgaactagtttacagctcttgggctttgaacagtaaatcttaaaattctaatgtcagctgttatatagtttagtaagaatgctgatctgctgctatcaggagcaaaaacgagcactttgaaaattagtttattgtatatcaccccagactcaccaaattcaatagtaaagtggctaactttgagtaagcaaagagggctgtgggactgcaactgcaataaacttgaaattgattgtttgtgggtgaatttatagatggtagttggtttgatttatgcattaagagtcagagagagtgaaagatggaaatcagcatctctggtcagctgagttgtagaaggtcactgggaggtggtgaattactgtttgccatggtttggcaagcagtgttgaagctgcttaatgagatctaaccaaacttgtccataaagatgacacatgcaaaaaggaaaaatattattcagataagataccattcaggctctaggactaaaaacatctttggatatttgaatatgaagtttttggcatcttctaaggtaaatatggcaaatgagttgtgagcaggtctgaaatttgcaacatatttataaatactatttacatttccctgtcttgagttagcgattagcctttcttttggatatgaagacaatatatttatgaaacacaaatggaaaatgagcctgtataaatatgttttagaaacagtggttgagatgtagatatacttaaaaatactttcaaggaggacatcttgatatcattgaaaaagaaagcatgcataaaatcagctaaacctatctaaatgagcataggctatttatgggttcataactatgcattagtatgtggactgtctatcacagtccacatactgtggaaagtatcacaaagtgatactttctatcactgcttacacacaatatcaattgttgaatttcaaatattttgcccacaacctaccataagacatatatattgcatcccagtgcatatacaatatatacaagaaatatttttacttcttatgatgagctctgaaatactctgttgtattttaagcttgaacgctgatgctaactgatgttaggtcctgcagtttgaaagatggttgagctggggtgaagtgaaacaggtgaaacctccacttcgatgttcttccctggtattgaacctcaaagagattggtaatactactaacacttgctaagaaatcaagtaggcagaattacaattaaaaagaccctgaaatcaatgctgtccttataaaaggcatcaaagaataggtgggtggatgtccaggattatgtggtcttatacagcttgtgcttatctgtagaatgcacctcaaaacatagatgcttccttccatagtggactctgagattctttttttttttttttttttttttgagatggagtctcactctgtcaccccggctggagtgtagtggcaccatctcggctcactgcaacctccacctccctggtttcaagcaattctcctgcctcagcctccccagtagctgggattacaggtgcccgccaccacgcccatctaatttttgtatttttagtagagacaggtttttaccacctgggccaggctggtctcaaactcctgacctcgtgatccacccacctcagcctcccaaagtgctgggattacaggcatgagccaccgcgcctggctgtctctgagattcttaagcacaaagtctctgcttattcttctgcagcaccaggcattatacctaacccattgcttgtgtgttattgagtggaaattaaacaaatgaatgaatgaataaataaataaatgaagaaagtgagaagaacatgagaagaatcagatgcattccatttaacttttattgcagaacctctgtggtgacctatgctaaagcagtgagcactgcaaaagtaaacaagacacagttcgtaattactagtttggggtgtaatagcagtggtatgagcagatggctaaggaatatggaaccttaggtctttcgtaacagtagcatagagtaacagcttcctacttggctttggctctgtgttctgaaatagaagcaacagtctgggactgaaaattgcaaaacctggatcagttaccttggttcaccttgtcatgatgataacccttcttgtgacaggtggtgattttaagcacacagtagaaccatagtccccactgtccaccattcttaaaataactaccctattctgctcctcctcatttctctccaggtaattcattactgtactttggcagtcagaaatgtgaggaactgattttcctttgaggcaaataggtttttgacctgcagatctatgtgggtagtggaaatgcggactctcttggtctaggggcttttctattagatttgggactcaattaagtgaaagaaggagccaatcaacaatatatagtactcttagctccgaggagtggcatgctagaaccggcgcatattggtttgtgagaaccgattgttaaaatttcaggaatttttgaatctcttcctaagaacagcaattattaaaaataaaatgcataaatttacaattaaattatgttaaaataaaaatggtggaccccaaaatactgtcagtttctaattattttattaatagttatactcttgatatctgtcatacctgcctggaggaaatactacatagaagacactatgcaaatctctccccacttcaacattcatgacacaattttggcagctagaaatcagctgtgttgggagtatttatgtcatggaaattggtataatttgggaattatattggagaatacatccattttaaattaagaatttccctcagaactggaaagttggttaacacaatactgactccgtttataatatctcagatactgacactgacggatactgaaaagggaataaaaataatatgcaaaggtcctaaacgttgggttaaatggataatcataggcagtcatgatgagtgccattgtagacctactggaagatgacagagctagtgcagaggttcccaagtattctgttcatggagtcccaagtgtctgtatcagccaaggttctccagaaaaacaggaccaattatatgtaagaacatatatattttacatatatatttacatttatatattataatgatatataatatatatgatagagggagaaaaggctttattttaaggaattggctcatgtggtgtaagactgtgagactggcaagtctgaaatctgcagggcagactggcagactcaaaccttatgcaagagttgatgctgcagtgttgaagaagagtttcttctccaggatgcctcagtttttgcgtataaaacctttcaactgattaggttaggcctgcccacattattgagggtgatctcctttacttaaaatcatcagattgtggatgttaaccacatctacaaactacctctacagcaacacctacattagtgtttgattacattactgggtgctatggcctagccgtgctggctcaaatctattacagtgtcctactaatttttctgtggcatcctaaaccagaagaaatactaaacattttatttattaagtccaaacaattcactatttgtatcctaaaatcttagtgaccatttgaaaacataatacatatacgttgtaaaaatttatttcatacatagtcacaattatttactaatggatagcacacaacttctcaagccctagaataaagttggataccaccaccctcatttcctgctccacatgattttcacctgctgctagggaaatggaaagtaaggaaaaatgctgctttgcaatgatatgatgctattaaaaggacggtagtactatttaatgttgaaactgtgaactacctccaagtagtttctgcacttttctacagatgtcaaatttcccttgaaaattttaaatctcatggtgcttccaaaagcttcctgttttgcccaagtgagccctgtcacagtgaatacgaggatattttgtactttgcataatagaatcaaaatgctcccatgttttgtcgtcagctctgtaatgcataaccacagttttcctggactgtttgcatgtagtaagaaaagttgcagcattcagattttctctcaagatctttctattcattatcttttaaaaattggtgctgagaaatacaatgaatctctctgtgtgtgtgtaatgtgagtgtgtgtgtatatgtgtgtagttgtgcatacaaattcctgattatcttttgtgttgagacagcgctttaaaatgtctaaaaattttatcggtataaattgaataaattgtatatatagttaaaacaggcagaaacttcctttatttacaaataaccaagtaatttacaagtttaatgattttataacataccaaggccaaggttagatgtgagaaaaagaaaagatagcttttctcactccagatgctttctgctttctaagactgctttgccttcccacactgcccactcctcacctcccatatgctttatcccttgattattctgatcacaccttcttctatgctcatcctcacccctaaacagttcagcttctctgaaacaggaaagtcaaccaaatggtaagggccagaaacactggcagaagaactaagaagtttcttctgtgtcatctagagtagcatgtttaaattctctctgcataaccattggacctgatttaaacaattagctaattggtcccatttaaaggagctattttttgcagagtgaaaattttagaactacaagaattagcatttaaagtttttatcaggaaattgacatcagcaaaggatgacaataatactggtagtttgaatgataaggtcccctaaagtagaatgttaattgaatttcctaaaacctgtgtgaaagttggaagatttctgattattgtgttgagcaacttcactaaacaagagcagccctgagagatatgaaaggatcatttataatacctctttacactgaaaaatgttgaaaagtgcttatttggaggtttagggtatttgaacttaaggaaatgaactggaacatacattttaaaaatgtggcttccctacattctgccattcccaattaggttgtataggaaatgtatgagactaagaacagtccaggtctattaactccagtttaaattatcttagctatcagaaactctagctaaattctaaagtattctaaagtatttcacttccctccacctgtttccttaggtgtggttaaattccttaacatccttggcaccagatgaacaaactgtatgtttatttgaggagacatgtcgaatgatgagaacactgttgcttggtaccagatgtgcttgttgactatgggaatttcaataattctaggatgagagaactctgacatagactgtatactctgaagagggccaactctgaaataaatattgccctctgatcaattggaatttggtgtttcagaaactgaagctctctgttttgtgagatcttgccatcttcttttttggtgtgaactggtttttattggggtgtaggacacggggtaggaaatgtcaccttggcgtatggcatgccttacacattctaatcttcctggggtagttgatggaactatttcttcttcttgaagttgctcttgctgtcagccacctctttaggtccactgctgaccatcctgcttgagagagaaatcttccaaggattcgtccaagaacttactttttcttggagacatcctgttgcttgccccttcaggatcactaactgtttcctccttgggggatgatttcaccctattgggaagcaatgttcaaacagaggaagtggctgctgagatcagtaggaagctggagaaacaggagaagaagccttaatgaagggaaagaaatgactggctctgcttggcctcgcatctgcagaaaacagcagtagtattctgaaggagtatgaggagatgggtgaaaaacccaaaataagtaaaagcagaagctctaggaggctcctcaggagaatggaatggaaggcccatctctctctttctccaaactcaagaaaaagaaatatttttccaaggaggagtttgttagtagcaatcttgccatcacctttcagctttgtagatttttactttctatctacttcctaggaaggacaaaaatagtaacttccctctgcgctccagagctctataaaagccaaaagttagttggctgaagtctgtgaaatgtgactcactctgggcacttcatttctgttgtttgtctgtttgtttgggatgtgcatcgcaaggtccctgagtgtcacttctgagggcggagagcttgctgtagcagacctgcagaggcttgcttgtggggttaacgaggccctcctgtctcctcctctttcccaccacgccactcaccaggtctattcctggccattttcaggctcaaggtcatccctggagggagtgggatctggcagaatcacatttctgctgtcacctcagcatcttgtagtgaaaatgaacatctgggcaagcatttgggaaaatatcttgtgaagagcaacacgtaagttgaaagaggcatgcagagtgaggagcagcctcatctcttctttggaaaacagatgacaatttatggtctgatcatatgtccttgagctcattctgcaacttcctggtagaactcccttctttcacatttacagtttctcttttttattttagagcttgtgaagagctctgtaaaaaggtggggacccaaggaactcactggcattcacttcaagtgccctaagaaagcatcaacctgtgtaatcgtggttatgtggccctgtgtctgcttttgtatgacatgaacctaccataatgatttgcccatagaaactttccaataaagatttgatgaataagggtatagctattgtagtttcagcttttcatgttctgcatttttggtctcttatcctgattttattattagtggtcctgggagtgtctggctccttttcagttgagctaagtgttgtgtctaattatatattagacatattatgaagaacctttggcaatttgagaaaggaatatgagtgggaaactcttaaaaggattgcactttctccttcttcaaaagttataactttggaataatttcattgttatatcaaatacttgtaggtgtcagaaggtagttctgctgagaataggaattcttgctgtttggagaaattgaaacagaaagggatggagttggattcttcatacagcaaagtagctgccatgatttcaccaagtaaatatttgaggcactgctggtcacatggtctctgccataactgctctgctgttgtaatgccaaagtagtcatagacaatccatgaatgaataagtgtggctgtgtcattatcaaactttacacctaaatttgaattgcattaaactctcacatggtcaaaagagtcttacgatatgttttccccaaccatggctcacagctcccagaaaaataggtgatggactgtgtatcagccaccatttgcagatacttttttaggaaaaaaaaaaaaaaaaaccaagcagaactgattttccttagcttctctgatcattcataattgtcagaattttaaggaatatcggcaggctcagatcagtggaagagaagagctacacttcaatgtttcagttatcccacagccttcttcctatctagtaacatgttacaaagaaagcaagactcagactgaattcagccacacattcagacatttactggctagtagacctcagtgatgagcctgtatgtttgggaatgtcacagtactctctccctcatgctctaacaagcactttgcatgaaagatttactccaaggctgacacagtgatcttccaacatcgggatgcttcaaagttccagcgatgtctgtgagcagagtttcccctgggtggtgtgggaacacgggactagcatcccagatcaaggaattaggttgccaggcctctgtgattctcaagtctcattcatgcagtgggaggagagactataaaaccttttgggccaaattcactttttcaattttttactttttaaaaattggtaaaatatatataatataaaatttaccattttaaccattttacagagtatgtttaatggcatcaagtgcattcgtattgtgtaatcttcaccattatccatctctagaactttttcatcttcccagcctgaaattctataatcgtttaacagtaactctccattttctcctgccccccagccccaggtaaccaccattctactttctgtctgcatgatttcgactacttcgggcacctcatataagtggaatcatgttgtctttgtcctcttgtgattggcttattttgcttaacataatgtccatgttgtagtatgtgttagcactgcattgctttttatggggaaataatagtccattgtatgtgtatactagaagttgtttattcacctgtggatgggcattttggttgtttcaaccttttggttattgtgaataatgctgccaaccccatagcttgaacaacaccaatttcacctatgaacatttatttttaacatctcttctgcccattagtaaatcctcatattgatttagttaatactttttgaaagcttgccatagccaccccaagtgtatagattcctgtttgaagtactgtaaatggtaactgttcctaaaggtatagattaaagtttatatacacacatgcataccagtgtttatacggaagccttttaaagtaaataactcaaggcagtattacacaggcaacaacattttcattttgtcaatttgtttgttattccctaaacaatttgaaaatattccacgagagttaactgttaagctgctggtctcttctgaatgagggataataatgagtggtgcctgcttagactttgtgatgtgaaagtttcctgaagacacctccatcacccgcgccccaaatatctatgtctcttttcctcccagaaaaattttcgtaagtttgctgttgtcataacttagcaacattagatgatcagacatagcttagggacattagcaactgttaattacttgatcttgctaaacctttgctcttcttgccatgatatgaggaggttgtaccaccttccaatagatggatagttcttgttaatttaacttttatgtctggaaaaattttgaaaatggtgaaaactatcttgcatctactatacttagtttgtatttattcacttaaatttagaaagaattaatagaaaataaatgtgcaatgaattattctttgtggacatcaatcagttatcaattccaataataattagataataatagattgattattttgaagaaacctatttcctcttatctagtcattttgtgtgtttacacgtggagcttttgtatttttacgtattagaaattataatagtaaagaaaaacttttgatatcctcatagcaacattttaaaatcattacttagatatatttcatattatagtttataaaattaaaatatctactttaatgaaaatttgctaagctctgagctaaaccttttccctattctatctcctagcctgttaccatcatttccattcttacagatgaggaattgagttgttaagcatttccttctcacttcacatagttagtaagtggtaaggtcaaattacaatgtcaccttttaatacccatattaatgtaattgttacttagatatcacactagaaatatgaaattaaaataaagaactgaaaatatcaggaagacttgttattttaaaaatctcaaaaaatataatacaaaaaattttcaaaaatgaacagcactttcatactgagtgaaggaagagcaaatcatggtatcttgcaggatgaaaggttgtctgtatttttggacatgaaatcattgcagtttaaggaacacccagcccatgtggaaacataagctggaactacaagccctttctgggtttatgtggaaaaaaaaaatgtagtggccatgtttctggttcattgttaagctgtcagggtaaccttgatgtctagatacttaactttttcttctaagtagtagtagataaaaatttcccagagatttttctccatgtgtgtagaagtttagagtcatggaggtatatgtaagaagctgccttactaattcagtgcactattagattgttcatagaactggaaatgttcttaagaggtcagctcatttctttatgtttatatgtattcctgggagtaagaaacctagagagatgaggagatggagaatagagagataagtatggagagagaaagtgaagagacagcaagataatttaaatcactgacaattgtgctcacatgccccaggccatgaataaaactgggccaggatcagcgttttgctgccttaactttcttaaggtgattgaaactgaaaatagtattcaaatagtcacgcaaagaagtgggagggcttccgccatattcctaagaaagaaatgatgaaattaactgagagccacagaaaaacatcaagcaaagtagagttaaaggaactgactgagaaagtcacctactctctgggtgatattcacaaaaccctgtattgggtactctactgatgaatttagtatgtttccttcaggaaagattttctctttatgcactgcccttaacatctatttcaccataaaccataactccactgaatgttctatttttttaaatactcatgggtatgtaaaaagagaacatgatcatttattacaatattctttttttttttttattatactttaagttttagggtacatgtgcacattgttcaggttagttacatatgtatacatgtgccatgctggtgcgctgcacccaccaacgtgtcatccagcattaggtatatctcccaatattcttttgttattaagaaaaataacaaatgacaatataaaagtcattaaaacacttagagattttgattgtggatatttgatttttgtccttataatttgggcttgatatcttattaaaaagaaaattagtgattgatggaccatttgcttttgatagtcaacttattctatcctagggtctttagctctagaaccatgcttctcagtgggatgtgggtatcataatcactttgggaagaatttcacaactcgcagtgttccattttggtgttgtcgaaatcatcacgtgaaagatgatcgggaatacccttgtagttgaacaggtttagttataatttattgcaagaccaagcatatatcatggagaaccatgtctcagtaagaggatctcggaaagaatttattataggatatgggttttggttgtgtgttttaggggagggtccatagagtcgggctcacgcggaattggatgctgtcagaaagcagagttaattctataataaggtaattctctaataaggcatttcaataagtcttgctgacaaaatggaagactagcacaaggataaatctgtgattagtaaagaagtccatcatattagccaagagaggaagtgcttggtacttttttttttttttgagacagggttttgctcttgttgtccaggctagagtgcaatgacgtgacctcagctcactgcagcctcagcctcccaggttgaagcaattctcctgcctcagcctcccaagtagctgggattacaagcatgcgccaccactcccggctaattttgtatttttagtggagacagagtttctccatgttggtcaggctggtctcaaactaacgacctcaggtgatgtgcctgccttggccttccaaagtgctgggattacaggcatgaggcaccgtgcccagccgcttggtactttttgaatggcacagtaaccttgttttctgtgcttagacgaaactatgaagtggccttacttggtcgattttttttgtggtctcagagtagtcttgtctgaggttggtattctgtgagaatgtttacgtgtaacagcagaatgaatgccaggctggcttctaaaggtcaagggctgcttgttttttcattcttcacagctaccctctgacctcctctctagcaaaactgtagtgactactaagctttaataacatatttcccagtttttgttacaaaatatttttatcatacagaaaaagtaaagataatgtattaagtaccatatatccatcaagcagcttaagaaataaatgattatagataaaagtattggagtatttctctgaaatcctaatccttcctaggagcgaattattaacttgaatttgatgtttatcattttcaagaataatgcatttcctcttcttttaaaaatacatatatatttattttttgtctccttttctagaaatttaataagatatagctttatttttattttgttttaattggcataaaataattatacaattatacatatttatggaaggtacatagtgatctttgatacataaaatgtttagtgatcagatagggggattagcatgtctatcatcttaaacatttatcatttctttgtgctgggaacattcaatatcctctttctagcattttgaaactatgtaatatattatcgttaactatagtcatcctacagtggtgtagaacactagaacttattcctcctattagctataattttgtatcctttaacaaatctccttatcaaagacctcttactttcctctacccttcccagcctctagtatcctctgttctgctttcaacttccaagagatcctttttttagcttccacatatgaatgagaacatgcaatgtttatctttctcttcttcgctatttcgcttaacataatgtcttccagtttcatccatgttgcagtgaatgatgggatatcatccttttttttttattattatactttaagttttagggaacatgtgcacaatgtgcaggttagttacatatgtatacatgtgccatgctggtgtgctgcacccactaactcgtcatttagcattaggtatatctcctaaagctatccctcccccctccccccaccccacaacagtccccagagtgtgatgttccccttcctgtgtccatgtgttctcattgttcaattcccacctatgagtgagaatatgcggcatttggtttttttgttcttgtgatagtttactgagaatgatgatttccaatttcatccatgtccctacaaaggacatgaactcatcattttttatggctgcatagtattccatggtgtatatgtgccacattttcttaatccagtctatcattgttggacatttgggttggttccaagtctttgctattgtgaatagtgccgcaataaacatacgtgtgcatgtgtctttatagcagtatgatttatagtcctttgggtatatacccagtaatgggatggctgggtcaaatggtatttctagttctagatccctgaggaatcgccacactgacttccacaatggttgaactagtttacagtcccaccaacagtgtaaaagtgttcctatttctccacatcctctccagcacctgttgtttcctgactttttaatgattgccattctaactgctgtgagatggtatctcattgtggttttgatttgcatttctctgacggccagtgatggtgagcattttttcatgtgttttttggctgcataaatgtcttcttttgagaagtgtctgttcatgtcctttgcccactttttgatggggttgtttttttcttgtaaatttgtttgagttcattgtagattctggatattagccctttgtcagatgagtaggttgcgaaaattttttcccatcttgtaggttgcctgttcactctgctgatagcttcttttgctgtgcagaagctctttagtttaattagatcccatttgtcaattttggcttttgttgccattgcttttggtgttttagacatgaagtccttgcccatgcctatgtcctgaatgctaatgcctaggttttattctagggtttttatggttttaggtctaacgtttaagtctttaatccatcttgaattaatttttgtgtaaggtgtaaggaagggatccagtttcagctttctacatatggctagccagttttcccagcaccatttactaaatagggaatcctttccccattgcttgtttttctcaggtttgtcaaagatcagatagttgtagatatgcggcattatttctgagggctctgttctgtaccattgatctatatctctgttttggtaccagtaccatgctgttttggttactgtagccttgtagtatagtttgaagtcaggtagcgtgatgcctccagctttgttcttttggcttatgattgacttggtgatgcgggctcctttttggttccatatgaactttaaagtagttttttccaattctgtgaagaaagtcattggtagcttgatggggatggcattgaatctataaattatcttgggcagtatggccattttcgtgatattgattcttcctacccatgagcatggaatgttcttccatttgtttgtattctcttttattttattgagcagtgatttgtagttctccttgaagaggtccatcacgtcccttgtaagttggattcctaggtattttattctctttgaagcaattgtgaatgggagttcactcatgatttggctctctgtttgtctgttattggtgtataagaatgcttgtgatttttgtagattgattttgtatcctgagactttgctgaagttgcttatcagcttaaggagattttgggctgagacgatggggttttctagatatacagtcatgtcttctgcaaacagggacaatttgacttcctcttttcctaattgaatacattttatttccttctgctgcctgatcaccgtggccagaacttccgacactatgttgaataggagtgtgagagagggcatccctgtcttgtgccagttttcaaagggaatgcttccagttttagcccattccatatgatattggctgtgggtttgtcatagatagctcttattattttgagatacgtcccatcaatacctaatttattgagagtttttagcatgaagcatcgttgaattttgtcaaaggccttttctgcctctattgagataatcatgtggtttttgtctttggttctgtttatatgctggattacatttattgatttgcgtatattgaaccagccttgcatcccaggaatgaagcccacttgatcatggtggataagctttttgatgtgctgctggattcggtttgccagtattttattgaggatttttgcatcaatgttcatcaaggatattggtctaaaattctcttttttggttgtgtgtctgcccggctttggtatcaggatgatgctggcctcataaaatgagttagggaggattccctctttttctattgattggaatagtttcagaaggaatggtaccagttcctccttgtacctctggtagaattcggctgtgaatccatcgggatatcatcctttttaaggctgagtactattccattgtgtacttatgccacattttctttaactgtttgtttgtttttgggcacctagactgattccatatcttggctattgtgcgtagtgttccagtaaacatgggatgcaaacgtctctttgatgtattgatttccttctcttcagataaatgtccaggagtgggttgctggatgctatttgtagtcttttgaggaacctccatactgttctccatagacactatcatagtttacgttcccactgacagtatatgagtttccttttccctgaatcctccccagcatttgttattttttatctttctgataacaaccatcctaactggggtgagatgatacatcacagtgattttgatttgcatttcccggatgattagtcacggtgagccttttttttttgttgtaattgttggacatttgagtgtcttttaattaggaactcaaacacctcaacagtaaaaaaagaaaaaaaaatgacttcaaaacagcaaaagacctaacgttaatatgtacttgtaaacttttttttattctgctgttgttttaagtaggagcttaagcattaaactacacgaagaatcatgagacaacctatacttcacacaaggtcataggacatacctttataagtactattaaacattataaatgaattttaatcacagagtcaagcactttgttcatttgttttcagtgtcctatggtgactttaatagcaggagcaatttgttggttttatttagcaagacattgggtggatttccattcttccctccacaggctgtgagaaagatttttgacactaactgagctgcttcaattggaaattcacattttatgcaataacaggccattttaatttcatgaagcaaaggattggcttctacttgcaaatagcactaaagaaagcagtgttgtcgaaagcagtagatagatctgttgaattaaatacaaggctttcattcctttcattctacatttccttataacgtaagcattaattaaacccatcagtgacttccttctttctggagaatgttttctgtctgacaagaaatgtcaacttagcgaatgagacctaccattaaaaacacactcacttggacttagagaaaagctgatgcatacccagggacagacttgcagaaagagaacccaagggacagttatcatcttttcttgcttttggtgatgggactaagtgtcttttgccttacttgaggtttcccgagaaaagcatacatagctgtattacatcttgtgttgttgtatcacctgatgtttacttgatgtattaaaaataaaagccaggaaaaaatgccacagtattttgaagttttaatgcaccttcacttatatgatgaggaacagagactaaatatcgggttcaacttaagtcaacatgtttggaatgttagatacactgatgtgctgtggcccagatagagttcatggggatggctggagaagtagatggaacaagcaccctgagatttgagcaaagtgttagagaagtgaaatctctaacgtctaccaaaagtccttagaatgcaatagtgacatttaacttctcattgcaggggaacacttaagaatctgtcctcaggaatatacatgctgcaccacagaaatggaagacaagttaagccaacaaagcaaactcgaatttgaaaaccttgtggaagagacaagccattttgtgcgcaccacttttgtgtccaggcataagaaatttgacggtaggtgaaatggttttcacttcagtttgttataggtgcacttttctatgagaatcttggtatcatatgaaaaatatttttttaaaaagggagcttttctatccctcttaaatatttatagcattgtctatttttagaaaaagcatgagttttcttgacagtaatttttttttttttagtaatatcttggtaaaacctggtttaacaaagagctgttttgcatttgtgctttgcctgtgagatttattgtaaagatttagctcaagttttcattattagaggaattataattcaggttttgttatactgcagcttgtctagttttcatatggggattctccttaaaaaataagcgtaatttaagattatttgaaatataacatcacatttgaagaggaaaggcttgttttaaatgtcagcaacacagattcctttattttagactttgccattgcaatcatatagcacattttacattgcagttatgcattctgtataaggtttagaccctcttttgatatcctgattataagcagtcaatgttatttctatattctatttgttaaataaacatttttatattacaaattacgactgaaatttcagcattgaattttcgcattagagcctgaatagtttgaaaatattcaaaagtagtttgattctttgtaagcagtatcaacaatgataacaataaatttagtatttttagaaggtgtgttgtctttagtgctctaagaaatgaatgtaccttaccatgatttcttgtaaaccagacttgcaccttgtggtgaaccttcttttggctccgttggtcctacaacattaccctagagcaaaagagctgctattaattttcttctctcagttcagtcaatgcacagcagagccagtttaggaaaggttggccaaagtttttatgtttcttttttattttctgtgtagtaggtaaaatgttccattttattgctgttttaaactattacagcaacactgatctttttcaaattggttctcaaagttacggaagacaggtctacctggtattttcagtacaaatgatgtgacactttctgtgtaagtgaccggagtttgatctttctgcaagtgtgtttcaacatcctcacattctgtctttggctctcccttgtgtataactatatgtggatgtatatgaaaataatttttatttagcggtgatgctgtgaatgttgttcccttaaatgcagctagggagtacttaggggttactcttgattataggttacaaatccagtgacattcagaagcccctgataggactctgtgtttggaggactacactctatcacttcaagctacagcaatttgagctgttttgtcatttgttacataaagcaggtgataatgatctgttgccagtgattttgacttgtgtctctgggaaaacaaacaaacaaagaaagaaacaagaaagaagctctactgtgtttataaagctgtactccaaagtgattttaaaataattccaggacagtattcatggtagatgatatatattctttaacaaaaaaatattaaatattaggtagctttatggagagttgacatttttaaaacaagtaaagcaattcaccaagactgagccggccaggcatggtggctcatgcctgtaatcccagcactttgggaggctgaggcgggtggatcatgaggtcaagagattgaggccatcctggccaacgtggtgaaaccccatctctactaaaaatacaaaaaaaaaaaaaaaaaaaaaattagctgggcgtggtgccaggcgcctgtagtcccagctactggggaggccaaggcaggagactcacttgaacctgggaggtggaggttgcagtgagccgagatcgtgccagtacactccagcctgggcaacagagtgagactctgtctcaaaacaaacaacaaaaacaaaaccaacaaaacaaaacaagacgagccttatacttacttcttgtattatatcaataacttttaatatctttgcatctatagtttctaatcccacatctggtttgtcttattaaagaaacctctctccactctctcacttactccctccctataggtatataggtatactttgaattgttctaatgtgcctaagggtatgatgtcaatcagtttgacaggacattgattttgctaagattagatctgacctaagggaggatgaattctttagcaaccactcatcttattgcagttgcattgagttggatgggagagaaattaagattttgttttttttggaggctttcagccagagtgggaaaaaaaaaaagagaatctaaatgtgattctaataatctcaactcctgaagcacttagacttaataataataataataatcatcatcatcatcaattaaaaagtcactgtcacaatttctgctattttctctgggcagattcatgagggtcagttatacactggtatgatttattttcttttgtctcaaaggtgagcctgctaagtcaccttccatgagtgattgtgcattcatgtgggtagttttccatttgttcctttcttcctcccaaatactctctcatgtcacttattgatgaatgtcagtttgatgtgagcacaaaagaagtatctaggtccagttatggaatgttaccctctttgagttttattttcccacataaaaccaatggtactataaaagactttgagtttatttttagtaacttcctatttggttagtcattttgcatcattgctggagtctcttcatccatcttgtctattttgaggttcttcctctgtttctgctttctcagaggtcttaatttgtcatttggattgtgtatgtctttgttggctatatactgtttatgaaaaaccactgcttaattaaaattaagaaaggttgatgacttttctttctatttttattaagtacagcagcaatttaaattgcatacatgtgatccagtccaagatatattcagagaagctgaagtcaatcactggtaatgattaatctctggttatcacttttcttactgtatgagaaatgctttgattccatttaactttttattttgtggcagtggtgactgttttgaaaatttgagattccaatacggttaacttaaaaccatattctatttattgtcttactttctctgtcttttttaaattgatattttgataacatttagaagagacactataattttataatttgtaaaattataaatactcatcggatggtaggaagttaaagtggaatcagtacgagttattacccaaccttcctaagtttctatgcttagctccaggattagcctagcattcatacctgagaggcaacaaattttagaaatacataatatcaattccagaaattttaattctttggcagagaattttctcatagctgtatatcttttttaagtttttgaatatagaattaaaatgtcatgataaaagtctatgtaatagaggtttcttgacattgcttctccaagggtctgacaaggtatttgttgttttgctttttttcttatttctccagccaaatctcaatttctggctctcattacacatccctgtaagcctcttatcctttggtctgggtcctggccactgcaaaagttctccctgaactatgcagggatgttctcaatatgctctgtagccaagcccagcttttctgttgctccccaggattaaaattttggatggatgaagacccaatctagtacatcaggcagaatgatcacattactcccttccttctcaccttcctctcctctgccaaacaccccaggcaacaataaacaaaagcatattaaaacgtagacaaggggagagtcatctttgtgtactcactcatttttagtatttttgtgtttagtgattagcctgtcaaattggcatttgtgtctaagtcctcttttgctgttggctaccaagtagctcacgtgtaagaggaaatggagaacaggcaaatattcagctagtagtagtagtcataagaggcaacatctgaccctgttccctgcccttcatggatttttaaccctaggtatttgaggcaaactgcagtgcagtcacgcagatgttataataaatggcagagtcaggattccatcccaggctgagcactcctggatctctgctctgagccacctaccacatcatctctccagtgctttccagttcccagatgtgctggcgtcttgtggtcaacaccgcctatccctctatctcaccctgctgggcctgtcctgtcctagttattgtggggaggatgtggaaatgactgtcaaggaaaagtggaagatttgtttttaactcctacaaaaaaaaaaattacccacctaaatatagtccagccctcaaggaatctggagatttgacagggtaaatgacttgccaagtttccactaagaatgatgaatccaagactgaaacctaatacttaaatcaaaattagaaatagtcatgttatatataggaagtcaatacttggttgaaattctcaatttctatttcttttgaatggatactgttgaaaaattattgatatttctttaaaagggcagtagaaatattggtgggtaaagaatctacccatatctttgagaaaggcaggaacagtattaaattggaatttgtccctaaattaaagaggaatgggtgttttttgtaaaagcctttgttgaatcaatgaagatgtattattattattattttttacctcacaaagcctagtggtttctgtcttgatgttggcactaacaccctatcctccaagaatgtctgtggaatatggattattcagaggcaggagaatttaattgaagggatattttgtttaggttctttttcctttggatttatttgagctgaaatatattcacatttggagctccatatgaagttttttgtttatgtgttcttggtcttattattttactttccttcctggcttttattaatgtattttaatgatatacatatgtccagaaattttggcagccagtacatttttaaaagcaaaataaaaatattgaacagtaagttctatccttatgaagaacttattctatagtaacacctgcagactacccattgaactggatgcagaaataatttatatacaatgacataatatttttacactgcaaatctgcttgtgttttgtttttaagtatcatttctcatctatatactgtagaggtggcaataacgtaatgatttttttaatatatggcctaattttctcagagaatacacttatttgaaaaggaaaaaaccctaaataggtttccatatggtgatagcatctttcacatttcttgtcacaagggtgatattttttgtatgtgtgtgtgatttctatttgaaaacattcatttagagcctaccatagagaaggcacttaaccaagtattgttgtagattaaaaaatgactaataatgactaaaatttggtcattgcctgtcaaggagtttacgttttgggggagacataagtataaacctaagagtaagaaaggcagaattacttgtatcctaaagtagaagtccattgcaaagaggagggaggaaagttttctatgtagtggcatccaagaagactttttggaagagcttgcagttcagtattcaaagaatgtcttaagattatgataattaaagaagtcccaggacgagacaaaatgaatcaaagattttgtatgcaagtccacaaagtctgtcagacatattgtaaataatttaccattgattttattttcaacaatgttaatgtattgacatttagcatatatctgttagatagatattctatcacaatgttttattccttgcaccagccctttactgttttctaacaaaaaaaaaaaaacacaatttcagggcataaacaagaagtgtttatttttccgtagtacatctttgggttgactagagattggctgttctaagatgtgctcatgcaggcttgactctaaactatgcatttagagtcattttgttctggtctggtctacacgtaggttattcttttgaaagcagtactctgtcttaagcatgttcttctcttagtggagtttggagatgctaatatcgacaggtggaggcagaatgctccttaaagtctaaactagaattgccacactgtcttcctaaggttcataagccaaaggaaatctcatggcaatttccaacattagtgggacaagagattatactactcccaaggaagtggaggtggggaaaggaatgattatttctgtatcataatctaccatagtccttaagtgactgcctcttgctacttcccaatgttttactaatcacattgacttttaaaaaatagattccctaggaattcaagaaaaatacttattttctaaataaatcacagcaagacagacacaattgtctcactacccccaatatcctaacacactaacaaatacgtgtataatcatacacacacaaacactacaacatacacccctctatgatgttattaatgttatacagataaatagatgtaatatttctgtggattgtgctgcggctgtcctaaatcattgcacagaattataggtaactgcaattcatagggcttataatgttaatcattctaggaagtaattagctgaatgccttctgtacatttgctaggctaccagctcagcgacatgtattccatctgaaggacactcttcttgaaatcagaatgcgctgaactgagttttagaaattagagaagcagtctcactggcatgggaaagtaatctgccaatttcccaaagggcagatcttccaaaaataaaaatcgtccaattagagattttggctttgacagagctattgaacaggtttgtaaatcacaaacgcctttcaagccttttgtttttacaatgctgaaagagaagatcctggtagggggtcctttaaatgtggtgcatgtagaacccagatctttgtacaactggaatatgccttccttctctcctcctcctcctcctcctcctcctttctctgtctctctgtctctctctctctctctctctctttctttctttgaactttgacagatctttcaaaactaaggctacacgctgctgatcatcagctctggcttcagtgatgaacttccaatctttttctaattctaagacccctaccacacacctcaaagtaacttgaaatacattatgctcccagtgtggttgtaatattatcatcttattatcaccaattcccttgcatggtggctttgctgagcagctgtttcacagacaagccaatttcttttaagtattgctctatcagactctgaaaccagttctaccagaagggttcttggtaatgaatgttaatgagcagacaagtatcctttctctgacagaggctcactaatcctttgagtaagtatgggtgaattacaggagaaattttatttaagttaaattgatctgctactaagtagagaaaacttattttcttattttaatgaaaatcaagaaaaaatatttaatggggatgtaaattacagctccctggaaacatttttgtcttctgactggagaacacagtagctcagtagactggttcaactgcatagtgtgcttaacactagcaaactcatgatctccagtgaggcctgatcttcagtgggacagtgggaaatggagtagaaaccactcactctctctgggatttggtaccagcagattctttatgttccttagtgataagtaatagggataaaaaattattctttcttcttccactgagccagtgtaagagttcctttttttttccaaaacaaataagatagtaaagccataagaacagcacttgtatgctttttgtattctaagaatatgagaaaaatgatttcagtgaacctttatctgaaaggatataaccatgtcctgatggaatactgcgatgggcaggtagaagggaatgagatgggccaggcgcagtggcttacgcctgtaatcccagcactttaggaggccgaggctggcagatcagaaggccaggagttcaagaccagcctggcccgcatggtgaaaccccgtctctactaaaaaaaatacaaaaaattagctgggcacgggggcatgcgcctgtaatcccagctactcgggaggctgaggcaggagaatcgcttgtacccaggaggcagaggttgcagtgagctgagattgtgccattgcactccagcctgggtgacaaagcgagactccatctcaaaaaaaaaaaaaaaaaaaaaaggagaggaatgagatgggcagaaagatgatcattgttgaagctggttgatgagtctttagggagttcatagactattctgggttgtgtatagtttctgaatttccataataaagagattaaaagagagagagaaagagagttggccagcacagtgcctcgtgcctgtaatcccacactttgggatgctgaggtggatcacctgaggtcaggagtttgagaccagcctggacaacatggtaaaactccgtctctactaaaaaaaaaaaaaaaaaatacaaaaattagccgggtgtagtggtgcaggcctgtaatcccagctactcaggaggctgaggcacaagaatcgcttgaacccagaagatggaggttgcagtgggccaagattgtgccacagcactccagcctgggcaacagagtgagactctgtcaaaaaaaaaaaaagagagagagagagctgacttgaacatacacaggactgaagatatccagactgtgaatccattgtacatacggaacaatgtcagcggttgttactgctctcaatttttgtatattcaacagtaaattatacagagcacgtcattttcaaattgcaaacctgaacacaacctataggattttgactcaattccaggctacttagcttatgctcccatccaatattctattattattgcgctggaaatgacatctctaatctatccacatgaacaggcctgttaaaatgaggcttaatctttaaatctccttggtaagtgtgattgaatttgttaaacttttgtttgtaagccatatggacatcaaaataaggaaaatatccaaacccgaactttggcaagattcaaatgacagtgtaaagtgtttattatcaaatgcattacaaataacatttccatatcattcagtagtcactcggtgatttttcactgaatgaccaacattgacatgagctcctggggtttggcattttagcaaatgtaaaaaaagaggtagctggcctaagccgttttctgtcattccaagcattcccttagacaagaacaggatcctgaacccaaatgtgaaggaagaaccagtgcccagctaagaataactgtgcatggtccacagtgctcagataaatttttaaaaatcactcatcacagtttcagaatgtgccatttgttattcttgcaaaaggtttgctatattcattaaacgaacaaatattcttgggaaaactatatatagtagtttacagtcttcacactgtttcctcccttcctagcagtccagtagaatataaacgacttgaacatgaaaagcaaactttgaagtaagatagcaggaaatcggggctccaaggcctttgaatgttggaagaaattggatttctccacgtattttgttttattttttaaaatttatttgcatgttttctccttttgaaagaatagttctgtggtcattacaggatttagttctctcagtcttcctgtctctttctccttaatgcttctagagttgacattttatcattttcacttatttaatgttcttgtaatagtattcttctaaaaactatgatccattgcatattccctgttgaagtctaagctcattaagttcagagattaggtctcctctttctattttatcttcctatacctgacttaatatgaagtatatttaataatgctgcagtgttgtgtgacaatggtagcaacctgtgcagtctcaagggcacagaccagttaaatgaattacttatattcctataataattatgacagaagaaaatagggaaccttgaattctcattatccattaactcttagggtccataaacctggaattcatatgtgatatcagcagcattggttccagtggatttaatggaactaattttaaattccccggacaaagagtgcctttacttagagtaaagcaagtagaggttcttatcataaaaaacaggataaacgtgtttttctccattgcaagtatgcacatatgcacagtcacacacacaggcgtgaataagaaatgtttaagatgtccatgaatttcctggagaatcagttaatatacagattgctgggttcaacaccagagatgaccattctttggtctggactgaactcagaaaggatctcctgttctgaagcgagtgttctctgctccaccacacttaacactggcttacgtggaattgagaggttagttagcaggatgtagagctggggcaaagaaatttgacagaagtttttgaatctttcttctgacatattaaggtcagccagtaacaggcctccatatctaaggtggcattcaagaacctgttgcccgtcaaataatgacttttatatgttaactaagttacccctttttcttttcaattttgacagtgaattatacaattatacccaagatcaacaactcattttaacttttgcagatgtatactgtggatttttgcatttttaagtttatgaactacacaattattatcctttttccatttattttctagttcataaggacctaatgtgtgtttatttttcacaattggtaaaatactttttaatttttgggttacttttttttgctaggatgatatgttttgaagcgcagtatcttattttatttttttatttttaatttttgtgggtaaatagtgtgtgtgtgtgtgtgtgtgtatgtatgtatatgtatatatatatatatatatatatattttgggggtacatgagatgttttgatacaggcatgcagtgtgaaataagcacatcatggagaatggagtatccatcccctcaagcatttattctttgagttacaggcagtccagttacactgtaagttattttaaaatatacagttaagttacagttgactatagtcactctgttgtgctatcaaataataggttttatttattctttctataataattttttttttaacctgttagccagccccacctctccaccactcactcgctgcccgtcactccccttcccaacctctggtaaccacccttctactgtgtccatgagttcaattgtatttatttttagatcctacaaatgaatgagaacatatgatgtttgtctttctgcgcctggcttatttcactgaacataatgatcttcagttccatccatattattgcaaatgactggatctcattctttttgtggctgaatagtactccattgtgtaactatattttttcatagcacactttgattcaaacataaggtatggttattgtagaaaacttgtataatttaactttaatgtgttaaaggattaaaatgactttatgcctaattgaaggaaaagtgcctgatctctaaggaatctgggataaggatgtaatgtaaaattattaatatttggtgtcatgaaactttattcaaataacttctgaaaaaataaaataaattggaagtcttaattcctgtgttaaatagtttataattataaaatgaaaagtagaatacagtctctgtgagcatgagggaatttcctattttctgggtataatattccctccacacatactttatgatattttgtcagtacaacttcggactgctttttccataattgagttggttgtctctatttagagtacaagtagaagcctacagcaatataaatctgaagatctgtgtaatatattatgattgatgttaaaaaaaataggttaaggaagtacttacgtaaattcttccattaagtaatgatttaagcaaagtagagatttaaggaagataaaaacatacaataagaactgtttaaaatgttcttcttgaccactagtccaaggtttactgactttgttcccttgatcattagaccagccaggcttgttctcattctctgggcagtggctgaaaaccttttactaagagaagtagcttctaagaatatcttcagcccttgagggttccaagtccccctacaaatagcagattagcaatcagtgaaaaccttctgttagttccacgacttagcttctgtctggcgcatagaactccaaaacgtattctgaaactgaagaagtttgggggccagttttaactaatataagttttatatatttttaaattactagccacattcccaaaatgtattggtattttttttcttccaatggctgagattatttttctgctttctaattctaaattaggcatttcttattttttcccatgtagattctagatgccttaaacagtctacagtcttttcttcattcattctccatagttggggaagggtctttatctatgacattatgtcaagttttatttagaaaaattttagccatgtaaatagcacaggccttggatcttcacagaatgtgtttcaagtataggaggtgcgttgtattgacaaaatgatcttgtaagtttcttaaactctctgggaaaaaaatttagtttttcatttgtaaaataagtataataatacctgttttgaaactacgatatacataaaaagcctagcataagtctagcaaagagtgcgcttgtaatatatgagggttcacctctgctcttcatcctcatcactgtcatagtgctcactttcttacctataaggaccctgacagtcctatagagccacttagataagagcataaataactggaatgctgatcggtaccatgaattaaaatgcagataaaatcatggaagagaatgaaattatttcttgacaagaagactataaatggctttgtgaaaagacagaatgtaaactgtcttgaaggttaggaaggattcgaaacatggaaataggattgaaggcatggagatgggaaattactagtgatacagtgatacagaggatactttgtttccatgatgaaacaaagcttgaaccaaagtgaagtgtatccattattaaggtccttgaatatgtttcaaaagtagaaaattaagtctattctctgaaaatcaatgggagtgcttgtttattttcatttaaataattgaattgactgtggagtttgaagttatggagacacaaatttaaatccctgttgaacaacgactaacaggtttacactgtggggtttgttgtgtttaattgatggctgacagcaggcatgcggtttagagagcaaaatatgctcaagtggttccgtatatcctttagtgtgtgtgtttgtataacactatttttaaataaacagtgtgctcctgagagtctatcactgagttaggtttttatatggtctatgtatgagaatttttatatgtggccactacaatagtggccctcccttcaaagcccatgcaacaaacattcagcagtggttgtggggagtggtaggttcaagagtagacttttcttgtcctatgctattctacttttcagatttctcgccaaagtgaatatgaactgtgttatcacaaaaatgggtaggtgcttcatctgattatgaaaatgaacattaagttgatatctctcagaaggccgtgctgtgtataccacatctcagtatgtgaaatcagttgtctttctaaaattttctcatgataatatcctgttccaatttcaaaggcaaatgtctattgaaattgctaaatttcatgtgttatacttgtaaaatgttatatttctttcaaatatcttgcataaagttttcccccacagtattatacacaaatatataggacaaggatcctactatgtatattctaaccaacaaccgtgctgggcacatgattgatgataattgcccagtacatgtaatgaattgaattttctcagtaacaatttagtacacaattgacttagtatatggatcactagggatggatgaatacaaacaaattctgcactcaattttttcagatcactgaaaatcccagagcctctagagctctgttgaagtctactttataaaaagacatgaatatttacttactatacatttatacagcgtttattaagtagctattgattgttcatagttgccttctcagcaaccttaaatcctcatagaaaatgcataattcttaaaggcagctaacatctccattttttcaagttattaagaatggagtgaatacacagtagcatggggtacccttggcatgatgccacgggtgaatgcagaatgcatcacgggatgactaatcccatttctttatcctaaggttcactaactgtggttaatattgagccaagtttatttgtgcagtttttgaagaggccaagacattaagattccttagaataaacatcatctgggcatcacctgcacacctaaatggatttattgccaatgagtaatgctgtgccttcgctgcacagtctacacagaaaatgtcagaactcaataaaaacagtgcaacagtcttctgattgagtttgtattaaggtctctttattggattaatccggttcttttctcttcctttcctcatctgaatgaaacatattttaagggccattcattttagatgaagttgaggaaagtattttaaaaaaggaaaaaaataatggatttgcagttaggctcactcctttaatcccagcactttgggaggccaaggtaggtggatcacttgagcccaggaatttgagaccagcctgaacaacacagcgaaacagtatctctaccaaaaaaaaaaaaaaaaaaaattaaccaagtgttgtggtgtgtgcctgtcctgtagtcccagttactctgtaggctgagtggggaggatcacttcagcccaggaggtccaggctgcagtgacccatgatcacaccactgcactgtagcctgggcaacagagtgagaccctgtgtccagcaaacaaacaaaatatattgccttccttgttagaattttgcttaataccttggccgggagcggtggctcatgcctgtaatcccagcactttgagaggccaaggcgggcggatcatgaggtcaggagatcgagaacatcctggctaacactgtgaaaccgcgtctgtactaaaaatacaaaaaattatgagccgagatcatgacactgcactccagcctgggcgacagagcgagactccgcctccaaaaaaaaaaaaaaaagaattttgctcaatatccagcataaccctgttaattttgtgggaacataataaaagctactttgataacaaagcagaaaaatcagctgtttgtcttcttgcgcatgtcaaaccttaaatttggctgtgttttctgctctcttccccagtaacttcatttttaagcctctttcttatgtatttgaacaacaatcaagaaaaataacattgttgtgaaataccttaacctcacatgtgacgtctctttaaaataagtaatataatgaaagcaagcaagcaccggtaatctttagaaaggctaaataacttgagtggtaatgactaatgatcttttttgtcttcacaaaatatttcttgccatttaaacaaacatctgcatgtggagtaaagcatattgatagatagccaacatttcacattcagtgaagaactctttcctttatcctaagtgataatagtaaatttaaagactaattaatttctttcactggaataataagttctgggaaaatatcagatattttaaacattggaagtgaagagaaagttgcatctatgaaaaaataatttttagtaagattgatacacatttatatcaataattgcatactatatccctatcgatatatatatatatatatatatttgttgcagttcttatattctaatactgttttcttttccattttccccaggaaacaaaaatgaacatgatcctaaattacactttatatttcacatccgctaatagggctggtattgggaaacagtgccaaatatacaagagccgagcagttttctatttgagtatttgtttgcaaaacaagcccaggctaatggaggatcatttgtaggaagctaagtcatgctgggtgctcattgataacttagaaagactctctagtttgcattcccccaacccccagttggagatagtcatatgtgtttcaattaaaatatccatttacttccagctggcaacgttagtatccattctaccgacagagagcaaaggtcacaggctcctgcctgagcagacattttaaaaaatatgccatttgccttccttgtgaagatacctttgagccacccattgcaggcttggggagaagattttgaagggtcaaattgcatggggactttcaccttatttactgatatagctttagtagctgttggtccagatgctgcaactgctgttgctttgtggattgggattcagcagcagctgttgttctttgctacagcgtgtttctgaaattcaaaatttaatagtctgagaccctagtcattgaaaactatgctgaaagttaatttgctgaatccaagtttattttcctgctaagccatagtttgtgatggagcctttcccttgtgatgcataataaaatgaagaaaggccttatttagtgccgttaccagactcaagcaggagagaatgcagtagttacagagccgggcgtgggctttgctgccttgtaattcggccttactcacatttttagaatttcaaatctagatccctttatgcaagatatttgaaacaaatataacattttaaacgtataacatatgaaatttagcaatttcaatacacatttgcctttgaaattgaaacaggatactatcatgagaaaagtttagaaagacaactagatcttaacttcattgcatatagcaacctgatgaaactccagtttctctatctcaaaagattaaaaattaaattctaccatggagagttattgtgaattaaatgagataatatacataaagcacttattatcatctttgacacacaatttgcttttactatttttaccccactcatattacttttataagggttttctgataaagaaaaagctcctttgtttccttggttcatttctcagaagaaaattaattttcttgcccaataaatatgaaaattcctaatattcaaattcttgtagataatatttgttaagtaatactatgtgccaggccctattttaggtgctttacgtgtgttatccccttcagccatcacaaaaatcccatgaggtgggtgacatcattaccttttctgtttcatacttgaggaagttcttacttagaaacattaggaatttgcctgaggtcacatattacagacagaagtaggaattaatccagtctatacctgttaccaaaccctactttctccataaggaaaacaaatctaattaccttggaatgaagtatttgagctttgtttctgaaattaaatattctttcagcaatgggattctcaggcaactctaccattatggctttttccatttcctggagtctctagtgggtagacgaatttatactaataagtgataaatgttattttgtgaataagtctttgttttggcattctcacttcgacaatattggatatgatccacttaattatgaaaaaaaatgaaaatcttaagcttgacctgttcacatcaagatagacctagttatagatgccacaagtaaatcatggtgggagggatggggagtgggaaaacagtatttgggagatatagccaccaacagcgatccaaccaagcaacccatatccttgcaaagttaacagtagtatctaccaatatccagagttccagcactggagatgcagacaaaaatgatatgcaaatatgcacacagatacaaatgacccttggggagggggtgggaaaaacaaacaaacaaaacagccctgggcgcagaggcaggatcccagtttaacaggaaatcagagctcacatctgtagcttgatgtatgtaacatatatgaagatgagatctcagacacaataaacgagacaggaccaactggaactggcacttaaggttgcaactaaagagtagcaagtatagcatttgaaagtagaaattcttgagtcattccttggtaatgtcaagaaaaacgtctggagcctgggcagtacctgaagatgggagtctgagaatgaaagaaaaaaaaaaaaaagactaatcctgccagcagaaaattcatggtttgtctattcttaggaaattataaaaactctgtagcatggatagacttgcaagttgccagagttatattctaatgtataattttttttatttcaataggtttttggggaacaggtagtgtttggttacatgaataagttcttcagtggtgatttctgagattttcgtgcacccttcaccgaagcactataccctgtacccaatgagtagtcttttttaatataaaactttgagatatatttctttatatttcatactttagctcacatttttcacacaaaattttattagatattttatactttaactcataaaggaaatggtataatacatgataacgtttccattaagactaaggatgaaatagttaaaacttgtaaagattctgtaaaaccttaaaaaagagtaacctttatttcattaatatttaactttttttcctaatcctagtaaatatcatgtaaactttctgtgtactcaaaccttgctttaaatgtcagcagatattgtatttatatatacatgaaggagtcatatatataggtaactggtaatggtatttgatttggggaatgaaaatagtctttgggagcagcaataagagaaaagtccttttgtaccttttgaatatttgataatatatatgaattgaattacctattaaaatattttaaagaagaacaatgcagcaatgctaaagaaaactgaaaatcttcaaattcagttatttacaagacgctagaagcaggttgtgaaagtcttttgcttttctacaccccactttcaatttaaaagtgaccatgttcacgtcaaaaccaatgttaaagcacttctaatttcagtgaaataattttttttcccttcttctgaagaacactttttaccttctatgaagtgaatgactgtgacatttggatgttgcagagtttcttgttaagtatattttgtacatgaattacttccaggaaaaggtcagttcaatgtttaaagatttttcatacaaaataactaaaacagacctcttaggaattgcccactcctcacccctgttattaataccctaagtctatttgttaattctctgctgttgttttaaatatttacaaatttccctatccttttctgtgccgtttcaaaatataaacttagtttttcttaacctgaaaccttagatagtaaaaaagaaaacaaaaaacattccctcagaatgtagcatttttgtcaatttccctttttcaacattgtcaaaatgttggatttcattgtaatttgcctgcaagtctctgtctttatattcagttttatttttttctcccacttgcccccaacttcacagactgtgaacctgacttcagtgcctttaacttccatggacctgtgtctccatttctgccctccctttatctgttgaaaggggggagaagcagcactcagtgtaacattctgtaattttcgacttcaattatgtacctgctccacctcagcaggtgttggccccactgcaattggggaaatgaaaagcgtgcaaggaaaacatagaaagaaatgtgtggggtctggttcattgcttatatggcaacattttaacaataaacttgtttcttggataaaggaatatatattctttggattaacaaatttaaacttctcactcaactctttgccttttccaataattgagagtatcttgatcgtttcttcattaggaagtgtctgctttcttgattctcaaggacgtcattcctcaattgggctttgaaaaagtgtgttgatatttctttttatctaaggaccctcagcatctttacaaatatagactccttaaaaacacatctggtcagctgggcacggtggctcacacctttaatcccagcactttgggaggctaaagcaggtggatcacgaggtcaagagttcaagacaagcctgaccaacatagtgaaaccccatctctactaaaaatacaaaaattagctgggcttagtggcacgtgcctgtaatcccagctacttgggaggctggggcaggagaatcacttgaacccgggaggcggaggttgcagtgagctgagatcgcaccactgcattccagcctgggtgacagggtgagactctgtctcaaaacaaacaaacaaaaaaaaaaaagaaaaaaaaaacacatctggtcactatagttgcttcagtgaattcagagagaaatgaacaacaaaaaaatatagtgagtgaattaccttttgatgatacgtggccttatggctgaactaagaccataaactgatagtaagcaactcctacctgaacataaggcactgccatctgcatttaagagattggagaaatgaagaggcagagatatgctgtaaaatttttatgtttccttgtaataatcatgctgcaagccactgataactgcaagagcagttactacctaaatgttattcagtagcttatgaagatattttgataggtactattctttcaaagttaagtccttaaacatgtgctaatgaaacacactgaatattgttagtgtttttatataaaaagcatttttaatgacaacgtcaaataaatttcactctattaaatatgatagtgctccactgataacacttttagaaagtaattagtaattcagcatgttcagggaatccctccttctcttcagagatgcatgtgtaaggtgaatgcaacaaaatgaaaaatctagttgtcaagttggagaaagtttttttttttttgcttgtttttttttatgacttttttttctttttgttattatactttaatttcagggatacatgtgcagaacatgcaggtttgttacataggtaagcatgtgccatggtggtttgctgcaaccatcaacccgtcatctacattaggtatttctcctaaagctatccctccccttgccccctccccttgacaggccctggtgtgtgatgttcccctccctgtacccatatgttctcattgttcaactcccagttaggagtgagaacatgtactgtttggttttctgttcctgtgttagtttgctgagaatgatggtttcaggcttcatccatgtccctgaaaagagcatgaactcattcttttttacggctgcatagtattccatggtgtatacgtgccacattttctttatccagtctatcattgatgggcatttgggttggttccaagtctttgttattgtgaacagtgctgtaataaccatacgtgtgcatgtgtctttatagtagaatgatttataatcctttgagtatatacccagtaatgggatcactgggtcaaacgatatttctagttctagatccttgaggaattgccacgctgtcttccacaatggttgaactaatttacacttccatcaacagtcgtattaacaattacaataataatacaatatgtgctgtaatagacacacaggccatattctggaaacaatgaagatggagtgactaccttgtttgtttgagtcaaaggagttcttagcagagctgatggactctattgaattttagcatgagaatagcaatttactaggagttaaagattatttgaagtagcgcataagggataaaatatgtaaaaatttttaaatacatttggcccctacaacattttgttagacataaaataatcttgttagcctattgttctattgaaacttttttttttgtatttttctttttttagtagagacagggtgtcaccatcttagccaggatggtctcgatctcctgacctcatgatctgcccgcctcggcctcccaaagcactgggattacaggtgtgagcctctgcacccggcctattgaaacactgtttaggagatattttatattcaaaacattttgaatacactatacttcttttagattagaaatttatatttcagtacattgcttctgagataaacttgaaataccagttaaattttaccctatttattgttagaataaaactgtcatcttagattggtcaacagatatttgctttataagcacagaaattaggctttttagacctagttattctatagaaattagtggttcagctggtttggtggctcaccatggtcatacatagactcattgttcctttggcagtccataacatgccaagctcatagttttaccccaccatgacccaagaatagcaacttgatgttctaagagaaaccaataatacagattccttgatagtgctatttataggtggtatggtttagttcatcagcataaggacaatggaaactttctataagtgaatggcatttaactgagaagatgcatccatttgagtgtgtctttcaagatgcatcttctaaactttgaagggattcagatactccctccaaagatgtactagttacctccacttaccaagtaataggctgcctacattttttattccacttttagaagtattcattgtggctttttgtaactatgagattaatattaaatcttattaactagggaaagataacgagtatatctctctttttaattgttatgttcaggcatgctctcggtcccacaaaacttttgattttgatgagcagagtacatgcccaacatgattttgattccttaatactgattatattgaactggtgagcaaatatctcccttggagatgtcaagctcaagagcaatagatgctgaggtagaagggaagagaaagacagaatttatgcgactgttctatacacataccatgaggaacaaagaggggagaaagttaaaggaaacagtcactggggcagaaaccacaaaaataaggcagtgaataaaagagaagatatccagagttgagagctgagctgtactgccatgaaaatctagctcggtgtgagacctctgcacatccttacaacaaatatctacaacttaaagtaacctgaggctgtctctgtctggcatactaaaagaagatgacccatccagtttaatcatatactacgattttaagacattgatttcatcagtatttctaaaactaatgattctcttcattaactgattattaccacctttagactagaatctgcttgctcctgtgtttctttgccttttcatgttttagttttatctatgcatcccagcctacttattggaggtagatagaggattggagagttgcaaagatagggaaaggaacttgtatcaagtccaggcataactgccactacctccagtcctgatgtgcatctacaaagaacgctttagcatatgggtagagcctaacacaagacttttttcaaagatcttaaggctagttttgtttgaaatattttgataccttcatttacatagaatggattttgaacctaccataattgtagacctgaacatgatataatagtctttattcctgaagataaataagattataattaactgtgggatcattaatggactagaacactagtcaacaataaaaaagagggttaacacaatgtaacagcacttgtctgattcgtaagtcatttggctcttgcacttaatcacatgaccctaagaagtcatttaacttatttgagccttagtttacacacttgtcacttggggataatgttaatacatataaaggaattcatctatgtggcattaaagagaatttcaatcaacttcctcattcttgatctgatcactgataagattgaacttgagaaaacatagaaatcctcatttttaaaacctcactgctcaaagtaaagtaagcaagagtaggcaaccaccaggagcgaatgaacatctcattctctatggttgtaggtcactgtcctaggatctagcaatttgtttccctaagaaaactaagttatcttcataacttagttatcttaataactaatattaatagcatattaataactcattaacatcaagaagaaaagagaaaaatctcttttatttgttaaatgttatttgtatactttttgtacatgacaatatgccttatgaataatttcaaaaaatataggtgataaagttaccaattataataaaaatatcctattcagaatttgtgtgaaaataaattaagatatcttgtgtaagtgcgtgtgtttgaattaccttcaaaatataaagtatctttatacctgttggacacaataaggactacccatgatattaattgaatcggtcattactcattgttaatctcttgactatcttaagatttatttttgtaaatataccacattatttaatgtcactgaatattttgatggtgctgttccaatatcaaataactgccagagttttagagaaagcttgcctttcatgcatatttaagtttccattgtacttcagctcatcctaaagaaagatattgccattaaccatatatccttgcaatagcagttatgtctgaaagaagtaatgtgcagtagaatatgcagcataaatgtctatacttctgtattaattattgacccaaggttaaatgtatgcacatgaatgctgatgttcttggttgtaatgggttgaatttaattacttatttattcctttgttgttatcagtacccactagtgaatacctaccttaagtaaatctactgcttgttcatcaatacatgggaaaacaccagcattatggcacagatgtttatgtattatgcagagttattttatcgacttacaaaaggcaatgctaatggccatgccattcgatgttctataaatagtcatttttgaatgtgaaaatgtgaagatgagagacaaagagagcatatactaggcatcaagcactgtattagaaaagtgaatgttttctgttctgctctgtggagtaggtaaagcagaaacagttgagtgagtagatatcacaggaagtaagatttctacatataacaaagaactttttcacacagttagagctgcctttgggaattctgaatttgccaacattggacgcatttacaaagaagctacatttgtttttcaggtatgttttaaagcagtagttttcagattatttgcaaaatgaaacaattctttcaaatggaatattacacaaaaatccaatctctaatactgagagaaacaatagaacataaatataaatttgtcttataattaatattaacaataatttacttactcgtaattcaattattggtttgacgagagtcctgatgttggtctccagtatgttaaaatctgggatttaacatttttcagtgtgtgtagtgtttgtcttattacatatatatatattttttaattgtgaaattctaatcaagcatttgagtcacctatgaagtcctggaatattgttctaatatcagcgttgcagaaagaagtcctgccctgtattgagtggaagaggtaacagggagatctagatttggctcatcactgccaactttctctaacattctcgtcccaagcctagctctcaatgcgcaaacaggcatacatgtacacgtgtgcacatacatacatgcacactacttaaggctgccctagtttgaaagctctgattctgctgattaactattcatacatgagaattaaatttagaatgttttcatttagggtaaatttgcatggagggaaatcttgttttaattatctcagctgaaattggttcacttaagattgtaatataccagaaaatcattatcaggaatttgttttatataattttatgcctcttacaaatttataacttcagaaatccatttactttacaatgactgtttcaagatgtgatattgtagttgtaacagaatctgcatgaaggaactaagaccacagggaaggatttaactattttgatttaatgatgtgactaaaattcattttttaaagtcttaataaagagatgcagactctaattgctgattaacacattgtttttctctaagcccttcacatggaatataatttgaaggtcgtgataacctctcatccacagtttttcactgcctttgcttatataggtattttcttcatgttttagatgggaaagggaacagaggttttggatgactagataattttctggtgaacgagcacaatggtccattttattcacaaattaaacttcagaatattattgatttgctggtctcacatttgatactacttttcaaaaaatgatttcatattttaaaagacatgatctagttttaccattataactctgcaaagtggcattatttttgtcattttagaattgagataattgaatcttcaaactatagctgggccaagaagctcaatctgagcttacatctaagcctcctttcactggctcactgttgtcccagacttacaccatttgttcatcataaatgtgtaccagattcaattcaaggaaactgaggaagcacagtacctgtagactttcaggaagccctttgagcagtcttctgtgtgctactaaaggatataggttgggagtttatgactgttatgcatttgtggtgctttttatttttaacttgtgggagagttaattcatgattcagaaccatcatatatgtaccctttcacatcagaaatgtaggggacgcttggggataaaatgaaacaaatgagaacttggaatgatatataccagtggtccttaaactgtggttcccagatcagcagcatccacatcacaggtagcttgttagaagtacctgttcttgggccccatcccagatctgctaaacagatactcctaagggtatgaccccgcaatctgtgatgtgacaagtctaatgattttgatgcaggtgacagtttgacaaacattgctatagaattcttaagcttcaaggagtatttagaaacttatattattccatagaaaaataaaaactatagaaggatataaattctcagagatagtatacctaattggtttgtgaagattagttgaataagcagtcttttgtattttttctcacagaacgaacctttagatctcaatatactctttgttaagccagaactttatattttcagaacagttttgctctgtgcttgaactatgatcacaaaaaagtttctttttgctttttctttcatgttaaattccttgtatctcatgactatagaagaagaactaaattggcatagaacttcataaaagagagcccacaacattagaaagatagcaggtcagttaagatgaaattgtcctgggcacatcaggtcagaatcagatatcaactgaagtggtgaaggaggcaggggaaaaggttagagtatttcaagtcataatagcaagaatgttctgtaaaaagtcaatagatatctattgagtgcatattgtatgccatacaattttctaggcacttgagatatttatcagtgggaaaaaaagacaaagatccctgcttggataggttatattatattcagggatacagatggtatgtgatgaacactataaataggtaaattataatatacattagaaattgatagcattatggaataaatatttaaaaaaaacagaaagggaatgtggtgccaagatcgtaaatagcaatgttatggataatgtgtaaagtcacatgagacaggccctctttcaatagaatagatttatttagcaacttttagcaatggttgtatttgtagactgtatggtggctctgtctacatccagtactccccaaacctgatggattttaatatctgggaaactacaaaaaaaaaagtttaaattttattttaatggaaatggggcttttatatagaagagattttcaaaaccaaccaatcaaacagtaacaacaaaaacaaaacttgaacacacacctaggaaagcacgtaagtcgataaaatgagaaaaaagggttaggtactgggtaagattgagcaatcgagacctagttcattaataaattttagagccagatgcctcttttatgtagcttctggatcctgctgccaaaggtggctgtgttttaacaggaagcttcttcccccaacacacccacatataccaattaatactgataagtaattttgacaaaggacttcacgttttgcctttttttcttccctttctctgctcatccatttctacagcaaactgtggaaattaaacttaatctactgatgtgtgatccattgtctttaggagatcgtaaatgtcctctaacaggattgagttgagagacatgaggtgtctttctaagaaattggtcataataacacccgattgccaataatgctgtttttatgggaggtgttttttaatggcatatgttcaagtatcctacgaactttggtgtggatgtcttgtaatagttttgtgtaagagttttattttattgagatataatttgcataccgttagaggctgaattgtgtctcccaaaaaggtatgttaaagtcctaacctgtaatacctctcagaatatacccttatttgacaataagtttattgcagatgtaattagttaagatgaggttatactggagcaaagttaatccttaattcaatctgattaatagctttataagaaaagatagaaccacacaggcaaaaggctgctataagtgacgacagaggaagagattggtgtatcgtgtctacaagccaagattgagaaggattgctggcaaacactagacgctaggcagaaggggggaaggattattctttacatattttggagggagtatggccctgcttactttcttgattttggacccctagcctcctgaactgtgaggcaataaatttctgttctattaaggtgcccattttatcatgttttgttacatcagccctaggaaacgactacacatactaaaaatgcaaccatttgaagtgtatgatttaattatttttagtaatttacagagatgtgcaaccatcaccacaatccagttttagatcacttccattaccccccaaaaatctttcaggttggtttgctgtcaatgcccattatactccactgctatccccacacatcaactcatgtgcgttctgtctagagatttgctttttctgaatatttcatataaatagaattataaaacatacagtttttatttggtttattgaaattagcatattgttttagaggttcatccatatcagacttttattttgttaatgtcaaattaattttccccaagacaatctatgtatagtgacaaacccagggaagtgcttaatgtacttttttggccaaaaagaaagtgttcaatgaaaaggtgaattgttggccaggcacggtggctcatgcctgtaatcccagcattttgggaggccgaggcgggtggatcacctgaggtcaggagttcaagacaagcttgggcaacacggcgaaaccctgtctctactaaaaatacaaaaattagcagggtgtgatggtgcatgcctgtagtcccagctattcgggaggctgaggcagaatcgcttgaacccgggaggcggaggttggagtgagccaagattataccactgcactccagcctggggtatagaacgatactctgtctcaaaaaagaaacaaaaaggtgaattgtctattacatatgacttaaaactctattgatggggtagtcaaggagatattactccatgcctttcttaatgtagtgtttctaaaaccggagtgtgttacagaatcacttggagggcttgttagaatacacactgtggaccctcagtcccagagtttcagattcagtagatctgggctgggacccaagaatttacctgagtaacaagttcccagattatgctgctggtccatggagcatcctttgaaaatgactgtattaattgaaagccaatttagtagtattaggcctcttttatttctcatctctatcatttcctgccttcttctcagtgtcttataagtagaagagattaacctagagtagcttctagtccaagtacatctttgaaagctgtatttaagttttgataactatcatccatgccttctgaagaatattgcatctgccaagagcttttgctttgcagaataaaatttaaaaatcaatcagcttaatgtcatctctgtggtgcatgcttcttaagatcatagtcacttgtcctattttaagggagtctccaatctacaaagctgagagttgccagcaatgttttttcttctttttttcaaccaacaatttagtttgagtacccagttgcctaaatgcacaagactgtgcaagtcttcattgactctataataaacaatgctttttctttcttaattattattatttttggaatcaagacttaccattcacttacctttgcttgtatatgcttctttcccctttatatttaccccaactgaaagaacaacatgaatgcaattgtctcttctatttgttatgttgtgtgtagatttgttgctatagtgagagaaaagatttaaattgaataacattaatttaggaaagttttacagacagtacagaacagtgttagatccaggttttgtgagatctgaagattatataaatggagaaagagggagtcaatttttaattaaaagaagacaaaaaattatattttatgcacaatacaaaattttatattaagtgaatatttagaagaaaggaattataagaaatcaaacaaaaataaaagatcacagaatttggaggaatagcttttatttattaactgcctgacacatctgtataattctttttgcccttagtttttggctgtgtactctggtgatatcttcctatgacacaggttttttaatatttttatgcataaaatggaaagtaaatattgtcttttctctatcttggttgattgaaatttgccttttattattgatagttcagaaaaatttctttcaactttacagctcattattgatagtgtcatgctaacgtacaatttcctgaggtacaataaaacataaaattttaccccatgaccttcacggttcttaatagtgctactacaagctgaggccttgaaaacacaaattctgatgaatataatttcatataatttccatcaagaaagaatgtgtaatgcatttatcattgtatatattgcattgttgagtgtattatggacaggagagaacttgctttggattagacttcattaaggacaaaagattgcacttagaattttgtatcatgtcttatgattgaatgctttttatacaaatgcactttaactccgtgtatttgaaatacattttttcactcaatgctacccataaacttttggtgccaggcacaatgggacatgtttttgtgatgatgccatgatttctagactagtacttttcatatcatgagtccattgagtatgagtgttctaggaaaccattcctaaaccaacaacactaccaataacttaactttacacaaaagttatggggagcaacagaaatatatctcactgaaacaaaatcacaaatattcccaagtcaaatcccttttgcttaccttccaaaaatgcccacgggttctctaaaatcatctgacacaaagggaagtgtgggtaagaggaagttggagtggaaaagggaacattcttatgtaactgcagataaattatctcacttttgaaaattttacaaaagcacatggctatgtgatcatactgctgtgacttttcctagttctttgtgtgaaggccatggcttaagtatacattgactttgtgggaagtccacctctaccgctgctgttcaaaaatagatagcatttttttttcagattgtttgctgttggtatatgtaaatgttattgatttttgtatgttgattttgtgtcctgcaactttactgaatttatcaattctgacagttttttggtggagtctataggtttttctcaatataaggtcgtgtcgtttgcatacaaggctaatttgacttccagaaggaaaacaatttcaatctggatgcccgttatttctttctcttgcctaattgctctggccaggacttccaatcttatgttaaataagagtggtgaaagtggacatccttgtcttgttccagaacttgaaggaaaggctttcaagtttttcatgttcagtacgatgttggctgtgggtttgtcaacaggcctttattatgttgaggtatgttccttctataccaaatttgttgcgggtttttatcacaaaggcatgttgaattttatctaatacttttcagcatcaattgaaataattatatggttttcattcttggttctgtttatgtggtgtgtcatattcattgatttgcaaatgttgagccatccttggtatgaatcccagttgatcctagtgaatgatgtttttaatgttctgctgaatttggtttgctagtattttgttgaggatttttgcttctatgttcatcaataatattggcctgcagttttcttttttgttgttgtgtccttgtctggttttggtatcagggtaatgctggcttcataaaataaatttggaagtattccctcctgttcaattttttttaaaaagagtttcagtagaataggtattagctctttattttggtagaattcagcagggaagccacagttcctgggcttttctttgatgagagacttttattaccctttcagtcttgttatttattattagtttgttgaaattttctatttcttcatattctgtcttggtagaatttacgtctaggaatttattcattttcttctcagttttcaaatttgttggcatatattgttcatagtagtctctaatgattctttgtatttctatgatctcagttcttatgtctcttattttcattttttattttatttgggtctttttttcttagtctagctgtaagtttgttgatttttgtttatcttttcaaaaaaactacatttgttttgttttttttttcctgcaatttttaagtctcagtttcatttatttctgctctgatctttattactttttttccttctccgagttttctgtttgactttttcttgctttaatgggttccttgaggttcatttttaggttatttatttgaaatctttctacttttttgatgtctgtgtttattgttataaacttccctctcagtactacttttactgtatcccacagattttgatgtattgtttttccattttcatttgtttccagaaattttaaaattttcttttgaaatcctcttatttacagcaaagttgatgaaacttgaggtcattattttaagtgaataagtgaataagtcaaacacagaacatattatatgttctcatttatatgttggagctaaaaaactagatttcgtgaagatagagagtagattggtagctaccagaggctaggaaggagaggaagagaggaattgaaaagaggttaatgggtataaatatacagttagatagaagaaataagacgtggtgtttgataggtcagtagagtcactattattaatactactctagtgtacatttcaaaatggcttgaagaaaataattcaaatgttcctagcatagagaaaagataaatattgaaggtgatggatatgccaattatcctaatttgattctagtagtgtatcacatttttacatgtaccctgaaaatattgacatctgttatgtaccaataaaaaataataaaataaattttaaaaatagctcagaaatataatataggaaaagaagaagaaggaggagaaaaaggaggaggagaaggtggaagaggaggaagaggtgcagtagtacaagatttttttcagatgggagaaattatgtgtgtgaactatgagaggagggttaattcttcttcattttataaagttgtcctgactagacttgaaattacaatcagagatacagggctttctgtgatttgtattttgctgggattttaaagtataatttgggagggatagatgagaaaggagacttgattaagatgcttgaagtctacaattaaatttcatatgattttcagaagcaattttaaattgtttaggactcataagacgagatatgtcatgattagcatggtgactcacaaagacgattctcatctttgttggtaatagattggaagtaaatgatggagcccctcactgtgtgtggctccctccttacatgctttccagttttccattatccatagacccctaaaaagctttgcccaaaaatacacttttcaaaaagtgcccattttcttaggctatcaaaatattgtagaaaattcagaagtaaaatgtactctgcttatttctcattccttgtatgtcccagtcacttcaggctgctataacaaagtaccatagactgggtggtctgtaaacaacagtcatttatctctcacaattcaggaggctggtgcaagtccaagatcaaggcgcatgcagattcaaagtctgatgagggcctgcttcatggttcatgggccatcttctcactgtgacctcacctggtggaaagagcaaaataactctcttggggtctcttttatgagggtactaatctcattcatgagggctcatgacctattcatcttccaaaagccctaccaatgaataccatgacattgaaggttaggattttacatatgagttatagggggaaacaaacatttagtttataacatgtattatataacctacagatttgtatttaaaaaccttttatcactctgaaggagcacatgcagtcaccccgaagactacattatacacatagcaggtgtcctaatattgtcattaactatttgtctctcttttttctttataaccttttattcatgtaacagatacttattgagcacctattatgtgccacgtgctatggatacatctgtgaagtaaaacacataaaaataggtgtctttatggggcttatattttagcacattttactcctgagaacaaacaaaacatggccattttaatcttggttagatagcattatctgacttagcatttatctgacttcaaaattagtttatccttggaatataatttttcctttataattaaatgtaaatcatatttaatctcctattcatggtcaagtcagaggagttctaagttacaacaataatctgcattttaataaatatcattccagccagcatctattgcataacatgaaaatcgcatttttacaaaatgtattgttctgaatgtatagcttaccatataattaaatataaaagtgttttttttaattacttaaaggagcaaaaggatttgtcacattaaaagtatggagttttctgatgaggaaaataggcgattttgagccattataattgctttttaaattgtatttctaaaatataaccgctttttaaagttttcacttctaaaagacattttgcaagacactaaaggtcactcattgtaaaaactaaaaaggctgactctcaaatctacatgtgaatgtcatgcttcatatcaatgtcaatattcagcatctaactttcagaaaggcagagagaatgctgtatcattatgtattgagaatagcccaatatctgctagttatctatctttctttcctcatattgttgctacacctttcaacagataagaacactgaaatcagaaaaacacttctgtaaacttagaattagagccccaaataattttattaacaaaaccaacagatatataatattatctaaaataaaatctccgccaggtattgtggctcatgccctaatcccaacactttgagaggccaaggcaggtagattgcttgagtacaggagtttgagaccagcttgagaaacatggtgaaaacccatctctacaaaaatacaaaaatgagctatgcatggtggtgcactcctgtagtcttagctactcgggaggctgaggtgggagaatcgcttgagctagggaggagatcgcagtgagcgaagattgcgctgctgcactccagcctgggcaacagagagagaccctgtctcaaaagaaaaaaagaaaatctcagttgtaaggcagcaatacaaaacttagttatattaaatctatctgttgtggagagccacgacaattgtattcctaacttctcctttgctctctagaagcctgagggaaagatgttcttgagtatcatgatttctttttctttgaagcaaataggcatatcaattctagaagagaggcatggtatcatgaaattgttgctgaaaaccaccctgatgggtgtttttacataagatatcaggggttgttaagagcttaatgctatactgagattaaagaagttcctctgggtatgcagagagagacggttcacatgagaagcttttggattatctggtggtccagaatcaacaaaacttaaaaactaaattttttgaaggggaataaataattagcaatatcccttagaagaactctccttgttatttttagttttaaataacaatataagtgaaaatcttttgccaacaataaaattctatgcagatattaatgatcactattcctcttgatgccatgtttggttaggtttttagttagagattgaagttgtagaagaggacagagagcctatgtcatggagtaaaaattggaagaaagaaaaagctgtatgctctggaacagtgtttcccaaatgtttagatgtaaatgaccaagataagtcaatttcaaaatctggaaactggcatagtgccacctattcttcaaaattttgttaagcaaattaaaaggctacaatgtagattattaaccccatttcataggaagaacataatctatgatctagattattaaaaggctacaatgtagattattaaccccatttcataggagggacataatctcagatgaaagaacagacctttagattgaacatatttagcttgataaggtactctttatctttatttttctattttgctaaggcaacttggtacttggggatggattgagaatgctggtatttgggaatctccactgtaactcccagcctctgttagattggagtagcttcttaccaggttgtgtttaccttagtacagaattgcatttctatgactgtcaggcaggtggactgtcaaacgtgctaggaaaagcgaagtgaaacctgtcgttaagccttaagggtagccaatgcactttccagagaaggccccaagcttatacctagagacagttgtgcagttttccttggaaagtatttcagaatccgtgtagatgttcaaaaaataatgcagagttcttccccataaaacatgagatatcagagtgttcttaaaacacagaggtaaaaggctctaacacagtctcaccttaacaggtgatttactttattgatcagtgaagagcaccccagatagctaaatgagatggctgaatcttaagaaactgataggagtgtcccactgaatgacagagtattcttgaccccaaataaaggttgtgttgctgttattcagttgagttttagaacacaggtattcattacctaagtgacaaatgcatgctaccatctctcagcatttagtcgtctccttttctccctcctaagagtcaaccttctgtatctcttcccttcttattggttctgaatttgttttaaaagtaatgcacattgtgtgtgtgtgtgtgcgcgcgcgcgtgcgtatgtgtgtgtatgacaaacctgccttactaattgaagatacctcttttattttattttttttctttgagacagagtttcatttttgtttcccatgctggagtgcagtggcgcgatatcggctcaccgcaacctccgcctcccaggttcaagggattctcctgactcagcctcctgagtagttgggtacaggcgcctgccaccacacccagctgatttttatatttttagtagagatggagttccaccatgttggccaagctggtctcaagctcctgacctcaggtgatccaccgcctctgtctcccaaagtgctgggattacatgcgtgaaccaccacgcctggccccctctttttaatactatgaatattcttgtagtagttagaagctaagaaagtatattatatacggactaatagagagaacaaattcatgtgccttgtcaagtagcaaaccccgtagtgagaaatttagaactgatagggcagttttgacatcctaatcctttggtctctgtatcttcatccctcaaccactggaaagagagaaaagagccagagaaaacctcctactcatttcacatgtaaaatcaggagtggttcatactccgtgtacctacatcttagctacatggccgcataaagttggaaataggtctgggaaatgtatttcccacctgagcaagcatgtgcctcagtgaaattcaggagttctattaggaaagggaataatgaatattggtggaccaacaatagcctctcatctttcttctcaagagtcaagtacttattcccatggatcattctgagataacagcatcgaagaaacatagatcaaagagggtggtgtgctgtgagggtggaaatattttggggtgggtgactaataactttatttttaatgctgtgattttaaatgggaatgctactctatattgtaaaagctcaaagtcttcatcaggtatctttgggggggtcccagagaccattttcagggtcttgtgagctcaaagtggtatttgtaataattctaggacatcgttggctttttctcagtctcattctctcatgaatgtgcagtgtgctacatcagctctttgaaggataatggaatgtgtgtctgtgtatgcatctgtttaaacacttctcagtggtaatttctaatatgataagtagttttatagatatagcccacataaagaaaagctcttggggtccttgataatttttaagagtataaagagatccaataatcaaaaagcttgaaaatggttattctaaagtataatgcacgttaccatgttaccttctgaaagttttttttttttttttttttttttgagacagggtctctctgttccccaggctggagtgcattagtgtgatctcagcttactgcaacctccacctcctgggctcaaacaatcctctaaccttagtctccaaagtagctgggcctataggcatgcaccaccatgttcagcgaatttttttatttttttgtagatactgggtttcaccacattgcccagactagtcttgaactcctggactcaagggatctgctcactttggcctcccaaattgatgggattacaggcatgagccactgtacccggccaccttataaactttaaaatccaacctatttctttaacaagtcatttgattaaagacatttttaaaaatttatgaaaatattttttagctcagggtttagcatccaaatgctggttcgtgctgctaggaaaacattttcttgttgtgacaaccgatatgtgatgtagtttttcagtagcactttttagtatttttaggggtgctcaaaatcaaatcacgaacagaaattgacaattgcttttcagcttttctccttttatgaaaaacaatctctttttctcaggaaagttaaaggtttacagaagagtttgggttattaatgtttcctcattctacctggtatatgttaaaacacacacacacacatgcacaatttgaaattctataataacagttaatattggaatttttcagaattttctcagcattcagctagagtcttttcattttgacctaccatttcagtagatcaacagtgttttaaatgctgacattacatcactaagtgctgagatgtttgagaactgtttgccctcttagaaacctaataataaagtaaactttgattttagcttttacacttctagcattttcataccttaataattttggtcttcttcagtaattaatcttaaaagaaattttgaaggccttgaattaagaaacatatgtgcatccattaccttacaagacttttgagggggcacttctaaattatttttttatttctctaaattagaggacagaagtaaatttaagacaggcactggacattcagtggagagtaaatgtcagccaatgcacactaggcctaaactgcatcaacagctcattttaaaatgaagatatggctatgttatttgttataggaaaataaggaatttctcttgctactgtaccagaatcttagagcaggcactgtctaggatgaatatttttgtcttcagttttccttattttttactgtcagtttcttttttttttaacttgtaagttcaaggatacatgtgcaggtttgttacataggtaaacttgtatcatgggggtttgttgtacagattattccatcacccaggtattaagcctggtacccattagttatttttcctgatcctctccttcctgatctttaccctccaaaaggcccaagtgtgtgttgctcccctctatgtgtccatgtgttctcatcatttagctcccacttataagagagaagaaacactatttggtttactgtccctgtgttagtttgctaaagataatggcctccagctccatccatatccctgcaaaggacatgatctcattcattttatggctgcatagtattccatggtgtatatgtaccacattttctttatccagtctatcattgatgggcatttaggctgattccatatctttgctattgtgtagtgctgcaatgaacatacacatgtggaacagaacagagaacctggaaataagaccacacacccaaaactatttgctctttgacaaacctgacaaaaacaagcaatagagaaagtacttcctgttcaaaaaatggtgctgggataactggctagccatatgcagaagattgaaactggaccccttccttacaccatatgcaataagtaattcaaggtagattaaagacctaaatgtaaaacctcaaactgtataaaaaccctgggagacaacctatacaatacctgtcagttttatcaaattacagtaatttccaggctgcaagactaaaaacgttttgaaattgccaagaccttatcacaatacaagactagtttcatagtttatatgtcacacagaaatgttctatactatgatgttacagcttagcttcattcttaccaaatttactagtactggttattggggattctgtgaaatagacatatattcgtgtatatgtttcatggtgaaatgtttcagggtttggatatgtaatgttatttaatgtgtttttcattatgtgatcagcattacatggggcacttgagacagaatcagtctcatagtctaaggacctggtttttagcctgtatccctagtaggaggttgcatgtacttagacaagtgatttaaattgcttgcactgcaactttcttatctttgacatatgagatgtgcaattttgggcaagtcactatcctctctgggccttcgttttttgtcatctgtaaaatagggatataatattacttattatataatattttattatttagggatattatttacccctaataaagtagagacataatattacttattataggattgttggaagttatgagagttaatgtctctaaactgcatagagcaatgccaggcacatatacactataagcatgttacccgctattaccatctgtaaaatgaggtagttctctggatcagttctgaaacttcttctagcttttatatctttatttaattgaaggattaaaaagacaaactcatagtttcatatttttggtgggaaatcacatcaatttgttagcttggcccaaatatgattgttatggttcatgttgttgcttgcagggtccaccaggtgtcacagacctgtcctgcacagaggaggcaccttccccttgctctctgaccacaaaatgctccttttttcaggttcatgggaagatttttaggcaaaaattccgtggagtcctgctctcagtactcgacttgactgtcttacaagcctcttgttgcctcaagcccaaggaagtaacctcaggctgaaaggctttctagggctctttaacctcagagtggacacaaactcagatgtccatcaaacagctaagtccaagctttaaatactttacacagctgattaggagtttagggaacacataatgcgtttcgaaatttaaaattggtgcaaggtaagaattaatgaactctcatcagaagtttttctcccaggagctctctccagcctacagtccaccataacctggaaagtatggctttccacaagtgaacttcttttagcctccctcccatactgggatttcagaaccccttctaaagtcaatgaggtaggaaagaggcagctgtccctaacacctccagaaaactgagatgaagaagatgagtctccaactacagcctagagattgtttcacattatggtatggagtcattgaccacttcttcgttttcagtctgtaggtttcagaaaagaatatttgctttagttttgtgtattaagaggctacttgaagtatgtgtgtgcgtatgtttaaaaaaattacaaacttgcattaagggaaaattcaagttcccatctccaaataaaatttgaaaacaaacaaacaaaaacaaaataaaaatgtaaggcagcttttaaaacaagagtggctattaagtgtgtgtgtgtgtgtgtgtgtgtgtgtgtgtgtatttgattatttacttttatttacatttactttaccacattccattaaaaattttgccctaattcatagattttgcttatataaacctaccttcctgtattggctgttcttgcatagctatgaagaaataactaaggctgggtaatttatgaaaaaaagagatttaattgacttacagttctgcaggctttacaggaagcatggtgctggcatctgttttggcttctgtggagacctcagtaatcttataatcatggtggagcaggcatatcacatggccagagcaatgccacacacttttaaatgaccagatttcatgggcactcactatcatgcggacagcaccaaaccactaggaatctgcccccatgacccaaacaccaggccccacctccaacattggagattacatttcaacatgagatttggtggagggacaagtatccaaagtatatcacctcccatcatagattgtgaaggttgcctttcattcttattttgccttgtttgtgatttaataaccagaagccttctgtacctgtttcgggggaagagtgctacagggggttagggtgtggtggatatacctcaggaagacattaagatactatagctcccttataaaatcaaaacccttaaaatacaaactcctgccaagtagtttgttccctcttgttaattttcattttgaaatagttttaaatttacagaaagttggaaaaagagtacaaggagctcctttatacccttaatctagattccctaatagttaacattttattacctttgcttttttctgaagcttattctttttaagaaggagttgcagacatgatgcccattaccttttcatttttccccaacattttctcaaaaaaaattttcaaacatacaaaaacattgaaagaattttgcactgagtacctctaaacccactacctaaatttaccattaacattttactgtatatctttcattaattcaattatctatgtatccatccattaactcttcccattaattttaaacaattttattgataaaccaatttacttgctataaaattcatccattaaataattttaatccatgctcaaatcacaggaaatcattgtacgttttggtaaattttaatgaagcagcgcatttctggggatcaattcctcttatcttgtcaaaggggactgatctcagctagatgccttaggttatattgtagcacctgctgtccagtgactaaagtctgggaaaatcacataacctctgtaaatgtcagtttttagaaatatgaaatgaggccatttgaccctttgattagtaaatgcatttattgtgaccctaaaatcaagaaattctaaactttaggattcctgtttctggttattccatggagagctgtattacaccttttgtttgctttgctcaaaattaatcctgatgacatcatgtggagtaagttagcctgagcatttaaggggataaaacacttatgccttaaggactctttgagagcaaatcatttatacatagcatttgcagtattcttctgtgaaatggaatcttgctgttactaatgcagaagcctgctggtaactgctcagactgtacatattagccagctggtggctgaatcctgactattgagctgcctagaattgaaataattaattttcctggagaaagtatattgtgttgtagttttttggatttgtgactataatctgtaatcaccagggaatttatttagatttgcaattatgctagagtttgtaatttatagtaaagagataggagtttgctaaataggaggcatggagctgtgagttttccattaatagttttgtgaaccttgtgtaatacccaaggtgttagtagggaactattagctaaatagtcagttcatgttcgtcttatctaatgaatgcagaacttaacatgttcacctagagagtttcccatttattttaaatatggttctcttttgcatgtaaaaagagtgttgctacaaaatcttatattttaaagaagtataactacaaataatagctttctattgttttaaaatagatattctagtaatataattcttattgtgcctgaaaagtaccatttcttcacttatatgctatatcttgaatgaaagaatgtgtgaattgattctttaaaattatatatttcttttcgataacaataagttttttaaaaaaagcatatttatactaatacttactaaatattttcaagagatatgcatatacaattatgtcagttacttattgataagcccagaaagtaggtatgactgatagaaagtcataaaagttaccaggaagcctttatcttctttgttaaatatagctttctttaaactttgtaagcctttaacaaacttgtggttacaattcttcagaattgtatcatttataacattcaatttttcatgaaacgctgatgcttacatgaccgacagttactgttttttaaaaaggacgagctagtgggtgcagcgcaccagcatggcacatgtatacatatgtaactaacctgcacaatgtgcacatgtaccctaaaacttaaagtataataataaaaaaaaaaggatttgggacataaaaataaaatgggaattactctgtcatagggaaaatgcaagttctctacaaaagcaatcaattcagataaaatgtaactgaaatatttctgatctttctcagtcatctgaaaataaatatgaaacaattttctaataaagcaaaagaaaaaaaaaaaaggaaatcacctttcgggtgcggtggctcatgtctgtaatcccagcacttcgggaggccgaggtgggcggatcatgaggtcaggatatcgagcccatcctggctaacaaggtgaaaccccgtctctactaaaaatacaaaaaaattagccgggcatggtggcggacgcctgtagtcccagctactcgggaggctgaggcaggagagtggcgtgaacccgggaggtggagcttgcagtgaatcgagatcgcgccactgcactccagcctgggcgacagagcgagactccgtctcaaaggaaaaaaaaaaaaaaaaaggaaatcatcttgtttcgtatcaatattgtaggataaaatgtgtaacttttgcattccataatgactatagtctgatgattttatattcttggggtttcacattaacagctgtttaatctgaatgtttgtttcagtatgtttcagaagtcagaatttgtttataatcttagaaagttaattcaggacctgtactgtatgtaatacaacatccccagcaggatcaagctatcatattcatatttctgcaataaaacatagagatatttcctctatatgagatcaaaaaagactatgagtaacttcccatcagtttggaagttagttatcagttaataaagtttggattaatacaagtttttggttttcagaacttttgaattttagaattgtagataaagaattgaggactaaatatgggccaattatttcatattgtattttgggttgagttctacaaagcctcttcaaatgagctatttaaattaaggatatattctttgaacatcaaaagttaaatataaggaagcagtatatttttaaaggattttacatatatgtgtttctgatgaatgtattaactgcattcagttaaagtaagtgaaaataagagtaatctgcagctctgtttaatatatttgagtctttaccttaattttttctttttctaaaattaattgaattcaaaatatctggaaattcctgcaagttgtttttttgaactggagtgttgctctgtcaaccgggctggagtgcagtggcacgatcttagctcactgaaacctctgcctcctgggttcaagcgattcttgtgctttagcctcctgagtagctgggattacaggcgtgcgcccccatgcctggctatatatgtaaaatatatatatatataaacatatcaatatatattaatatataaatataaatatataaatatatatatatttagtagagacggggtttcaccgtgttggccagggtggtctcaatcttctgacctagtgatccacccacctcagcctcccaaagtgctgggattacaggtgtagccaccacacccggccctctccaagtttttaaataaattttggttgttcataagttgaaaaatagtagtattgcaaatgagtattattattgctaaaaataaatctttgattcctttttctcatggagaattttacctgagataatttcaaactaaatgcctattaaactaaagaaacatagagaaatatataacaaatttgggaccagaaattcatatttagtaattgttataaggaaaaattagatagttcttcataaatagaaccgttgattatttgaagtcaaatattgttccaggagatgtgataaactaagaatataaaaatacctcctacgaaatgcttattaaagaataattaaagtttaaattctaatacaaaacagacttttggaaacccttgatttgaagataattcagataaggtcaaataaatgatattaaaaaatcattttatttatttaatttttaaaagaagtggataacaatgtaaaagatcttggagttggttcttagtttataaaataaatgagataatctttgagacatggatacataaatgcccgctaaattttctttgagaacatttgaaaaaatgactgtattttaatatatcatagttaaaatcagaaatagttaaacattttagtttatgtgtaaatttggtggcaaatttgattatttttaattgatgaatatgtcctgcattttgtattttgtatttttattgatttacgaaaatggaagctaatctgaaacaaataagtttaaaaaatgcatccagaatccagaatacacagcagatatttgtggatagatatatgaatgaatattgttaagtgaccttctgcgtaatattgggatcatgatgtcactgcataaacttactttatttcctgcaaaactaacagttcaagcttcaattatttgttgaatgtaagttattcatactgtaattgaaggaaaagatttaaaaattttaaatccagattttcagagttctctttaaataataaactagatctagtttgataaaagtgcatgtgtattgaacactaaaataattgtatttcattgcttatttctggaaacattgagctatattctgctaggtaaaaatatccaattattcattgtatctattgaatactctttgaactcaaaattatacttattgaaatttatcttgcagatatacaagtgatatttattatggccatgttaaaaatatcaaaatatcttaaatcatataatgatcatcttttggaagattgtcaaattatattacatgtatgcagtggaattcaatatagctataaaaatataagaaagatttctctgtactgaaatatttgttattgttattttgggagtatgctgaaatgttatgtgaaaaaaagctgggtgcagaaaaatatgtatattaggctaccattcatataaatagggacagtggaaaatatatatgggtttgtatgtatgtgttcacatctgtattggcttttatatataagaaattgctctaaaaagggaaaataacaaattacaatgtttacctattggagaggatgggagcttagaggtaagcaggatacttttttctatatatgactttattttatttttttttttactttttatttttagcttttaagttcaggggtacaagtgcaggtttgttacataactaaacttctgttatgggggtttgttgtacagattatttcgtcacccaggtattaagcttagtacccattagttatttttcctgatcctcttcctcctcccaccctttattctatgaaaggccccagtgtgtgttgttcccctctatgtgtccatatgtcctcatcatttagctcccacttataagtgagttataccattttatactttttgatgtatatcatataatagtataactcatttttatatttaacatctttaaaagtactgtgactgatttttcccacttattcattcaagatattaatcatctgaaacccacctacactgtgtctctacgcttatgcaggctctaagatcagagacctaaggagaataggttatgctctcctgctaaaagagggaaagatcaatgtctcagttatttcaggttgccataacaaaatgccataatttgggtagtatataaataccagaagtttattttttgtggttctagaagctggcaagtccaatatcaaggcactagcagattcagtgtctgcttaatatgcacattctggttcatggagtgacactgtctccctatagcctcacaagttggaaggggcaaactagatcccttgggcctgttttagaagtgcacttattctattcatgagggctccaacctcatggcctaatcatcttccaaaatacaccaccttcaaataccatcacattggtgattggtttttgacatacgaatttggggatagggaatacaaacattcagaccatagcaaccaatagggccttgttttttaatcaagcaagaagtggtgaattaatatattgcatagttttgacattctttttctatgtagtttgctaggagtctctttagatttagaatctgcataagagaaagacagggaatctttttaaatttatattatagatattaaacctgatagttaaatttgtatttttacatgtatattaggggatttcattaagttggataagctaagaaaaaactaacaaaaaggtttaaaatattagagcattatatgaattacaatttttaaaaatgcttatatgcccaatcctatgtggtgaattgatcaagtacttgaaatatttagagatggttgattaagatgcaagttttatcgcttgttggccatttgacgttaatcactttaaataaagtgtaatttcttttctaatcagaaaataatcttttggaaacaattctagcaaatactactgcaacctaggctgttatttggtatactatatatttttgaatttcagtgaactatagaccagacagaagtttgtactgaataactatttccagggctcatatgaattgtttctttctgccagtgtataaaagaatgtatagtcattgtcctgtgtctcattccataaaatctaatgtccttctgattgtacataaaaagatgatgggtgcctgaatgaaactatttttctttctcaaactgtgaacataatatcctatctattcattattttgttctttaatatgctgtaattttaaaatgtgtgatttggcatattgcagagaatattaagtgacatcacatatctatgttattgttatacatcagaattattttgtctttcagcagcatgcctgttccaatggatgaccgtacagttgttcctcaatttaaaaagatgtataaatatttaatagaattaagacttactaaatctatttttgaatatgtacattcactaaatagcataaatcttttggaaacagagggtagaagagcaccatctaccattttcctttagccatcctattaattgaggctgccaaaaaccatgtctatcatacagatattgcattattcagctccctagcaagggttaatctttgcccaattctctcctaaatcctcagagcagaccagggctaggagatgggatcagaggccagaggccagaggcttaaatgccatgatccttattgagaggagcaatggaagagaccacagaaaaagtgccaaagttcaatagagtgttcgtgtgctggaaaaattcagatgggccagaggcacataatataggatacagagcaaagaaggaataaggaccaaggaggtgagagcaagtgctattcagagaattggccaggcaggaggaatgagacgagttagggggaatattgagtgattccatagtatcagctagtatttgggttggtatcatacaggagatacactctccgactatttaaggagaagggcagtgccaacaccatgttgatcctcgacaacgtaatgttgattcttatactttgaagtaatgtattagacaagtttctccaggggaacagaaccaaaaggatgtgaaataaataaataaataaataaatatatatatatatatatatatataatgtatatgtgtgtatatgcatatataagtgtgtatacacttatataagtgtgtatataagtatatataagtgtgtatacacatatataagtgtatatgcatatatatatgtgtatatatgtatatgtgtatatatacacacatacacaggtacatacatatagatgtgtgtataaatatatataattacgtgtgcctgtatatatataaaatttataatgaagaattggctcgtgtgattatggagcctaagaagtgccaagatctgcagttggtaggctggagacccaggaaagctgatggtatggttccaaaacaaaagctagcagccttgagacccaagaagaacttatattttagttcaaatctggcaaaaaaaaaaaaaaaaaaaaaaagaaaagaaaagactagtgtttcagctcaagtagtcaggcagtaggaattccctcttatggttctatctaggccttccactggtagatggagccaacccgtattagaaaggggaatctcctgtactcaatctattccttcaaatgtttgtctcatccagaaaagctctcatagacaaatccagaataatgttggatcaaaggcataggcacactatgtcctaatcaagttgacacatcacatgaaccatcacagagcatcattatagagatatcagagcagaccctagtgaatgccacagataaaatctcctcaaggctgcctttccctatggtggtgtgaagttacacattagcactgtaaatgtcataatacatctctattagataggatagctgaaagaactaagaaggtgagggagctgtctgactggaacctgggcccccttccatctacctttgagaagtcaaacatttatgaattacagttgacccttgagcaacatatgtttgaactgcagaggttcactcaaacaccaattttcttccacctctgccacctgtaagaccgcaagaccaaccccctcttcttgcctctccttagcctcctcagcgtgaagacctttatgactgtccacttccacttcatgaataagtaatatattttctttttctataatttgtgtaataacatttcttttctctagctcactgtattgtgaaaatatagtacatataattttaaaaagtgttgattgttcgtcttatcagtaaggcttctagtcagcagtagggttttaatagttatgcttctggggagtcaaaagttatatgtgggctgggcgcggtggctcacacctgtaatccaagcactttgggaggccgaggcaggcggaccaggaggtcaggagatcgagaccatcctgtccaacatggtgaaaccccatctctactaaaaatacaaatattatcttggtgcggtgttgcacacctgtagtcccagctactcagggggctgaggcaggagaatcacttgaacccgggaggcagaggttgcagtgagctgagatcgtgccactgcactccagcctggcaacagagcgagactccatctcaaaataataataataataataaataaaaaagttatatgtggattttttactgtgtaagtggttggcatctctaacccccacagtattcaagggtcaattataaaacttaatggtgatgttaacacatcgagtccaggcttgtttctgtgcatatcatgatgtctctgttatgaatacttaggatgtgtcctgttttcaaaccatctccaccttagaaatctttcactttgttactcttcttcctctttacattcaactaagagatgggactcaggtgaattagtacaactttaatttcaagtgagtgccttcacattaagtttccattagcctttcacttaatgagtattttcacgtacattgtcacatttgatcattcagtgaggtatggggtgaattatatgaaattgctgatatttgaccattgtggagtcacaaaagcagcaattttatgtggttgaatatggcattattaaacctacttttgagatgcagaaaagtgaggcttaaagcaaatgtgacttaaaaaaaatcataaagctttcagcagcagagctaaactaagtctcatgactgcaaaattctatgattttcccatattgccactactgaactggcagccagccacccatttgtattttccttaatacaagtaaatgctaattcaaataggatgaaattaatctgatattttaatgactcaaaactgtagatgttaatagctttctgttattttgtttttgatatggttcccatttctttttctcaccaatgaagaataaacattgagattctgaagtcaccataatttttggtcaccactgtgtctgagacacctcaatttgcaacagttctactcttcatacacttacttagaaattttcaaaaatcttgaaagctttagaaatctttgagtgcaaagaatcatcatgagaacatataaggttaaactgtgatttcgttttgattgtgtttacaattattgaaattataccgaaaagttccttgataccttccagcaatctttgctgaatatacgtgcactttggaaaaatgggtccctgaactatttatagatatacatattttattgatttttcaagcttcattttgagatattacttagaaactgccaaatattggtaaaaaaaaaaaaaaagagacatcagaatctttataaagtgaccaaaagtaacgttgctgagatttgttggcagctcaaatccaactatttgcttatagagatctgttttcttataaataaagctgatcagggaagcatgaaatttgagagcattttcagggcccgttggaattgaagtcactacattctgcttactctttatgatctggcttctgtgatttgtctaaaaaatgtggaaaaggagtgagttcaagaagaagccattacatggtcctgcctgagttatttgtaggttataatggcagcttgtagggtcacagatggccttaggaggggggaagcagagagggaaatagctccccagccccatgtagtgaagataaagaatgtcttcataaggttttatttttttcactgttactgttttttatctttgattgataaaaatgaaaatgccaaaatgagggttagcttaatttaaagtataagcgtagttagcagctttttctaatcactcctgtccatttaaaaaataatcctcataggagtataaacagaggaaggagaaatggaggatgggcttaagagaaagagtatttcacaaatgtctgcatagcaaattcaattcatctacctagtagctccttccatgttaacctacaggtgttctcccctccaaaaaaaagcatcttttaggaagaaaccaccttaacactacctttagaagattgaacttccagggataggttgtttgagagaatcaccaaaagccatttttaatgaatttttaaattacgctttctcattcttataatagtgtagcagccaccttccatctactatgtaacttataacaaataatcaagtactaaattgaataaatactgttatttatcttgtctgggctaaacagaaagaagaaataaaatacagttactaagcatcaaggatcacaggaccttctattccagtctagcagaggaaatttacaagatgctaagtaattaatgctaagtggcatgttgctaatataattacaattgaggttttcagagaacagtaaattcaccacaggtcaaagcatttgttgaattgtatgtggagaagaaattggaactgtgtttggctgcatcttaagttacactctgggaagctcatactcatttttagcaggattctatgttaaactttctaagagtggggaaatactctatctaaaacgtctccagaaaaaagttacaaaggataagcagagtctggttttaaaggggacactcaatctgggtagaaaggtctctgagtgagtgagttagagagtgggtgagttgaaaaatgtgctgctaagcaggtttatgtaaccttcctttttttattcatgatttaaaagtatgatttcggctcatgcctgtaatcccagcactttgggaggctgaggcgggtggatcacgaggtcaggagttcgagcacagcctggccaacatagtgaaatcctgtagctactaaaaatacaaaaattagccaggtgtggtgctgggcgcctgtaatcccagctactcgggaggctgaggcaggagaattgcttgaacccaggaggcagaggttgcagtgagccgagatcacaccatggcactccagcctgggcgacagtgggaaattccgcctcaaaaaaaaaaaaaaaaagaaaaaaaaaaaaacggggatatgatttctacatccacctatctgacctgacctcacagggaagctttgctttagactgatatgatcttcactagaggaaaagacgaggggaaaacaggagcttaaaagaattaaaacatgttggggagtggtggctcacatctgtgaacccagcactttgggacgctgaggcaggcagatcacttaaggtcaggagttcgagcctggccaacatagagaaacctcgtctctactgaaaatacaaaaattaaccaggtgtgatggtgtgcacctgaaatcccagctacttgggaggctgaggcaggagaatcacttgaatgaggaggtggaggttgcagtgagccaagatcaagccactacattccagcctgggtgacagagtgagactctatctcaaaataatagtaataataataataataaaaacatgggcattaagtatatatggaccacttacttcatactttcgaatagatgagcatttaatccatcagttaatggattctcctctgtatattctaataacaggaaaagcattcagttattatcccttctttctcactgttccatcagagtccttattacctgacataaaaccatctcatgttatcacctataggctaaaaagctttgcagttctcatttggcttgaggttaatttagagatttattaaactgtgtttcattgagtacctaccatgggtagctggatgcccagacctcgggatattccagtaggtgaaataattgagatgtatatgtatttgtacacatatgtatctggcttcttctccttttgagagagaagtctcctctctcaattaaatgtgctatcaaagagcatggcgatggcaggaactgccgagtaaactgtattttaaaaatcgtatctgcatttcagctctttgtcttctcgtttcctgcactgcctaaggtcctctttgcctaatctttttctggaggaaatttttaatatagactccttgttcctttttgctttaaatcctgagattgtaaggtttgggaaagttaatggcccccatgtgattcacctataatggacattctgtagaataaaatgtatcctcatttaaaaaatacataaatagaaagggaaaggtacattgtcagtctctgttttgcctgtagaaatcctttcaaatcatgattatactcctagtctatttgacaacgataaaatattctaaactaatggtttcgagctctcaggcaaaaccagatttttattgccagaaaaagtccaccatggctctgaagaacaattttacattttcacaaccaatacaaatactgttttgggtacaaattgaggaaacattatgttttcagggatccttttctgaactttcatgaaatattaaaatgaagatgactgaattgcagtttgattatccctcattgccatttagaatgggtggataattagtttggcattaaccttgaatgtgaaagaccctagaaagtccagctccagggggtgctgttatttttcagcatattcttctacagccactttctgacatcttatgtaagggaaactgaaaatcttaaatgattactcatataaataatcttgggggaagatgagatagaaagaattgtagagaatacatcaccttctctaggaaacttatttttcagtagtattaatcaatcatgaaaaatataaaatatggatgcaagacccaaatacatacatggcatacttctttcattattttattttaaaaacactatttaaatgctataacttagtactttctcttttactgacaaagtcacaaagaataattgttaagtacacactacatgtcaagaaatgaaagaaaatatacattttcggtttctagtagatctgatactaaaatttagaaatatacctaacaccagctaagtccatgcaaacatttaactctttgttggtaacattttccactggcattacacaggcctgagtgtcagtattatttcctttttcttttttcttttttctttttctttctttctttttttgtttttgagacaagttctccatatgttacccaggctggagtgcagtggcaccatcacagctcactgtagcctcaacctcctgggctcaagcaatcttcccacattggcatcctgagtagctgggaccacaggcacacaccaccacacccagctaattttttattatttgtaaagacatgatctcactctgttggtatgctggtctcaaactcctaaattcaagcgatctgcccacttcagcctcccaaatactgggattgcaggcatgagcaaccacgcccagcctctgagtcagtattatttcttgttagccatattgcatcactaaagcagaaaactttcagacatgcatgtatatattttagtatttcaattagttgttttaagtatttggtgctctatttaatacatttggtacatattatataccagtcacttttctaacagctttccatgtgttaactcttcataatatttaactacataggtattattgtccccactttgcaggtgaggaaactgagacatggagaagttaaataatttttctgaggtcacacatcaaggctccagggcctgtgctcataagcatctcactgctctatctctcaattggataaaactaattgtgaagtaagattaatattttatcccattaatttcatgactgactttcaaacctaagcatgcatacatgcatacaggcaaattaaaactcaggtgctgccaacagatggatagtcattctacaagggggacactaatatctctatatctagatacgagaaacagatacttttttaaatgtcttctcaaaagcaggtgaagtgagaagaagaatgcaatagacatttatctatgtactctgattagaacatacttaaaccaaagtgataacaaaaatcattacttgtatttctttgcaaaaaatctggaatagaaaaatggcaggagaatacagacaaaattcttgattttcaaatagggaaatgggagtacactctgtatagacaaacaaatttaatgccaatcccttccaagaacctcaaatggattattaaaaactttgaaagaaaactgatgcatgtcctctgttaatgtctttggtttacgtctctgaggacagaaatgtactttctttgcctttttgaaaaggcaaagggattgaaaggactcagctgttaaagtaacaaattatcaagcaatatgaatggccatggcacagtctacataggctgatttcacattgttatatacgtgactgagcattcatttattcactcattcgacagatagctattgagcttcttccttgccagggcttacactttctgattgctgggatgggaattcgatgaggaaggccttgcttgctaccaagtataggagatgtaggaataggtaaatctaggtatagacttacaatctttagcttacagagtctgtcacagcccagtggcagagacacttctcctttattgtccaaatcataacatttggaggttgatgatcttctttaatgcaaatatacagtgaggtaccttttttttcttggccagatatttttcattatcgctgctatcgtcactaatatcagccttatggaaaaatcgcagtataagacatagcaacaatagaagtacgctctctgcacgattaaaaaaatgaaaataaaaacactgaaagagttatacgcaaatgtggagaagagcaaacaaccgtttgggaatccatatttcattaagaatttatcagtgcctagtgagcatccagccttagcacagtatccacctcgtaactggtagacataaatacttagtaaaagagtgagtgaatgaataaacacaggtgtttgtaaggcgacattcttggaatactgctgctgctatatttcaactcagtgaggttttgtaaattcaaaaacttggattttgaactcaagctgcttggatttgaaccctggctttactacctgctatgctgcaattgcttcatggggaaaagaagaaatggcaatcctaaaggatggatccctaccttttttttgttgctgttgttttcatgcatttcatgtgtgttgggccttctaattacaaactagatatcagatagtcagcttacttcatccagttggtttctgcacagattatagtgtaatgaaaaatacctattaacctgcttctctaataatttaatatctggtttcctgataccatattaatgcaaatcctacaactataactaaatgagagaactatttagagtagataagtaagttactggttagaggaaagttttaaaacaatgtcttccaaataaggcatcatttttccttatatcttaagtaccaacagatgaatagttattgcacaaggaaaactagctaattcctcctttgatagactttcttttaagactagtagatctgctgatttctatatcaggataacctggagatcattttcaaccaatcagagacaaacttttctccatgatcaataagtatttcttgactgaaagagtgaaggctggctgggtgccgtggtggctcacgcctgtaatcccagcactttgggacgccaaggcaggcaaatcacctaaggtcaggagttcgagaccagcctggccaacatggtgaaatcctgtctctacaaaaatgcaaaaaaaaaaaaaagccagtcatgatggcgggtgcctctaatcccagctgctcaggaggctgaggcgggagaatcacttgaacccaggaggtggaggttggagtgagctgagatcgtgccactgcactccagcctgggtgacagagcgagaccgtctcaataaaaaaaaaaaaaaaaaaaaaaagtgaaaaagttacattaccatattttttggacaagacttttgacaagatatttaactttttgctatttcaattttttgatctgtaaaataaaaggataatcatagggttaagaaggacagctatatcaatacatagattgatggaaatatagagatacatataacttaatacagagcccaacatatataagcacccagtaaatattacctattattagctattatcattagatcataggaagtcaagttccattttactttgtacttgtcaagtcaaatttaaaataggtcttgttccaagcagcttattttaaggggaatatcaataaaatggaatgtagaatgagtgcacggacaatggactccatttgaatctagttcctatcacaacatgtgctgactttcaatgaaaatttttatgtgggttaatggaaagaagacacatagacactaaggatttaagcagttcaaagtctatcatgtgaaagaccaaagaaagatggtttttgatagctcagatatacaggtaaggagggcaatcatatgttcacattttcctgggcagtcatcttttatgtctgtgtaatcatcaattagtttttaactgacaaaggtattcttgtttggacaagaaattatatggtttgcccacatctaggttaaatatgttgtagtgcagtagaggcacatttaagttaaccataggacagtgcacaaagtatttgaggtgtccagtgataaagtctgccctttgaagttatgagttgatgtgatgggaaatattcaatttaatacaaaatgataattcaatgcaaggaatgattcattcactggataggaagatcaactagatgtacatcattacatctataatatgtaatctaataaatcccaaatcttagtttcttttgtgatctacctgctacttctctgtaaacaaaacaaaaacaaaactatgaatttgcattcccatttaatccaactgtcaatcctctaaatgacccattttacaaacaaatcaaactccagcaggacctaaaaatattagagatttgtactgatattttgccatttctttaattttttaatacttcttgaatgaatatataatttattttttaaaacaggcaatataatattttctacttcttttttatttcctaatattttcaggaggactttccacactgtatttattgtaccttctcagacagaatgtcttagaaatctatgatataatctggcttaattattaagccatgtcttccattcttatgagtacagactgctttaaaatttgaaatatctgtattataaagtcttattcggatatgacatctgaatacaatgtctacttttatatgactgttacccgcaatatatttgttttttgttcttcacaatttgctttgggagcaaaaataactggatataaaaattgcaataaggaaaattattcatatgccagctgcttactgaatgcttatgatgctgaggcactgtcagctaagctctgggggtggtgcagcagcagtaaacaatgccaggtccttgcttgcatgcagcttacattccatggattgtagaagatttggaaagggccttgccccacatccctaagcaggtcttcacccaataggttgaattttccttccttgtattcctgcagcacagaaacacccccgtcattactgagtatctctctaacaggtagtgggcacataccctggggggagacatggcagaatgatggtggaggtaaaaaggtttaatgcctgttgcagtaggaagacccctcggtcagctggatgcactccttttggggccaataatgccttaccctttagaatagcgttcaattttcacagccttcatcaccactgccctgtgtggcttcaaacttcttctaaacctcatttcctttaacattatgggcatgtgctccatctttctggcccctgctatacacaatgggacttaccagtatcccactgtcacctccctgcaacttctggggatagtgtcacctccctgcaatcctggctgccacctgccagcatcctattttccttccaaatacaactcaaattctgccttccttataaggcttatttggtctcttcagtgatattcttttctctctttggagccactcctgtggcacttggagtatttttttttctagtatcacttatggcattgtatattttattacaattttcaatgagcttgactgattcccaatactgtagcccattagcctcagaaggcagagtccaagttgcctttctttggtcccactaaagggtctagtgtattgccttgaaagtactaggtcttccagaacttttttttttttacagaacaaatgcatcttctgagttaatatttataaaatgtgtttccatttactattcaattactgttgtattatttttcattcctataccttaattcccacatttttgtattggttgtatttcttattctaaagagcataaaatacaaaagtaaataatatgtgtttaccatttagttcaaagaaaaggacaattaaatgaataaactttatttttatgtattttaaacaatttatataatgtgaagtattttaagcaatgtgtttcttacattccagtttttgaagatggttgctgaaattagtgttaacattcactttcaatcttttcatgttgacccaagctatttgaggtcctctctagcaagcttcttaagattacttacctctccctctccacaacagtcctcagatggcatcttttaaataaatagtcctagaaaagaaggcaagtcctagagaacagtctaattcctgaggaagttctgtgcaaccgctgtcctgccacgttcagggagaggatggaggtggtgtgtgagaggattataaagaaacagagaagtaagaaggaatgtagtaagtgtgttgaagtcaattctgcaaatgtccccaatatctaattccatatgggtctttgagattcaaactactgctattttagctcatctgaggccagcatttatgagtacctactatgtcatattttgtaacaggctaactataccattatgaataagatgctatggtctatgtttgagtatctattggtaaaggctgacacataaatagatactggtgcaagctcttaagcaacaaactaaagcgtaatcctagatttctcccatttacttttatttttgctttcaaccccactcccatccaatcagtccccaggtccttatgatcgtctttcttattatctctcagatccaggccttttctgtaatctctttgccacctacattctttcttcatctctaacctgactttgttgttgttgttgttgttgagatagagtcttgttctgtcgcacaggctggagtgcaatggtgcaatctcagctcactgcaacctccgcctcccaggctaaagcaattctcctgcctcagcctcccaagtagctgggattaccggcacacgccaccacacccagctatttttgttttgttttgttttgttttgcttgtatttttagtagagacgaggtttcaccctattggccagactggtcttgacctcctggcctcaaatgatccgccggccttggcctctcacagtgctgggattacaggtgtgagccaccgcgcccagctgctaacctgagtttctgtagcaacttcctaactgatttgcttggcaatgtgttgaaaaccctccccactgtttttggttttgctgcctgattgatctcctaaaaattcctatgtgacttgtgtccccaccctgcttaaattctctagtagctcctcttccccagcctcaccagatggaagtttatgcttattttcttatttcacttggctgtcatggatctcatttcttctttctgtctcatcctctactattcacccctctccatagacccatccctcccttggctattggaacacctcaagctggttgtggcagttctttttgtacccactcacaagactgtcttatgataaagcaaccgacaatacttttggagtctggttttcctttttgattctgatagtgtagtagattctattcagtacctccctgccttttctaattacctgtgctcccctgaagcatttctcttctgcagctgtttcctgtgaccctgtcatatggctgctgaatgaggacatggatgaaagaagtcatttacattttgagcacttcctggttgagccaccaatttcatgagatacaatatcttccctgtggtgtgatccctttggatatttctttacactctgttgtagattttacggaaaaaacttcgtaagtttcaattttaactagatggaggggaggacagtagtgattcaaagaagctagaagttgttttaaaagcaactgactctctcaacatcagagtttggttctgatcaatgatatttctagcattttttgccaccaacttacagaaaaagatgtattttacatcgcaacccagaatgtgtgcgtaggtgtgtttatgtgtagtcatgaattcatttattcaaggaacattcactgagcactcactatgattcgtactgtgatactataagcacttatgttctagtcaggggagataaacaataaacaagggaagcgtatcaggagatgataagtgatcttaaggtaaatcatgttggaggatatacatatatacacacatacatgcatatacatatatacacatgcatatattatacacctatatgtttatatgtacatgtgtacttatatatgattatataatatacatatccattacacttatattttatatacatatgtacctacttacataagtaattgaaaatagcttcataaaataatacttaccttggctatggataatgcactgtgatttttttttcttctgttttctatttcatttaaaaaatgctgattgcaactgactggattgattttatgacacaccaattcactgagacttatgattgggaaaacactcatttagtaagtataaaatgtatcaccacaggtagtcaatacctttacaactgggcagataagagatatcagaaatttatgacgattcccatacaattaacactacacaactattgcacaaaagtccatattttatcaaacatctcattttgagtcagactaacttaattttgtaatcttcatcatgttttcctgtttaaaagagtctaaaatctcaccacttgcaaacgaagtgaacatttttattagtacaattatgtaagaaattactcactcgagtactatataaactttggaaaatctttccatagggtaaaattctggcttaacttttgaaattaaggcaatggtaaaatttagacaatgatattgacttcttattggagattgtggcatgtgaggtagttacaactttgacaactgaattatatctccactgtagcatattaaggttaggttaaatctaattaactataatacctatcattgaaaaatttcagagtacatatcacctaaagattaataaaagaagaagtatatatatgtattttcatattttccatattgtagtacagatgtattttatttttaaaagcactcagtacagagccataaattattttagcattttaggggacatttttaaatgtttttaaaattctaaagctttgttcattttattagcaaaatgtagtctcatcccagttttgataaacctggatagatccatgttgatattaaaatgaaagccacagtctaatcaataaagtgattcatcagttgtgtagaacaaagtagtacttttgctttaagaggctttttgttgttgtttatctcctttagcggatattttcagataatacataactttgcttttatgtttattctaagaataataagtcatcatgccacatttgtgggtgcttttaattttaataataaagtaattatgcaaagctaactatgtaaacattaatttctgacatgattgtttagatctattctttatgaggttacatagggcaaatttaattattgataaaccaggtagctaataaaattaaactcacagtcattgtctttaaaggtgacacatcattgccagagtagctacaaacataatatttcaaaatttaacataagtaatatccaaaactgcttagtaaggatactaaataactgaatttgtcatgtttccaaccacgtttattgtaattacatgcaaaatatataatacctcccaaaaaataaatgatgatggtttacggcgtaaagtgaattgtgttgctatagtttccttattatagaataaaataggttataaaatacttcatgttaggctgggcgcggtggctcacgcctgtaatcccagcactttgggaagccgaggcgtgcggatcacgagttcaggaaatcgagaccattctggctaacatggtgaaaccctgtctctactaaaaatgcaaaaaattagccgagcatggtggcacgtacctgttgtcccagctactagggaggctgaggcaggagaatggcgtgaacccgggaggcggagcttgcagtgagccaagattgcgccactgcactccagcctgggcgatagtgcgagactccgtctaaaacacacacacacacacacacacacacacacacacacacacacaaacttcatgtggcatttgtgcagttttggttagaattctactgtaataaaaacttactggaaatcagaggttaaaatagagggttacaaatattcaagtctctcttctccaaatagggagtaaattaggaagtgcaaaactgcaatgaatatataggtaatgaagaaacatggaaagaaaaaataatttcagatgaaagtctattcatttttaagatgataatcaggagattaaagaatatttttccatcattctttctcttacatacttagcaaaggtattcgtatgtgtgtcaattgttgaacttggttgtttatacatttaacagcttatttttaggtgggagtatttgaggtaaagacaagataaatgagggaaactgctcctagataccagggtctgtacagacctttaaatgactgttatgctggaattcattgccaatgttttgccttctaagtgtaacctaacagttgtgaagagtagaatcctgttcactttaactctcacttgctatgtgacgtatgtgttcttataatggctttcaaaggagctgccagtgatatgtagaaagagtgggcaagaacagaggtgtacgaaaattaaggctgaaagttgcattggccccctctttactatctcttcctttacaaccaatgccactagtctctggctcaagcactgcaaacattgcataaagaaatgagtaaaacagcaacaataataatcagattttgtaataaattcttaatttatacctgaaacttggctaagtgattgctgtggattattaggactaaaggtggtggggagtctgggctctgagtattggacgtaggtagctgagagtcaacaaagtctgaatagtgaaaatatttctctcacacagtgacattcattttaagactatatgcatttagtcacattaaccatctctttcaatcattctctgtgacagacaagcaaacacacacacacacacacaaaacacacacacacacacacacacacacacacacattcagaagtgtggaggttccattgatgtcacttgtttgtccagtccttggtcagtgaatctctagaaaggccacagtcttttcatgttcatggctttgtcattgctctccattgagtccactggatgaacttgcttcttgctccatctcagagtccataagaatatgtctttgcagaggacatttaggggagggaatgtgttaccaattcatttccaggcctcagatctcaactaaggtgttttcaagtcccacaaccctggatgtcacttcgtagagggccagtcctccctaaaatgtgggctttgttccttagtctacagtaggatgcagaaatgatgtttcttttcatggtggcccataaaatttagaaattgcctggattccagtcaatttagaacaattggtgggcaattgactaggtcacacatcaatctgatttggcagttactgtggccaaaaacctcaaatgctgtaaagctgtcagtctcactgtacatttatgttcaaggaggaatagactttattttctcctcaaatatgttttgattagacagcaaattatcggaaaccatgtcagaagctcactattctctactaccatgttaacataaatgttatttttctagatacagtgaatcactgtgtattactcctcaaaaaaaatttttaaactaaatgacaatacgctaggccataaaatgtagtattataccatcagagaagactttctgttatatctgtatacattttgatgtatgtatcccaaaagaattcaggtaaagttaatatggtcaatgtcgttgaatggttaagaacatgggtttacagatgtctaggtgcagactcctctaccacatggaagggcaaattactttacttctatgtatctctgttttctcatctgcaaatcaggtgtagtaatagtaactagctccttgggtggcggtgacgattaaatgaagtgaagaaaccatggctggtacatagtaagcatgagctcagtcaatgtgagatgtggtttttgttaatatgaaatagctatagccaaagtccccaaatagtaactaaaacagtatagtattatcaatccccctatatttttttcaaattatataattgtttgatatttatcttttatttatttacccaaaaggaaagggtgctatagaagatctcttagtaaaatactgaaaagtaaagaaaaatacaccattcaagcataacacgttttgtttagaaagttaaaatatttagcaaagacagaatatgttcctaaatggagtgaggaatcttgtcctatttgttttattttttatcttgctcattgctttttttttcctctgagtatacttgggttgatgatctgctttctatttatatcattacttactatgtacaatttaatgtattagccatcatgatatcatgggtatgaataaggtcctggattcctcacacatttccaagtgcagactccagctgaaacagaacaaagattcagatgtttaataatattgtacaatttttgttttctttaaattttttctcaaaagtttactttctaagaaatcagtgtagaccaataaaagtttcctgtggtggaatttggttggtatacttcctagaatttaaccctaaccaggttttctttcaaaactactgagaatcattttatttacaaataacaattatatgaattatcaaagaattttaaaattaacataactttgtccaaagtcagtgtctcttcctgttataaaattacttgatcctattaagaaattctgaattgcaacatctgtttgtttttgtttatcccttttgtcgagaggattcatgccatgattttcttattacatttttaatagatattcagtgaaaaaggtaactgatgccaggcagtttatgtatcaaccacatctatcatgccttttcctcctttgtcctacctattcagttgttaatgggctatttgggcagcagccacacaaacgctttcacatagatcacgcatcaacatagttatcctggaaaagaaaacacctgaactatttattcacatggcattttccttgaaatttctagaacaactttttgtgaataaggacctcaatctacccatttacaagatgtgttgtatgagctgtaaatgttactggggtgttgtgagtacagacttggccttggttccacagtgtcccctcactttctctctaagctttttcatttatcaattccaatcgccaaactcagatactaaaaattctaaaactctctgaaaatacttaatatgtctgttgcaatgactacatgagctaacatggataatgtgtagtgcctggcacatactgctcactcagtagtaactaaactaaaacaagaattacaaattgggaggcagtgaaatcctgatttcttcatttgtatacctaagtatttgaagaaggattctctcaatgtaaatatgtacttgtacgtatttaagaatacatatgtgttttaattgcttttctttacctaaacaatttgtctctttagtctgtcctactttcactgtttggggaaataggtaagaatttgtattaaaatccctctcagaaaggctattctattctcatttttccttttaaagaacaaatacagctaactagcacattcaaaataaaaaattgaattgttatgtaattcagaatataaataggaagactataatgaaattttggggaacagaggatgtacgaatactttaatggaaatttattggagatgagaaattatgaaattcacagtctttaccattcaaagggaagttgttcatctcttacaatatgtgcgattagatcattgataccagtttgttttttcaacagaaacaatcaccttaaaactttacattcggggtaaaacacatctggtagaaaaatcaacttagtttcattgtttagggttccaattagatgattaaatactttctctggatttgcaagagtcaaagaaacaggttacacagagggtaagaaaaactccttcctgttaataacacaatgttagaaggtcccttacaatgtaactaaaaaatgctcaggcaagaaccatcctaaataatatatcagtcatttcttgaagtagcaagtgttgccttaaaataatgttttatgaatacccatagattaaagaaacacaaacaattcccacaaccaatctgtgaacacatttatgaggtatgtagagctagttatgaacattcaacaccattgacgtgctccttttttttgaattataagtaatgattaactttactaaaatgcctatgatatcctctagtgtgtgatcacttaaccaaaaggaaataacacatcattgtcaggtttcatactttacagtttgttttttctcctaagatggattgaatgttttaacctcctttaaactacattacctttaaaaacattgtaataatcttaggttcagaactggaactgtttgaaaggcatgccagaattaaagttatatttaggccacaccagaagagcacagaggttactggagtaatattgaggatgatgataggaagacaaagaggagaaaaaatcctgttgaagatcttagtgatacaacttccccattgctaatgatttgccaaataattgctattcaattgttacttaaaggaaatttataattagaaggaatattagatatatagcccaggagttttccagtttctttatttagttgtgtaaatctagaattaactctttaaactctgtaatggagcctttgtctgcctcattcatctctctatttctggcagctagaaaagctcttagtacaatgactgctcaacaaatacgtgttgaaagcaatgaagagagagatataacttaaatagataaagcaacatttttctgatcagagcaggttgagcagacccatctgcatggtagctcagaagctttctgaggatgttaagaagccccctcggacacacatacatgaaactctgtgctctgcaatttgaaaatcactgggtttaattctctcattttatgtataagaaaataaagctgtcttctggaatcccaagtttcaatatatatttttgtagctaggtactatgtatttatgggagttggaaaataacattctatgataagcttatgggccattttgttttcagagaaattatttcaggaagacaaatcataagagaatactctataacctatttgctctgaatctaaatggttataacacatgccttaataatttatacttctaacaaaaatatgtaatattctttcaaaagtcaggtgtgttattccttacatatactaaaaacaaatcatgattactgtaattaaatgtaggaaatagcttgctgcccatccattattaaaaggagatttgtatttcccataaaaaatttaatctggctctggttctctagggaaaaaataatgtagagaatatacatggacatacatacaggactgtacaaaatgtaaaagcaaacatttacctttcctccatgtattagaaagctggctaatgtttgtaaattacctaatttgattgacttccatagtcaccaaattttcttcaccaatatttattaagcatggatcaaatattttatatataagtacacatatgtatatttatgtatgtatgtgtttatgtgtataaacaaaaatatatacatgtgcaagtatatatacatatatgtgtatatatcctagtaagagaaaatgataggttagtaaattgatcattaaaaatcatataaatcagcaactgtacacctacttctgccctagtatgaatttttcaatgaaatcagtgagcctcacatactcatctcaatcagaatcacctccacatttgtacagggcttaggaaagtggagcaaaagtgctttgataaaatgtgcaattagggaggcaaagatcaaggctttaaagagagggcttagcaaaacagatgtccaaggagcctcagtaaactcaatgtctctaattacactttggatggaagaaggttgaaaattcatgcctggcagaactctcgaagtctgtattaatcttaaaataacttgacaaatttatcatgcttcaaatattttaattaactctactaggatttattgaaaatgtatcaatattaattccatgaactggaaaacatcagcatatgtttaaaaattaaggtatacaaggatttatatgtttcagtagcaacaaaccattaattatagacatgcattgcttaatgatggggataccttttgagaaatgtcacctcaggtgattttgtcttgtgtgaacatcgttgagtatacatctacaaacctaaatggtatagcctactccaaacctaggctgtatggtatggcctattgctcttagtctacaaacttgtacagcatgttactgtactgaatactgtaggcaactgtaatactgtggtaaatatttgtgtatctaaagatctctaaacatagtctcatgggaacaccatcatatatatgatctgtcaatgacagaaaagtcattatgtggtacatgactgtatatctgcacatcctttttgaaagagatgttttgaatagttgtttggggtttttgtttcaggataacatatacaacttgtgcataggtagatgagttcagtgaagacatcctgtcttctaaggattttcctaaatgcaccaaatttatgaataagtcagtctactttatttttgtctttcatgttttgcttctcacattgactacatggattattttaaataaaagggaactgtttcacagctgtaaacctgaatgctcatagtaggtaatttcagaactaaggaagtgtctatgttctttacacttttttgttgttgttctgtttttatctagagacagggtttccctttgtcacccaggatagagttcagtggcgtgatcataactcactgtaaccttcaactctggactcaaatgatcctcttgcctcagccacttgagaagctaagactccagatgcaccccatcatgcctggctagtttttagaaatgttttggagagatggagtctcttcatgttgcccaggctggtctagaacacctgtgttccaccctcctcaaactcccaaagtgcttggattataggcatgagcccggcctaaatgtttttataaaaatatatcttacaattttgtattatttgtgttttttgcttatatatacagccagtgttttggtgtatgagtgtattattagaatgtacttcctattttttttgttttcatagtatagcagagtactggtctcttttgatataaggcatgaaaatggcagttttatataattgctcaattatatattaaatacattctaaatattttcactatgtctgtgatacagatcagatgttaaatttatttctacataaggatgagtttcacacttaaagatttcctaaactgctgacttatcatgtaattctgaaggactttatgccttttctaaagcatgtactttgacgtagaatctcatacatagccagactttatattgtttttggattttcacaaatcgtttagtaagatgttctctgccaaaatatattgcattcataatcttaaatccatgaggtacactttattcaacagaataaaaaccaactattttgtcaccattgagtcagtgtaactgattaacacattgttctcattgaaacatatggctagctcataattaactgaaaataattcagtggccttgtctggctttaaatcaagtaatgttctacttgaggcagccatggctgacataatttactatgttagttatattgtagtttaaatcatatcagttcatttcctctctggtattattctttcccatcaagttctatttctttagctatagaatgcctctaagccacatctgtgttggtctaagtcatgagtaaactttttaaataaagtgtgcaaaatgtgttcttatttataccgaagatgttttcaattaccattaagttcattgttggtctgatgttagcagcttaaatatttgaagccgctctctggaaatcagacacacatccaaattctaaaaatatggtagattcttcattttattgtggttttctgagcaactgttgattgattgcacaaagcagaattccctttgatgaacacaggtttagtcagaatgctctgtgtgggttagtatctgtttcccttgaaattaaccagtctccccattcccaacctttctgccaccttagaccttttcttcatgtaccaccaacgaggccacatccttcacctatttagatgagttagtattgtttttcatctcattgggctgcacttttttgtgatatcttttccccccagtataatcaatgagtgtttattgaatagctagtttctctgtgcttatttctttaggttctatttgatgaacagaaaatttgtccactgtaacagttatggtggtgacgaattgcaataaagatttatttcttgcttatgctacatgaacactatgggtgcaggggaaagagggtgaggttggtgctctactctctataattactcaagagccaggttgccagagccctcaaggctcatctcagaaagggaaaagagcaatgaagaagttgcctacctgtttcaatgtggtgacctggcggtgatccatggcacttgttgcaacctgttggccttcaccttacttaaagggaggctgagagaaagtgagggcatgtagaatgttttctgaacaccctgtctttgctgcattccttgagtagtttgtaattttattcaaataagaccataaaaatggtattatcctttattaaatcttgtggtagccatgtttctcaaacttggttgataataacttggatgtgttctccaaagtgagactccctggccataccccaaacttaccaaatcagaagttcctgggtggaggacggggaatctggattactaacaagttgcttatatgattaatattacacttcaactttggaaaaaacaatataagcatgttcaaaaatatagtaatagagttagggagaagtaaatacttttataactatgtccgaccttaggatgggagatcttgacaaactctgaaatgaagctaccctctttcttgaatttgatgcaaatatgtgtacatatttatagggaatatgtggtattttgttacgtacaaagactgtgtaatggtcaagtcaggttatttcaagtgttcatcaccctgaatatttaccatttctctgtgttggaaacattttcagtcctctcttctggcattttgaaatatgcaatacactgtcatttgtcaccctattctgctatcaaaccttagatcttattccttctatctaactgtatgtttgtacccattaaccaacctctttttccaccccagctgccacccagacacccttcccagcttctggtatccatcagtctattctcttcctccaacttttttagttcccatatatgagtgagaacatgtgtcacttgtctttctgtcaagctacactcttatataaacctcttgctggtgtcacacagttgtacatattgcatcataataccatgctcaaaaatatgtaaaatgatataagttgctaatgctcattgagaactcaactatgtattaggcattgtgctaaggaccttaatgtttaacatctcacaaagtgggtcctctgatgagcattgcattttagataagggaactcaagctttaggaagcttatggatgagtagtattccattgtgtatacatgccacatttttttcaagggaacagaaaggaaaaaataataaaacaccacgtgtgtaagtgttcccttttctctgtaggttaaagatacatgaaaccaatttcagtctctctctcaagcatatacacacccacacagacttttcctcttcttaaatcagagactggagggctacatttttcttaatgatcttcctctgctagccccaaggactaaggctatttatttatttttagttttattttattttaattgacatgtaataagtgtacatatttatggagtacaatctaatgttttaatacatgtatacattgtaccatgatctaatcagggtaattacattattacctcaaagatatcatttatttgaggtgagaacattcaaaattatatcttctagttattttgaaatatacaataccacattattaactacagtcaccttactgtgaaatagagtaccagaacttatttctgctatctatttgtaattctgtacccattaaccaatctctccccattccccacttcctcctattttccccagcctctgttaactactattctactccatacttctatgagattagctttttaatattctgcaaatgagtgacatcatgtagtatttgtctttctgtgcttggcttatttgatttaacatattattgtccatgttcatccatgccaccacaaataacaggacttcattctttcttatggatgagtagtattccattgtgtattcatgccacattttctttattaattcatccattgatggatacttcagttgaccctatatcttagctattgtgaatagtgctgaaaaaaaaaataataaaaagccataggagtgcagatatctccttgacatactgattccatttcctttggataaatgcccagtagtgagactgctaaatcacatggttatttcactttttaaattttttgaagaacttccgtaatgttttccataatggctggactaatttacactcccactcgtgtgtaagtgttcccttttctctacttccaggacaatggttgttttcttttcttttcttttctttttttttttttttttttttgagacggagtctcgctctctcgcccaggctggagtgcagtggtgcattctcagctcactgcaagctccgcctcctgggttcaagcaattcttctgcctcagcctcccaagtagttggaattacaggcacccgccaccacttccagctaattttttgtatttttagtagaggcagggtttcaccatgttagccaggatggtcttgatctcctgacctggtgatccaccagccttggcctctcaaaatgctgggattacaggcttgggccaccgcgcctggcctctttggtctttttgataaagccattttaactcagaatagatgatatcttcttgtagttttgatttgcattctcctgatgattagtgatgttcagcattttttcatatacctgttggtcatttgtatgttttctgagaaatgccttctcaggtcttttgcccgttttttaactggaatttttttctcccttgagttatttgtgttccttgaatattctggatactaacctcttgtcaaatgcattgtttgaaatattttccccatcttattaatataaggctttgtattaatattataagaaatacatcctcacatgtatatttgcttgttagtactggagtaaaacaaatttcaacttttttttttttttttcctcttcactgtcttccagacacaggcatagcttctctgagcacaaatgtggggaatggccaatatagtgaattttctcccactggccttgtatgatctgagagctggcagtggacaagctaatgggagacccagtaactagcagcacagcaaatctaaggagctctcttaaaataatccatctcacaggaatgaacagattgcctcattttaaaagacatttgaaacactgtgggtttgaaggggctgcagtgctattgaagaacattttcatttcaaaagcagggctttatacgtctcaatttcaatctgtgttatcttaaacttggtttcacactaaaatgactaagagctatttcattgtgaatggaaatgcaagattaagaaagaaggataaaaaccagcatccttgtggttttcctctaaaagtgcaaatgtaatcttttagaaaacgaaacaaaatagcaggtgtgtagcacttaggagaaaaccacatgggtaaagtcacactcatgtaaaaaataaattatggtaatgggcctcttaatagcacctgataaccagatgtgtagaaaaccaagccaaaccttgccataaatgctttaagaaaagatgtcaatcaacatatcagtatccattatcatgacaagtagcacttttaaataaaccaagggctaagagctggttaagtataagagaagataaacctattcataagaaataactaaaagcaaggagtttcaagagagaaaatttagtcctgggattgatattaagtgatagaatttaaatagctaggaaatatgtggaaggaaaaccaagctctgagagaaagtggtttctggcaaattgttttctatgacattatttgtcctttgtggtttgtagttaaaataccttatgcttactatgctccgaattttcattattctgtaaaaataagatgaagtaaaacacattggttggaaattgtagaatgactataaaatagtgtctaccagtgttgaatgacagtttttttttattttagagtgagtttatacaatgaggatgagacaaatttaataaaaaggatgtatagtatttcttctatagctaacaatatcaaagttaatcttctgccctttatttttctgccctattttccataaaagagtggaaatgtcaaaatagggatgttcagtctgtcacattagcttgagagttataaaaaagaaagtaattaaactgtgctttctgggcatggccaccttctatgaaaaacaggaccttcagactctaaaatcctgctggactgggaagctgtgtgctaccggtgagatcctacctccttggattcccagtatccaaatgatcaattcattgtgttgtggcctttgtgttgtgtgttttccaggtgtcaacccaggtaggcttggagccttctgcgcaggacagggctcccatcctgtccttgaagagagtgagagatgccctccctctcttctccactgtgcagtctagcagtttggctgaaagattttaaaaatccctccttctacctcttttcccaaggccccaggccaaaatgcttgggagaaagacttagaaaggacaatcagaacagccaactgtaaacagctgattcattttttaatgcaaatgtgctctttcccctgggaattctagactactctttggaggagttagtatactttgactttcttcacttagagcatggggttccctggccaagaacagcctgtatttttaggaagtgcattgctgtcctcattgtgggatccttttctcctttgttttacctcacattaataatagttttctaatactcaagtacagtcagttctgctataatgcttgtttagaaagcatgatttttttttgttccatcatgattgatacatgaggaggaaatttgagcgtaataagaagtttgagtttgcttatgcacaatttcatttgctacaaacgctatggcaataatgcagaaaactgcacctagctgaatagcatcctgtaaggaaacacaaaatacacacacgtgcatacatacacacacatcctaaagcagggccagctacatgacttgcctgactcaatacaaaatattaaatatgagacgtcttgtttcagaattattaaggatttcaagacggccacagcagaacgttaaaccaagtttggtgtcctcctaagcatggggccatgtgttcctgcacaaggtgcacatccatggagccagctctccctcaaacatcttccagattcctcagtttgctgcttatgttatgagccacaccccatctattccttgagatgttacaatttttctgccaattttggataacccttgtattagtccattcttgcactgctataaaaaattcctggctggactcagtggctcacacctgtaatcccaacactttaggaggtggaggtgggtggatcacctgaggtcaggagttcgagaccagcctggccaatatggtgaaaccccgtctctactaaaaatacaaaaattagccaggcatagtggcacacgcctataggcccagctacttgggaggctgaggcagaagaattgctggaacccgggaggcggaggttgcagtgagcctagatcacaccattgcactccagcctgggtgacagagtgagactgcatctcaaaaaaaaaaaaaaaaaatcctaagactgggtaacttataaagaaaacaggttttattggctcacattttcacaagctgcacaggaaacgtgactggggaggcctcaggaaacttacaatcatggtagaaggcaaagggggaagcgggcatgtcttacatggctggatcaggatgaagagagagagagggaagtgctacacactttttttattattattatactttaagttctggggtacatgtgcagaacatgcagttttgttacataggtatacacatgccatggtagtttgccgcacccatcaacccattacctacattaggtatttctcctaatgctaaccctcccctagcccccaccccccaataggccctggtgtgtgatgttcccctccctgtgtccatgtgttctcattgttcagctcccacttatgagtgagaacatgtggtgtttggttttctgttcttgtgttagtttgctgagaatgatggtttccagcttcatccatgtccctgcaaaggacatgaactcatccttttttatggctgcgtaatatttcatggtgtatatgtgccaccactaacctcactatcatgaggacagctcctagggagatgttgttaaaccatgagaaactgcccccatgatccagtcacctccaataccagagattacaattaaacgtgagatttaggtcgggtcacagatccaaaacttatcaaccctccttccactgctgcttcacagtaattcacaagctacatcccttctgatgaccacttctataagtacgcttcagatcttttcagaagtgccacatttattgtattacttatgcatttattaaccatttcctatgtggaaattaagctgctgttattaggtttctattattttctctgttactgataaaaatttttacagtgctgtgcatctagctccaattttcccataagctctatggtttttatcgtgaaatcccacttagcgtggtgtcttttgttttattttgttttttcagaatgcatatttaatgttatagtataagtgactatcattatgaagaaaagacatacttttattagatatctctcaacacataaatttcatacttaactgaacagttgtagtagggatcattttaagagttcaaaattctagggagaactaaggttttaatgttgttatctacattgaggttacctcaaataacctgcttccagcccatcagactgttcttaagcaccaaagaagtcttgctccatagagctggattagaatttcagcaaggaattttagattattttaagaaaacttagaaaatcaagggattaagttagttgattgcatgattgtatcaaagaaaatggaagtgcctttgatcaatttattagttgtctgttcctcagagcctcagcttgcagacagtccattctctccagatgcattctgtgtggtggctttccaggttcagttccatccctgagggcaatggcacttgcaattcaaattcagggaggagagactctgattcctcctttgtaatgcaggcacaactaatgaactcattacagctggcccatatgtgcattgcctattccttggtaaagtgggcagggagactgtagtctgccaacatgcaccctttcgaaggggctatcagtgaagaggtttcacttgtagctgtgtaagtatttctacagtgatggagggtctggggtcagtgctgagtcttcccagttcactgagattgggttgtacaattgggaccagctgtagttagtccattggttgtacttgcatgacactggagtttatgtaaatagctaagtgaagtattatggccagtgactccacttggattcttagcactattgaattttgtctccatgccttccccaggaccatgatgaagaagtgtcggattttggattaatatatttaaataagatgttttgtagaaatattttaaatatatcatttaaatgaagcccatgttttagaagtaaaaatattcaaaatatccaaagcagtttttactaaaaagtatggaaacaaagattagttttttaaataccaaaaattggagtattctattggcacaattacaagaaagaagcagagacagaaagactaaataagttagacccaattttgaaatgttttcccttcttcttaaaggagaaaaattcactggacttaacatgagatgtaaaactgtacttctagccagaaaaaaaaaaaacaaaaaaaactgacttttaaaagtcattagtatttatcaccaagaatccatttacttcaaatgactttttaaggccagttagacagtctctgagctctgcttagcagagttaaagccttcaggaaaaggttaaacacacagtctgtttaagtagatactaagtctggtaaatatattgaaaattggaactatattgcttgctatacttggacattttgagatgtcctataccatctgaaattcttatttctctttttgtggcctgttatatctagtagaaaaatacatatgcatacatttttgaatgattatacttattatacttgtaaacaacaccattattagaaaacggcaataaactagtgcatcttttttattcagaggatactcagacaatgcctaggttcgagccattgaaataattttcagtgagatctattttttaaaaatctttatgattcacaattaggtcatacagttgatccaattcagttaatagaaagttagaaaagattaaaataacttaaaacattacatactctcttagacttacagccaattgtcctgacattaggttaagatataacaaaacatgttttatatctatgtccaaagaccccaactgataagattcagtaagttctgctacttcaatataacaattcatgatactgctctgctgaataatgcatttatagaatagctgtgctcttatgtctatggaaataaaacaataaaccacaaattcacagcattcctttttttctttcttgacaagagtagagattgcaactttatctctgcaatatcttccttctgttacatttggtaatatgaaatctgaagcataattatcttccactgtgacttttaggtatttttcttaaatgctgtaagcctcagctttttaatctatagaaatgtcaatgataattgtacctaatctcaagggtaattgtgagaagtaaatcaagtgatggatgtaaagcacacaacattaggtttggccacaggcagcacagaaaaaaagttaggtgttactatcattactatatgtccagaacttactgggttcttttgagtgattggattggccattagcctaattgactgtgcatatgacataagcttaattactcaagagacttagtattaggcatatcttctcagttcaataattctcaacagatcctaacatggaaaccaactttcatggagtcagcgttatatagagggtgaggcaagctgtgggtgaagactgcagtgctgctcgctagttctagccttgtccaacttctacggacacttctgaaacttctctagtttcttcatctgaataatgagctagggttcacatttcagacatatcttaattcctttcatggaggacattgccaagcatacagtaggtatttaataaatgtttgctgactgaatagtcacaccctactggcaatgaagtaacttccagctgtgaaaattagtttttcttcctggaaaaatagtgtaggagttcttcaggagccaatccttcttggtacacttaaggaacatccatttatttggtattaaaaattgacgctttttggttttgtccatataattagaaagagtattttctataactagtcatggataatctatagcagcaactaaaataaatgtattataataaataaaatacagtatacttttattttaagaatttttgataaaattatatactttcttttagcataaatgccttctgagtttctcaccttctgttatgggctgagttgtgtgttcccccaaaatattcacatgtcaaagtcctaacaacccccccatatctcagagtgtgactgtatttgaagataggccctttaaagaagtgattaaattaaaattaggtcattagagtgggccctaatccaatctgactagtgtcctcatgagaaaagaaaatgaggatactgcacacatacagtagtcccatgtgaagttacacggagaggtggctgtgttgtaggattcttagttcaggtaagacaggggtccttgcacatggtcatgaaaaattaggctcgcagacaatttgaagggtaaggaggggagggtttactgggtgaaaaggaaaaaagtgaaacagggactctccacaaggacagtccctacacatgtgctttccaccttgtggattgaatcccaggtacaacccaggaaaaggaggagccaggctcctccctgctgcaaatggcatgaacttctgtggctctaccccagtgcacactcctcccagtgcaggtcggttggagtttctctggggacctctttacacttggctgtctcagcagtctacatgtcaaggagagagacctcaggagaaactaatcctgtagacatgttgactttcgacttccagcctccagaaccacaagaaatacatttttgttgtttaagccactgactctgtgatactactttttatagcagccctaacaaactaatatatgtctcatctgaacattagtccagatccaatattttctaaaaagttttacctgataacgctggtctgtcaggtccctacagttgccttttgtttgtatttcattctatattttccatgaattttctctcttcaaacaggtcaccagtcccaaagggacatgtcatgccttgcctgtatctgtagttatataccactgtatgtgttccccatggcatctagcatacttcctcaaactcagaagttagttgatgtttgataaatgctgtcattgattttatgtactcatatatagatgtggattaaagatagaacgaatttttagttttatggaatgattcaatttagtatgtgccttctgggattttcttgggtaaacatcatcagcaagcttgtttctctatcatgttatacctccttggcagagctctgctgtggatgattgttgttgaagtgaaaggagggaaagggataagattctgaaatgtgatttgggtccttttgaaaactgacatagcatttcagattccaaagtacttgtgttgtccaccttcatgaaaagttgagactaaaagaaagaaggtattataaagtttaaaacattggattgcctcaaatccaatctagagatgtcaacttagaaacttaccatgtcttggaaaatcttttatccatggctaagttttaacaatgggaccacttgatatcattggtgctgacagtgggtatgtgagagttgctgtgtctttaactattaacggtaatgaaataagaggtaaagaagtaggccaggcacagtggctcaagccactttaatcccagcactttgggaagctcaggcaggtggatcgcttgagcccaggagtttgagatgaggctgagcaacatggcgaaattcatctctacaaaaaatacaaaaattagcccagcatggtggtgtgtacctgtagtcccaactcctcaggaggctgaggtgggaggatcacctgagcctgggtatgttgagaccactgcactccagcctgggtgacagagccaaaccatgtctcaaatatatgtatatgtgtgtatatatatgtatatatatatatatatataataaaataaaaactgttttccaaatggccacattttctatttgtgcatatatgcacatatatgtaaattatgtacaacgatagacacaaaaccactacacccttccactgccaccaatatgtctttacctccctcacaggtatggatccttttccaaaacgcatgtcaaattagtcttggctaaatgcaaaatcatttacatatttaagcagccaaacctcaaagggctatttataaaaataaacattagcactgaaaatatttagttctgagtttagatcagtcagaaaacaaaaatataataagcccatcaggtcatatcaagtagggacacattttctggattcaatacaaattttgttgacaattttcaatgagtttgatttttcaaaacagatggctgccaatttattttccttttccaatttataatttggcaagtcccttttcttatgcatttgttgaattctgcatttaatgtgttctcatgggtcatacttgtgagaaactgattactcagtaaatttacatggggaagtaaataagaatgtgacttcaaggtaactgagttttatagaagaaagacagtctttttaggttcagaatcatgggacactgactattgtaaaattctcatctttccttgtcccaaattttagaacttttctggatagctcttttgccagtgaagaggcaagatagttcccagctttaataaataactgcggccaggcgcagtggctcacgcttgtaatcacagcactttgggaggccgaggcaggtggatcacttgaggtcaggagtttaagactagcctggccaacatggtgaaaacccgtctctactaaaaatacaaaaattagctgggtgtggtggtagctgggactactctggaggctgaggcaggagaatcacttgaacccagcaggcggaggttgccatgagccgagatggcgccactgtactccagcctgggtgacagagtgagactctgtctcaaataaataaataaataaataaataaataaataaataaataaccaaagtttttgccacaaaactaaatttaaaaatagataaagcaagaatagaaggaaagggcagagactaggaagtgaaagaatagaaagtcggattatgatttccattcctttgaggattttaaattcttgttttgaaatttttgcaggagctgccactgctaatttatatagtattagaaaggaattgcatcccaggaagtctctaatcaggagttaggaccttacagttgaaagaccccataatttcaatatagtaaacatatgtttcccactgctttctctagatatcaaagagtagtttttaagtgaagatgaaagttactatttgttcatgataactttaacatactactgggtatacttttgaatgtactgatgcagtgaacatatactttaccccagcttccctcaatcccattcgaagaggatatgaaaactgctgtcctgttttaatttttaaattaataagtgtgatcttaaatgtgcactttatgttttcaggtcagagagattttagaatatgaaatatattttgatatgtttgttacttagttttggcttccaaaaacctcaggatgtcaaagtaaccttgttccagaacagacattagtgacgccttatgcattcgaccacctcctgcctgtcctcaactgaagacctagtctagtctggtgagcaaaactaaccatttaaaatttagaaatggccaagggtcccagtgaaaggtgccaggttaggtttttactgtaatcacttagaaccataaataaagattgtgttcatatgcaagttatagaaaaccctattaaacggtggtttaaacaaatttgactttttatttttcttctttaacaagaagtcagaatgtatccagttccagacatatgttttgtggttccgggatgtttgagtggctgtgtttgtaattatcttgatttttaattcatggctacaatatgactcctataacatttgccatcacatttgagtttctagaagcatgaaggagagggaagacacagtaggaaaggaaggaagaaggacaaagtagtatcggtatcaggaaagcaaaggctttccccagaatttttagtgaacttttacttatgtctcattgtgcagaacagtgttatgtggtcagtcgcaggccagcaagtgtgagggtgtgagtttttaactttttatagtaaaagaaaggtgaaagaaaaatgaataggaacaactttgagtaggcaaaactctagaatccaccacaaacctatgtagagtttgaactacatgaatataatgaagcgtagagctgaagggaagctgcttagatcaccactaactcagtaagaattatcccataatcactaataagtcctatccaaggacaaacacctatctttgtatatattttaaaaacgtattgggttttctcacaaatttgattctagatgaatttggcataatacagcttttttttttttacttatctatatctaaaattccttattgatccaaactttcatacaaaactggaagccatttaaaactaccaatttgtaggaacagtcttattttatgagaattcattattgtgtatgtctataagactcagaaattgaagaccttttgtaacgtggacacattatacccagcactgtcccatgaaagagagaaatttgtcatgaaatattgagcctccaatcattgcaaatatcccaacacaacctgaaggccagtgttgatatggaagaaattcctatttagagtagaagatggatgtcagaagtctattgcaaatagtataaaaaataaagaaaacctacaaacattataataattgcaagcaaagatttggatccatacccagaacaaagacctgagtggttttggttctgttgtgtgagttgtagttcaaatattcgccttctgttcattaaaggcatactcagagcaatgctgggaaatacagcaatctgtcttgcatcaaagcaatcccacagtgagatctgcccagcatatattttcctggcatgatgtggtgagattcagtctaagcacgttacttcagttttgatatcacagggaaagcacagaacatatcttttcatagtaccacagatttttgctgcatcctgtaaatgacacatgttaccactttttggtggatgagctccagggctaacagagcctgcggtttgtagtgttcctagtgtgagaaagaggttgccctttctccagcgctctgtgctcccattcccctacattgactaatctaactactcagtaattcaaggatttctttcaaggagaggacaaaactcggctccacattgcataattctaacacccttgagagagagagagcacacatactgacatattcctaggatagaaaaaaatgggcaatgttttgaggaagttagtctatgatgagggagagattagaaagctggaaaagtgttgtaaaggttgttttactttaataaatgctggagtttgtttataagttataacaacaagctaatataagattttaattaagatagtagaggttatatagccaatggtgttgtgctcagacgtcattggagtatttaatccaccgatggtcaaagcattgttgggatgaaataaacaataaataatggaaaacaaaacaattgaaacccctgattgaaattctgttgttggaaatgcctttcaagctagttgtggaatttgcaagaaaactagtatttatagtgacagaattaatcacaaggaactgtcgtagaatgcatgatcacatatccctgcctgttaccatgtgaggggcactgtttctctgggagcaatgtatttctacactgcgttgacattggacttgttttgaccaaagaaaagtgagatcagaaatctgccatgtcccaccagcagctataagagccactgcatattttcccagctctcttgttctttctgtctgccacaaaattgatatttcacaaataagatcaccttgtacattctgggcccccaaaataaggagacagtggaggagggcagaaaacattaactcagggcagtccaccagaaatatcagggagagataaattattactgagaacacatttttattgttttaagtccctgggattttagggttatttgttactgcagcaaagctgactaaaatgcatatttgtatgctttgttattttaaaattggacatcacctccactgtactccttcaaacagcacagaataatggtatagtttttttttttttttctctctcctcttagtggagcacattttcaccattcagagcagaaaccttttaggttatagcttaaagaaaactaaaggagtgcaaaatgctaggccttttcctccttgtaatgtttgaaaattcttgaagttggtttgtttatttggaggggatgggggcataaacagtgtaagctcaatgatcaatgctaacattctctaaaacaaagactattgggttcatagcaaaccttggcaatgtgagaaggggaggtatgtgtagaagagattatatacctactttactcgctttaagggtgcagtaaactgttatggcttttttgaacttgaatgttattatgtgtggcatatcttataattatttgtgctccttggaagactatttgagcctcctcattccctgcaatcttttaaggtaattgctgactgcaaggaaagtgattagtaaggcagagatgaataactagaggtctcttgccacaatgttttgccagactaattcaaatcaactctgggatgtaggtcttttgaaatttctctaacttttcttttcttttatacttctttgaaggaagatttatcgtctcaggttatgcatgtgaaatatggaacagattattttcagatagtgtcccaaacgctacagcctcagaactttcctataggtgatgttctatagaaaatgtgcatttctctaggatgagattaaccatgggaatcttatgtacagtcataattaaataataaggtccttgtaggcagtctatctatgaataaatctttgtcttgttttaaggaagcctgctaaaaatcaacacatattgccatatgaaagtgaaatttgcagcctgaaatgcattgctagaataggttgattatgatggaaggacagacagtttcttgaagaaatagaataatattcaggcaacatgtcctccatatgtagccgtcatattagagatgacaaatggggacattccaaaggtgtccagattgctcaagtcattttgtattatgcaagatggagtactcaccttaaaaaataaaaaataataaattataaaaacctagaactttcggagttcacaaattgctgagctttcaaaaaaaaatcaataatgaagtcaacatgtaaccttcatgcacactgtggaaatagagtgacacattgtagcttatagctaaaacacatctgagtttgatttttatgagaatgttcttatcacactgctgtaaaactgcactgttgtcatcaagtagatcaacaaaatgggcataacatttagtgatatgacatttggtgatattaactcccttgggattagcatactctgctgaggcatagcccttttatgcaattttaactattcatgatagttaagggctggttaattaacaatgtttcaaagatatagacaatagactgttaaatttatatatatcagaatcctaaatgttgaccaaagcaaaaatttatcaatatgagtttgttagccaaaactgttttcacttaatttagattttattttgaaaatgcattccaaatacaaaaactattacaatgtttgtatcttattaaaaaatgaatagaatcatctgtctggacatacagcaataactctttccaaggcatacctgtcatttagtttaataactctaatgagatccttttattgccatctgtgtctcagactaataggcatttcaggctttataattggaaaaaaagagacaaagttacagctaaagttgattaaagatgacaacaacattataaccatatacaaaaacgaataatcacaagttatgccttgagaatggtctttttaacatgaaaccatggaagaaggtataaagttcatgtatatatagtataatatctcaaaataactggttaataatgttgtaagttttatttccttaagatagtcattacttattccagaaatatttgcataatggcaaaaatagtgtatatgttaaatcaaaatactccttcacttagccaatgtttattcaactccttttatggaagtaaattctagatgctaaggattatagcaggaaaaacaaggaaaagcaaaataatgacaaaatctgctgttatggtactacattgtagtggaggaaaataaacaatgaaataataaaaaaaaaagtttgtcacgtaatactaagtacacagggaaaataaagcaaggaggggtaaaaaaatgaaatggagcaagggtaatatttaaaaatggatgctcagggaagcctcactggagaagtcattgaaactcactggagcccacagtatcctggactgaggagaaggtaagtacaaagaccctgaggaaggagcaagcctggaatagtcactgagctttcaaagcaccggtgtggctgctgcagtggggttggaggagttgtatgaaatgaaaacccttggggagccagaggagatcatttaggggctgttggataaatgaagttgttgaatttttcttcaagtgagatgagaaattttagaagaattttgagtattccgtgttatctgatttgtatttaaaatagactgtggatcctagaacaagtgtaaaagcaaaaggctgttgaaaaaaaatccaggtaggagaagatagtagcttggaccagtatggggtgatgaaggtcctgagagtggtcagattctacacatatctggaattaaagcatacagatttgctgatgatttggtttgcaagaggagtcaaggatgatgccaagttcaaaataattgcccgttttgtagatggcaaagccaaaatgaatattctctttcaaaagtaatcttatatcccagggttctctaagccgagaacattggtaaacaaaactcacagattctgcaatctggaatgggaaaaatttcatcttcatctttataaatttagcattactgtaattataaaggtagacaacaaaccactgtagaattaacaatgtctgtagctttatcaccaatagaattcacatacgtattcatattaccttatatttggtgcagatatctgaaaatgtcatttatactcatcactacttcccaataattactaccaattatatctgctgccagaccttatgatttaatatgttcattaataagcatatttatcaaaattaaaaatatctttataacttctttatgttttctttgtaatagtatgtgttttattttagggatttttagacattatcctgagaaggtcttcacaggcttcaggagaaagtcaaaagggcccatggcacaaaaatgttaaaaatccttttttcagccatatgcaatagtatacaccattggagattataccagcatgtgctctcaaggacaataggaaaaataattatcaagtattgcgtgcttactatatgccaagtacattatctaatttatttcccatcacaaatctcagaggcagagattatccttgttttatatagaaaaaaatatcggcttggaaagaataaataacttctacaaggtcatacatcttgcatgtggagattcaaattttagtctgtttcctaagtgcatcctcttaaccatcaaaatatattgcttcccatcatggaagaatgaaaactgatgatataaaacagcttgtaggaactctctatcaagaaatggaagctgaggcactatatagccacttgttggggagaaaagatagaataaaagcagccaagcaaatattttttttctttttctccctccctccccgctccctgtttcccctcagtcctccctcctccccactttccttccctccctcctccccactttccttccctccctcctccccactttccttccctccctcccttcctccttccttccttccttccttctttccttccttcctttgttccttccttccttccttcctaccttctcccctcccacccttcttccctctttatcttttttctgcttttccttcctttttttctctttccgttttcctctgggcaataagcattattacttttctatcatttgaatcctgtgtgttcattggaaagcatttgtgccattcacagagatggaaggattaaggaaaagatttgctagaatgcaactttatgaggtaactgctgttaacattttgaacaccatccttccacaaaccttatattttatacatacttacacaaaaatatgtatataatttcacaaaaatagattcaaatagtacatgcttttttcagaaaaaaaaatagtatccccttgctcttacactgcattcacaattgtgtcccactcctcatcccacacaccccacttttagaagaagccatcatatacacttaatgtcctctcctgaaaaatatggcaagggcagtgataggattcagttaaccattgactgatagtaaggattcatgtatcaaggtgtgggctgtgttcactgtattctgactgcaggggtttcacttgtggcccccatgtttatcaatccttactgagcaacttttggcaacatgcttaacacacgaagatctttctttctccatgtgtaaaatgaggatagtaataataggtacctcactgagtgattgtgaggcttaaatgagttattacatgaaagctgtatacaagtgtcttactcaaagtaggaagctgtaattcttgttgctttctcacagtcttgggttggacccttcacctcaccagaggagggcctgggtcacaaattgaatcaagtcccatgggagtggctcttggttgatcaaccagtaggtcagctcaaagtccaccttggaccccagcatattagtaacattctttgcattttataaaggaaaacattgtcagatttcaaagaacttgaaaagcatatcaagatattgtttaataaataggtgacacaaactcatgtgatatatactttttttcagaaataaagcaatacatgccaaatgaatacttaatttcataatgatggtatgtcatcatagttatactttatatgttggatatctatattatatataattatacataactgtagttagacatctaactggacttttgtttttcaaattttattttggaatcaagggcacctgtaggtttgttacaaagctatattgcatgatattgaggtttggggtgtgattgaactggtcacccaggaagtgaccatagtatccaataggtagtgtttagctcttgcctccctccttctctagtaatccccagtatctattgtttcccatctttatatccatgtgtgcccaatggttagctcccacctataagtgagactatgtgatatttagttttctgtttctgcactagttcacttaagataatggcctccaactccagccacgttgctgcagaggacatgatctcattcattattatggctgcatagtattccaggtgtataagtgtcacattttctttatccattgcactgttgatgagcacttcagttaatcccatatttttgctattgggaatagcactgcaatgaacatatgtgtgtgtgcttgtgtccttttggtagaatgatttattgtcctttgggtatacactcaataataatattgctgggtcaaatggtagttcaacccttagttctttgagaaatctttaaactgtttttcaagtatttcatttttatcactgtgattagagcttgctaagaaaactgatattttaagtcattcctacctctcatttttatatttttgtgtgctccaagattggccaggggctatacagaacaacgatttttactcattgctgacaatttgtagttgaccaattgaggcatagaaaaggaagaaaaacaatacaaaaatgaagcataatttactaggaaagattgtttaacagtattctacggcttctctaacagtttcatcacttgcagtggtttcatcagcttcagtatgttatgaagaaagcatgaaaggtgagatgttatcacattctaaggaaaatatttacttgccaagtaaaagagtttgcacctattttcacttaatctgcaagcctcagttaaagataaaacgtgttttcattacaactctgaaaatgtcagagaatgaatctggaaggtaagtagattggaactattttaatcactaaaatatgaatgaatattgtatttgtgatttttaagccattattttacttttggcttgtgtaagttattgtgcaatgagttcctcatatttagtattcattgtttaatatacttatttttattcattcatgaatttcaaagtttcctaattgagcatttggtgtgacagcatattcatgatttaacagacttcaaacaaatctcttcacagcctccatattttctctattgccttaggcagagtaggggggttcaaaactttacctcctggcctctaagagtctcagctgggcctgagaattaaattgacataagatagattaacaggagaaaagcacagatatttttacaagtacaagggagcccccacaggaaatgacccaaagaagtggccaaagctaaatgcttatataataggctgaacagaggtaggcaggtgtggaagtaactaaaatctatgggaaggataaaggaaagtaagagctattttaagaaagtctgtttgtacagatttttctgggtttcagctccccatctctagtgacaagaacatttcttctttcctggtaaggggaaagcatttttcacatgagagttttctcccatctctggtgataagaatgtctgtttatttgtcctcctatagggaggccagagttttccttttgtatctgctggttttttagtctttagctcaagattcttgttatgccaaagtggcatattttagggtgacgtattctgccatcctgcagcagcaatcctctgagagcaggttagccagccttctccttcttcaccctaaagccatgatgctttcccaggcattcagtattgttaagttgagtattattcaatacatcatcatttttcctgctctcagtggtacattgaacttctgtcttcagaaaacaggcagtaatgattctgatgtccttgttctgagtggtaatttatcactttaagctatgtaatcccatcagcttgtaagtatggaatatattatttttcactaagtacatcatcttgtacatgttcccattgaagcttatctcttgctttttaacctgttagccttttgaaattggtatgtactttatttcctttaggctcagagttacttcattatcaagaaaagtttatactgctgtaaattcggaaattatacttcttctagatcattttaaaaatgctaaataaggtcattctcacgacttatcacaaggatatctgtatattcttgcagtttaccttaatgtagtatttgcacttgaagtctcttcaaagccgtctaaagaaatagtcagatatgtgtacatctttgtcctggaatcacagcattatttatattagtgatcatttagaaacaagcccaacatccaacaatagggtactacttaaacaaattatggcgtttccacattacataacagtcatgaagctggagagaaagtttaagtaaagttaatggaatagggagatattcactgcttcattaaaataaatgtacagattatagtttgtgtaagcagcaggattacaggatttttaaatgactttttgtaggcagaggaattaaaggggatgaattttataaaaataatgatgatagttaataattgatgtggtgagattatgggtgacttaggttctttttacttcccatattgtcaacatagattactgttgccatcaagagtaaataaataaataaataaataaataaataaataaataaataaatggtggcccataaactgacattttattcctgtattttttccctgaaattaaggagtctggtgcaaaacttcgccaaatgcagccatattcaatgaacccactgattaaacacacagccagaattctttcagaatgtcctggcatttcacttgagaacatttcaaagcaattgaacaaaagcaaagagtgtaccaggaaggttacagtaggactgaagggaagaactagaactggaaaagtcagagggaggagtggagaaagaggataagaatcaggggtgatcagggagtggagaagggcatagccccagggcctggccgtcctgcaaggaccaaaggaaagaatctcaccttagaaaactgttcagattctttgaaaatattctgaccttaatttttcatgataccttataagtaaaatgcaatgagagcctactgtttttttttttttttaactgggtactttatggaggaccaatgttttaaatagacataaaagcataaaacatgatttaagaatttgcattggcaatgcagtaggtggattctgaaagaaaggttacatagttggttgtataccaaaatgacttccagctataaaagggaagaaataagaaccacagttcctaaaatgagagaaaatctccatgattttggcaaagggggagcaagcttggaaaatattttgtcttttttaatagcctgaagagtgatcatttctatgtgaacatgcctatgcaaggcccacgaaacaaaaactgttcctcgtacgtttgactcaaattccatcttgttctgccttgtttttgaagtcctcacgttttgtcgatcttgcttcactttctgtggaaaaataatatgctattcatggttgtatgtttacaatgtagaaaacctcatttatttttcagttcatagggcttctggatttgtaattagttgctgggaagtaaataatggtatgttttattttgaatttagcattatacaaaatggcaacaggagatatgtcttactgtagagtgtctgttcatgagagttctttatcatcacgctaaagcacgtctgctgaccatttaaaggaataacaaaatactattaatgactaatctcgtcccccgaccctccccagatatacacagttaccaaagaaaaggcgctcgacagtactggggaaattatttctgttagaatggtaggccctttagaaattttaccatgattttttgttttaaaagtatctgtacatttataagaacaaaactgattttgagaggcaccctcctctatcactagtatataattcaggaataaaaagaaggccaaattataaactatggagtttatattatctgcagtcatatcaaataatatgaccaaataaaataacttgtgaatttcctaaacataattaatcacattgattaatgacctgaattaactgcttgaatttagtcaaatttgttgaagcaagtagtcccaagctatgttttgagtttagattctgtttttttcattataaagtgaagacgttttccatattggaaaagtgaaaactgtggattgtttgcaaactagccaacaaagtacgctagtcagtttatcttggcaaattcacatttaatgtcatccgttgccagaaatctgttccgtaatgatgtcatcaacagtttgggatgagaaaaggctaagagaaaaagctgaaagaatgtagacgagaaagtaatccctacgtgttctactgaccatatgtccccccagcaattttacttattgggctatcaaactaaaatcctcatttcaatccggtagtccttgaagtccttaagttcttttctgttttcccccataatttcataatgataattatttttgtcaagctgtttcattaaaacattaattagttcctataacttgtgagaaaggtgttgttattataattttagatagaagcacaagtttaactgcatccttggcatcctgtatcatgatgtctgtggtggaatgaagaaataattagattttttggttccgtgttatcatgacatgaaaaaaaaaaaacaaaaaaaacaaacttgtgcttgaaaagcaaagtagaagtgaaaccttccttgactttgtaatggcatttatgctgaaacacagaactaatgccatgtcaacataagtgtatgtgacattcccattaaaaagtattcaattgctctagagacccagggactccgtgatattaatggagacatcaagatatggtctttgaatttctttgactagccatctaaaggtgataggctgaactgtctttaaataccatgtgtgagagcttaaaatctgggttaattatatatacaaatatatgcaaatttaaattgtatgtgtcctacaagtattctaagactgaaaatattcttgtttgaataaatgtggttataaaatgcattttataatatggatgtttctcttttttccagctaattttttaaaatttgacgtttcttgaatgaatacttattatataccttctatgtgccagatgggctagtcttggatatgtcttcactgaggttattgcttataagggagaaaagatatgtgctgaaatgtctatggcacaaggtggaaagtgagaaatataaaaaatgtatttacaggagttctggggaggaacataagactgaaccgggggagatttttgtagggaactcatgagaactaagggatagcctcgatgctgaggcctgcagagaccagacatgacttaggacgtggatgaggctcacatacttctgaggcctgggtcatccctttgtgctcatgggatcctgcccatcatggtcactaaattcctttcaatccgtgattcttccataactgtcacgtcaaatcacttacttcaaatgacaaatctttcacttattgcaactgcagcttattcaccatttcagttcgctcactgctttctctattcttgctcacatttctgtttctactcccaggacccatagcctggctctctctgtctttttctgttcaaagtcctgagagaccatgtcatgagtgaactggctaccaccagtcttcttgaatccgacacccttccctggtgtagtcacctctaaccaggggtatgaaagcaaatatcttgctgcctaaacacgggagtgtttgccttggaatgggctgtaaggactcctttccaaagtgtggcgagtggcaccatccttgaaaatggttcagggatggcattagaggagaaagatacatgaactgcccttgtcaacactcttgctgtccaaagccagcccctccacctgggtactgatgtcatccctgcctttctacaagagctcctgctaattggatgatttccctctcttgagactatgatggggattgagcataatttttaacaatctacagccccatctgctaagaggtcatggagaacacatggaaatcacatataatacaggtgtaaggcttctcgtgtatcttgatgaaagaaaattactgaagagaaaataaaattgatttttgagtgttgaatttgccaacccaaaagaataaagtgatgatattattaaatatattcatataggaaataaggaataattttactgaaattgtagcatgaacttagacatacatcctggaatgggagatttgtgatcatatttggccttacttatctaacatcttattatctttatccttgagccactgattcttaatgctgtaaacactgacgatctgacattgacagttgtgaactgcataggcagtattgcagagactgataaaaatgtttgcactattagaatctggcaaataagattattgtattaacttctgaacatggaattttatatccagtcagaatcccacgtatttcagtccaagcatcagtgcttatactccaggcattatcttgtagcatacactgagataatatagctataccccaaaatgcagagtcatagagtcagaaggtacctaaaattaatgtagtgacatcacccatgtcacgcaaaacttattttttcttcccaaggtctcttaagccttttttgaataaattcattgccaaaaggtgtagtacattaaggcttggtcactgtaaatgtcaaagtacattcaataaatgatttttctttgacccatagcatttttatttttcatttaaaaatttttgagataatcttaatggcatataataaattcaacaaatggcatgtggcttttagtaatctctttctgcatgatcaagtaatggtaacttgaactatatggatctgccatttttataggtaaaaaacatcagccatttcatttggttcaataagatatattttaaaaattggccaggtgcagtggcttacacctgtaatcccagcactttgggaggctgaggtggtcagattgcttgagctcacgagttcgagacaagcctgagcaacatggcaaaaacctgtttctacaaaaatttaaaaacattagcctggtctggtggctcactcctgtcatcccagctactcaggaggctgaagttagaggatcgcttgagccaaggacatagatgctgcaataagctgtaatcaccactgcactccagcctgagcgacagagtgagacccgatctcagctcatgttttagctcatgttgtgaaatagactctaaatcaaacacaacgcatggtatatttttttcatttggataggtatacataaaccatagattgtcttttcagaagtaataagtccagcaaaaaaatggtgagatcttattccctgctgtttatgacaatactcagactcttaggccaatttagcttctgttaagttttatgaaagttctttttggctttcttccttgagaactcgagaattattttaggatgcagataaagtaccacatatgtacataaagtcagcagtctgcttcagttaaaaaattctggacagttatgcttatgcagaccagaaatctattattactggaggaaaagggaagcaactcctgtcatgtggctaaaacacaatattttaaatatccaaggtcttttgtaaatttatttcacagtacattctgtggttcagaactacatatagttctggtgaatagacgcccatatttcaagagttgtataatattcttcaaataaaataatgaagtcttcaggagtagatttgtgataaagttattgtcttatagaaagaaaatggaaatgaaaatacttgatacaaaattcacatgtttcgtgattctcaggttcaggttaccaaatacatggatcctcaaactcttgctgctacaattcaaataatctacatttttttttcttttagggcaagatctaaggaacctgaattaacataagatcattttctagtcccaaacttgtaaatatggtttaattttcccaagtacattttgatagagcaatgtaagaaatattatagatggatctaaataattgactttccaaaattaaagacccttattcatcaagctttttgctcttgaaaggaactgggtttcagacaaatctgttaggcttcttacacaatgctagtcaattaggcaagtgccaaaaggatctcattctgagatacctcaaccttagaatgagccttcactgtaatcatgctccccaaaggaatggaaaaaaaaagtcaaagctgcgaactgaaaaaaaatactgcctttctaacacactgggaacacagagatgaaaaaatatagaagacagtttcatgatagaaatgtgtatgttaacagccataaacatagcaaaatcctgaccataataggtagtagcagaagtctttgatcaaggccattttccatgactgtcaatagttactaactactcagataaaaggccacataagcttattgttttaacattcctagtcaattcagtaatcagttagcgttaataggtatctcaagtattttaagttcagtccaaataattgactatataaaagatgcacaagtgcacctttggatgattacattctgttctcagacctgtcatcgttttcctcaaaatcacattttttttttaacctgcttctgtgtaatttgatgatacactgtcagcactattaattgtgggttagcagatgttcctgctttaaaacttccttgaaaaatgtgcattcatgaacaagcattaagtatatgtgaaaaaccaaagaagcccacaagtattagaactttcttcagtctgtacatctaaatatgcaagtgcaaacacaagaggcatcacccacctcccaccttttaatgaactctgcatatttttgtttggataaataaagcagcaggacattcagatgaaatactttaaaaatgcagaagattattaaaattgttattaaaaacaaaatagaaaaaccacctgaagtttttccaaaatacggttggaatctacctatttttttttttcatttttcatttcgttactttaggaaataaatgccaactagattctaaaaaatttgctttgtacaacttttctctttttttctttaagcaaaagcagaattaactgaaaagaaaagaagctgtttgaagaaacagctgagcctcaggaaggtcagtggtgtaggcaggccttggaagcaaccacaaccagcgacttacatgtcacctttctcctttgctacaaactagttttcttcataaggtgtaaatcctgcctgcaaatacctcctgacttagattgtgcaggtttagccaccagagagaggcaaatgactctttcagaacctaattcagaatttttcttaacataatccatacaactaccgacgcagtcagctccttcccaaagggacacaatgcagaccagacactgcacctggaggtgaggaggaagcctgggtctccaggctttctgggtggtatccttgcttcaccagctcaggcaaggtatgttgctccacaagcctgcaaactaaggcctaaaaactaaatcaatggttctcaaacctggctgcacattagaatcacctggggagccgttaacaaacaccgacgtccatattccactccagaccaattaaatcagaatccctgggcatagggcctgtacatcggtatccattaaatgctcccaggtgattccactgtgcagccagggctgagaaccactgggctaaatgataaatttaaacttaatggaggaaaaacaagataaccaccataaccaccattaaaactgcagtttaagaaaagtaaaaccatatagaagtcctaattgatctcaggcattttaaatcagttaaagttgactttttccaataacttgttcacaagaaacaaattaaaaatacattttgcctcttcctgtttgtctaaagattttatagaactatcttcatatattttccagtcttggatctaatccatgcatattgattagcggtgaatttatttttataatattaatttggtggatcttttttccaatgtcatgttaatgcatagaactcaaatattatctcactctagtctccacaacagactcaccttatgtctttccccattacctctactctgccccctgccctgtcaacatgcacccataattatatgtgcattaactgaactcagataacaagagcattccaccaaattcagccagtttattagggcatattaggtttcaagttatgcttattaacacccttgttaggaattgcatttttgcccagtggaggtagaaacagtggcttttgagttttcaactctgtccccttctatcctgcaatatgcagtcaagacatacctttaattgtctccatccatttctataggagaaactgggtttaaacttccaggagtgatttgtcattccctccacccccatcctcatttcaagcactaacatggtcttttccatatgacatgctgtgtttctgagtttgataggtaggcaataaataaatgtttaacaaaatggatatttttgtttcaggggttatttggtgagactttgaatgttacattttgtctatgtgttagaacagttcatttgactttcggtataaaaatacatctgccaaagacagtgattttacttggagcagttaagctacttaaatttgggtcaggatagcctacttttaaaagcataacatttatgtctctttctatgcaacttataatattcagatacttagggagaaacacctgaatactgattcaggaagacacatgtatactacatattgtatttaggcacctggtacatttacacataaagcagtggcttttagagagagaaccagacactttgtttaggcagctgtcagaatatgatgaatgctgtcagtggtttgcgcacctcagtttctctcccttgggcaccactggcttccctgaaagtatcctatagttatcaatatcatatgcaagtttctctcttgtatgtctatggaatcctagaatgtattagaggttgtattaggcttctggaagaaatcttgtaaatcaaaagaaatcacatgttaaattatattcttccttaaataaggatatgcatatgtcatgactaagagcaagtgacaccagaaagataattgaactctaaaaaacgttaagtatgtaaatgaatctcggcttttggcagtccaccatgccattttcacaagcatgctttcaccttcttcataacataagcattgtgtcaaacactttatttgaatttaaattttaaatttaatgtcgtcaataatcctatgaagtatatggccgtgtgtgtgtgtgtgtgtgtgtgtgtgtgtgtgtgtgtacatatatatatgattttaaacttaaaaaaaatatatatttttctgataagaaatagactcagggagattaaggaagttaaagtttactgtcaattttgagtagatttaatctcaaagctccaagttaaattcttttcaggcttaggaaatccagactcctttaggaaccatcagagtatcagaaattgtcaagtaataaaaatagttttagttacttataattttacctcaaagaaattcataaaaataaggcattttaaatttggataggccattgtgagacagttctctagtcatgcaacatcacacttttatccgcctagagaagcggaaatctgttttactctgtcactcattccaatgttttatcactttcacagccaggaaatggtgcattaccattgcaaaacttgaatttcacatgttgttttagctcatatattcattttgtatgttgagaagaaataacggttagttgggaccattcttttctgtttatttgtagaccctccttctaatgctgaatgatcttttaacttggcactgatgcaccatcatttttcttttccttatagttctctgatgttctgatccaccaagtgattagtttttgcactttaagtaattattattattattactatttatttattttttgaaacagaatctcactctgtcgcccaggctggagtgcagtggcgccatcttggctcactattattactatttttgagacagaatctcactctgttgcccaggctggagtgcagtggcgtgatctcagctcactgcaacctctgcctcctgggttcaagcggttctcctgccttagcctccagagtaactgggattacaggtgcttgccaccacacccagctaatttttgtatttttagtagagatggggtttcaccatgttggccaggctggtcttgaactcctgacctcaggtgatccacccgcctcagcctctcaaagtgctgggattacaaatgtgattaagtaattatttttatagaaatagaagaaagtctatgatttctgtagttagaacacatcaaatttcaacgtggcaaattaagtaccaggctaggtaactacatgttgctttccccaatagaaccccatctataaataaatatccttttattttccagtggagcctagaatattttcttaaaagcaaacttccaatatgaatccaaagacatcaacataaccagatttttttttttttttttgagatggagtctcgctttgtggcccaggctggagtgcagtggcgcgatctaggctcactgcaagctccgcctcccgggttcacgccattctcctgcctcagcctccagagtagctgggactacaggcgcccactaccatgcccggctaattttttttttttttttttttgtatttttagtagagatggggttttactgtgttagccaggatgtctcgatctcctcgcctcgtgatccacccgcctcggcctcctaaagtgctgggattacaagcgtgagccaccgcgcccggcccataaccagatattttatcagtcattgtgacttagaaatctcatgcatctgtggctgaatatttgacaacagttttctttttttccccagatatatgaacacaaatgctttcattgccacatatacccttggccacagttagatgattgaattataactgagtcatgcctgtgctgagttttagcagagtattcctgcaggatccaacaaggataaaaattgatgtccctcttgaaacagagtggtacagatggtgcagctttatagctgtctccaaataccaaatgccaaactgctcctttgataaggcaaggcggtgtaaaggtttaaatatagcctcttggtggaatgtcagtgaatgatggatcccagttacaaacacaccaaaatattctctgtttaaacattttttacaaccatggttgtgaagattctatatcaaggaaattatgcatgggggaaagaacaggaaacttaccctgaaaaatctatgtgtatactaacaaatcagttaaatttggaggaggggagtgtggaaaagtacaatggcaactagtaaagtcaatttttctgctaacacctgccacaagtagaatctaaaaatgttacgttaaattcacaagacttacatataacaacaatgaaatagggaacttggctttcctaaattagcttggttatcgttttacagcacagttttcaccaaaatgtcaaatgatggtcttgtagtaggagaatggcatacatatatagaatggttaacttgatcattttatatgtatgcgtatatgaatttattcttttgataaaatatatttttaaagtattgctaatattcatatccatcttcataatttgtactagggagatgaacagcaagaagtaaaattttaaagtacctgagaccttgtcaattttttgttaaaactggttaaagagccataaggaaaactggaattatagcaaacagtaggttcatgttttagaacctttaaaaattagctagtgaattagttaaaattatttcagctaattttgaaataattgtgaagatatacaaaaagaaacatattggataatgtaaacggtgtcagcaagtaaatcaagacaagaaagtcatcaaataattttgaaagatgtttgcagttattgattttatagtgaaaataaatgattaccaaactaaaatgttacccctaaagtaggtttataagtataccaatgagaacaatgttaagaaagcagcatttatttcatcattactataatgctatctctcctatacctggaccattgtaacactgagcacatcagaatgtcccacagaaagataatgttatatttctacatatggtttgtactttatttagactgttgtattttctgtaaatgtacttacctcttagaggcacggtagcctgactatccagttttcactcatttctgctttacaaatcacattgacttactgatttcagaggatatggctatcaatctgaactagggagaatatatctaatatttgcagcaaactcaaccaaataagctcctagtgagatgggttttaaaaaatcattttttgtgatttaatttacatttctaaaagtttctgaatacaaaatcaatgtgcaaaaatcactagcatttctatacaccaataacatccaagctgagtaccaaatcaaggatgcaatctgattcacaatagccaccaaaagaataaaatacttaggaatacaactaagtaaggagatgaatgattctctacaatgagaattacaaaacttttgctgaaaaaaattagagatgacataaatggtaaaacattccatgcacaaggataggaagaatcaatatggttaaaatgtctatactgcccaaagcaatgtacagattcaatgttattctgatcaaactaccaaaacatttttcatggaattagaaaaaactattctaaaattcatacagaatcagaaaagagcccaaatagccaaagcaatcccaagcaaaaggaacaaagtttgagacatgcattacccaacttcaaactatactacaaggtgatagtaaccaaaacagcatggtactggttcaaaaaataaacatatagaccaatggaatgggttagagaacccagaaataaaactgcacacctatgagcatctgttcttcaacaaagttaacaaaaccaagcaatggggaaaggactttctattcaataaataatgctgagataaccagctagccatatgcagaagattgaaactggaccccttcctttcaccatatacaaaaattaactcaagatggattaaatacttaaatctaaagcctaaaactataaaaaccctagaagaaaacctagaaaacatcattctggacatagatcctggcaaagatttcatgccaaagatggcaaaagcaatggcaacaaaaacaaaatttgacaagtgggatctaattaaactatagagcttctgcacagcaaaataagctatcaacagagtaaacagacatcctacagaatagaagaaaatatttgcacacaatgcacaaaacaaaggtctaatatccagaatatataaggaacataaacaaatcaacaacaaaaaaccaaacaaccccattaaaaaaatgggcaaagaacatgaacagatgcttctcaaaagaagacatacacacaaccaacaagcatttgaaaaaatgctcagcataactaatcattagagaaatgcaaatcaaaaccataaggaaatcccatcttacacttgtcagaatggctatttaaaataaaaaaataacagatgttggtgaggttgcagagaaaaaggaatgcttagacattgctggtggaaatgtaaattagttcagccactgcagaaagcagtaaacctgcacatgtacaccctgaacctaaaataaatgttggcaagaaaaaatacattttaagtgtaacatttgatgagttttgataaatataatcacttttacattatccaatcaagatttagaatatttccatcaccccttaaaattcctttgtgccacattttcaatcatttctctctgcttccacttcagaaaagcactgatctatttctcttacaattcattgtttttgcctattcatataactgatactttggattcttttatttagcaaaatattttaaaatatatctgcattgctgtatatgacattattttgttgttttaggaaattattctattgtattaatatagtaggtttatcaactcatattaatttttgataaaatagtaagcatgtttatgggaaattttcaaactgttttccaaaagtcttaccatcttacaattttaccagaaatttgtatttccagctttccagtgtttggtcatgtcactcttttgtcaaatcttgtttctacaagtactgaaaaaaatcttattttttttattttttaccctgttaatgtaatagtttacattgattgatttcaaatattgaagcacttttgcctttcttagataagctctaccttacaatgtattatcatattggtatattgtcagtatttagttattactaatattaaatattatagcatattataaaacatacttaatattaaaaacattaattttgctaatattttgtgaggattttggtatctgtgttcatgaaggatgtaggtcagcaatttccttcttttatgatatgattgtcagatttcagtatcagcattatacgagactcataaaatgagttaaaaatttttcctactttgttttcagaaagatatatgtgatgtcaccattaatggttcattaaatatttggtaaatttcatcagtaaaagcatagagaattttcttaatggaaaggtttattattaactactgatccattttctttgatgggcataggcttttcagattttctgtcttcttcagttttggtaagttatattcttcaaggagtttgtttattttgtaatttgtcatattcgttagtataaaattaatcatgatagcccattatttatttttcttttaatatctgtagggtctgtaatagtgtcctcctttggtcttctctttttgtggattagttccctaagggtatgttatttctaatgtatgaccatgtaaagatggtctaaagataccagcaattaaatggcttttacttcctgtgtttctctccatcgtactattcttttactattttgcttagagggacaaactcttctcaatctgtatgagaattctatcactaacagttttagtaccaaaagtcatgagtcccaggaatttagttacttaattagagtaaaccaggagtatttggcatcctaattatatatgacctgaactgaatcatttggtaatcaaattattgtcctacaattcccttaatgggatatttttcttaaaaaagcagcaatgcagatcaatcaacatagctgtatacatctagcttttataatgctatcaatcctctcgcttctactggggattcattacatataatatcttctttaattctcacatgaacctattctcatgttatcaatagttaattgaggcacagagatattaagtaatttgaccatggtctctaacctgtgtattaacaaagtgataattttatttaggtaatctaacttcattacctgtgactctgtctattctctcagtaagcatcttaaagtaaacgtattttatgtttaaacctcaaagcaattttgacagtaaaaaaggaaatatatatatgtgtgtgtatatatatgtatatttaacaatgtagattaacattgacaatgtgagattgttttggagtagaggcagagagttatcctttcattgtatgttagaaacttaaaactgttctctttttattgctataatcagcatggcatttcttttgtaactgaaagaacagaaatttgaaaaaaataattttctctctttaatatattgtgtctattttttattatgctaaataaagtctcctaatctggaaaaaaaactatgccatttaacattttcaaaagcacgcagttaaaaattctcatttccaagacaatttaggaagtaaaatagagcttttgaattacttatgaaccaattttcctggctatcaatgttatttttcaattcctgatttttcttccatgtacatgttttaagggcctgttgaggtaggtatggaaaaaaattttagcttctcgcagaaggtcagtaaattatggattaacatgtttatggtacttcttgttgagttgcagtgattaaagtgttaaattctttattgtcccttctgaatgtagtaaaacctgacataaaaacacttgcagaaaattaagatttagttaagcttagttttttaaaaaaatcatggacctatgattctggaaggatatataaattcaagctttgtccttgagagtcaatctgtttgtccaatctgttcacattttgtagtctttgcatacaatttacattttagaattcacctctgggaaactcttctgttcttctttagagttgtctctagatttgggctgagggtgagagatgctaaggaataatatatatctaaccattattgcacagctcctttgaactcattaaagaggatcttccaggagattgccttaatttacactggatctttagaagggacttgacaggtgctgcttctatttatttttccttcaaaatgatgcaatagcagcaggctgttaggctctttgacatagctcatgacccatctgagatgagtggaaatgaaaagcaccttctctcctatgggagcaagggttgggttcaatggaggaaatatagagcacagtctctgcagtgagcagactatcattggatcctgatttgcagcaaggtagctgaaaagatttactgcacttcttggagacttagtaaactcatctgtagtacatgcaaggagacaagaatgtacacatgagagaatggtggtcaaagatgatacaagcttaatagtgacaagtgttctgctatggtaatgtgctgtattacctttcttttttccttttcttttttatttattaggagtattattttttgagagagcctcactctgtcacccaggctggagtgcagtgaagcaatcttggctcgctgcaacctccgcctcctggtttcaagcgattctcctgccttagccttccaagtagctgagaatacaggcacccaccaccatgcccggctaatttttgtatttttagtacagacaggtattcaccattttggccaggctggtcttgaatccctgacctcaagtgatccacctcccaaagtgctgggattgtgctcgtgagccaccgtgctctgcctgtattacctttctttttatcaactctctttgaaactgaggaatatgggacacacaaagatctcataacttacagaaaggaagcaagaccttggtattgctacaaggctccagggaaggctgagtgatagggtaatttttctcaactacccagagagaaatgggctaaatgtcaatgctatctccgaaggaatggtgccaaactgtgctttgtagtaatcaaattttgtgagtggcataagaatattctagtcaaggatttatgaggcaggggttgccaatctttactacagattaatcactttatacaggcatataagagaatagtatgtcttctaatgaagacaattaaaataggctttcatggaggaagaaaatgaggggcactatatgtttcagataactccagagttcttttgtgcctgggccagctatttttcaatgagagtagccatgactagttactaagcttaaactttgctttgccctaaaaactgtgtgggatactgccggtccccaaaactgttcagaaagacaaccttgtatattctccctactagcatgaaatcatcccctatgtgagttagaagtcatccatctaattctgtttctgctttttggccccaggcttgtgctctccaaggcttgtgaatttcatatatgtttctcttccttcctgcatcttgagttttctgttattcataaatacataaggcatttgatgttatttcttgtagtaagtcactcgggctaatgtgttatcactgaaaactaacagtacctatggtggaaggtagggagcggggaggaaaaaggaaagagctatcaaaatacttctacatttaggctgggggtggtggctcacgcctgtaatcccagcattttgggaggccgaggtgggcagatcacctgaggtcaggagtttgagaccagcctggccaacatggtgaaaccctgtctctactaaaaaatacaaaaagtagctgggtgtggtggcaggtgccttaatcccagctacttgggaggcagaggcaggagaatcgtttgaacccgggaggcggaggttgcagtgagccaagattgagccattgcactcaagcctggggtacaagagcgagacgtctttcaaaaaaagccaaacgaacaaacaaacaaaaaaaaaacttctacatttcaagttaaactttaaattgaaatgctagtttgggtatattttccaccaagcatgtgtctccaagcagcaattccctatttgcttatgtcttgtaatatcttgaacttgatattcttctaggaataattcctaatgggacaccaggataatcaatgaaatagaaaaaaaattgaaatttaaaacaacaacaaaaaacaaaacacctaggcatgtgccctgattactcaatagagttaatcagaattctggtgaagtcaggtgagcatatcattatttttattgctaaccaggtgattctaatatacagccaggattgcgaatcactgtgatagaaaaatgacatttggtgggatctattcattcacctaggcattaacaaatgtttactttgaaaataccctgtgccagtgactggttgcaaaaaaaaaaaaaaaaaaaatctcaatttttaaggagttcagagactgacagtacagaacagaaagctagacataaaaagcctcctatgacttattataattttttttcctgataagttttataaagtaatacaggtaattttcacatggaactgttcaactcactggaccttatcatataattgttttgaattggaatcacatatagcccatagcatggcaccttgggcagaagatgcatttacaactatgtgtcaagttgatgttcatatatgaagtgacttttctcccataataaattcctttttaaataaaatctagcagatgctgagacagattattaaaggtctgttaagcttatgtacttaatttttgtgtttacagtcttattatatcccctttctgtctgagtagatatatctgcctctaagacagatccgtctctgaataataatggattttaaagttaatctaatcatattatgtttgagatttaaatgcaataatagcagttgcttttgttaatgtaaaattgtattgtaccttcttttgaagtgatgaaaacagaaatagtaacttcagggtcaggaaacgtaatctagacaatcttccacagctttcttgtctacacaacaagaagtttgtttaaaatgggacaagtcacttcatctttctattaaatagaatcatccactaatagcaaggactgtgctagatgtataggtaaaaatgcataaaatgaagtgattttacctgcaaaagaagtagctgaaccagttaggctataagttccttaccaaaaccaaattttattattctaaaattctagagctagaggaggcaagagcatggaagtcctcaaagcaggattttggtctttttccagatctgtgacttgagtaacactctcagcattagtcgttgttctgtataatgttagaataatactgacagtgttattttatatggttctgaagattgctcaaaatgtttgtaacacttttaggaaataaaatttacttggtaaacaataaaaaatgataaggatataactatataatttattctaaattaaatttattctaagtactttgaaataatttaataaggtagggagcaattctcaaactccatatatagtaatcacctgctgtgattattcagccatgtaaactgcatttttaattttcaagatcatgcttttaaaaagcccgttagctgcagataaacaaaaaaatgcatgggattcagtgaactttttcgtttttattttttaacttaagaaaagcacatatacaggtatttgtcactaggtagactattatttttggaaatcagagcatttcccttgttaagggaaactgatttggcaaatgtagatggatggctttttagaaaaacataccatttgatagaaacaaataagtgaaacacccatgatgtttccagtgtcattactattacacatgtttctatcattattgccatcttcaggaagcatactctgcacacaagccaattttgtttgtttgtttgttttgagacagagtctcactctgtcgcccaggctggagtgcagtcatgtgatctcggctcactgcaacctgcacctcccgggttcaagcaattctcctgcctcagcctcctgagtagctgggattacaggcatgcgccaccacgcctggcacacaagccactttctaaacatttttctttttacttggattagagaatgccaagtattctgaattaaaaatttctgttagagaacatcttcttaaattgacagacattaaagtaaacataataataattcacattttcaactgtcatatcagcaacaatttaaacagttgttattctcagtgttgaaaaaatgtgaagaaacctcatatacttctcttcaaagtgaatgtagcttcattattttcagaggcccaatcagctatcagggtagagcacccacacttgtcttcacacactactgtttggcccagaaattctactttaggaatttatcctaggcatacacgcccatgaatctgcaacctttaagtataagaatgtttactgcattgttatttgtgatagcaaaaacctgaaaacacccaattaccaatggcaaaaatagtaaataagtaatggtatatccataatgatatgcagccatgcagccatgcaaaataattgaactgatttgaaatgaagttcaagatatattgataaatgtaaaaatcaatttgcagcactctatgtaaagtactatctcatttgtgtttttaagtgtgtggaggttttctacatatattaatataggtctatagataactatgcagggatacgcttatgtacctagacatttctggaaggatttgaaaaagactgtgtgtgtgtatgtgtgtgtgcataaacatatgtttagtgaaggactttctgcatttcttagtgtttatattgtaagttttataataatgaaaagagacagaaagagttaagatagaatatagcatgctaataaagaaatattgtcttatagtaaaggatagcatttaatgaaagctgttgctaagagaaaaagttttgtaagagtgggacagaagagataatgggttaggaaagctcatagtctgtcgtttttgagtactgaagaaacgatactatgcttgtgtggatgcagtgatttaaatcttgtcatgtatgtaattcagaaacaaaagagtgaagttaacttcatcctgtcttgactgagccactttaatgataagtaccataaatgatatctgccacacgatgtggccgaagatcaatcatttattccctcaactaatattgaaaacctactaagtcctcagtgctatacccgtaagtcaggctctcctttaacaattaggcaattggctcaatcttcaatgtaaagattgaaaaattaaaaagagaaaaagagcagaacactcaactcagcatatactaattgttgaatgaactgaagctattattgtttgcttttccaggtagctttccttactgaatacatgtggatttaggggagggtgatcaagtgctggagcaaacattttcctgattgtactttcagagaaaaatctgtgagcaaataaataatgatataagttgcaaatctcttaatgaacctaaagattcttgccacaaatttcccaatgaatacatatcttttcaatctaacagttttgattttctaagactttaaatttgattttcaatttatactttaaaaaaaaaaaggtcaaatgaattccaactgaaaaagggcatgggaactccttgtgctaaatttgaaatctggctggaaaaattgcagtcctgtctgaacatccattttatcaatgcagacaaaaatgcctacttcactctgttgtcatggggctttgtccttcagtgttgtaatatatataaagcatctagcacagtgcctcatagagccaacgtttaaaaatggtatgtattgtaataatgatgataaggatgatttcatgatgatttctgaaatatagtatattttgattcatttaaaaacacggtgtcttttattcttttaatgtgtctttattttcatttaaaaccaaatttgaaactaaataattctcactcactaaaatcatgtcagagttagatcagcattgtgttaaaaggatgtacgccatcaacaatagacatatgataaatcatttttaaaggagctggtccaacagaaagtgccagcacattatggtttatgctgtctgctgacctttaactctgtatatttaactgtggaaatcggacttaaattattcatacttatttcttttaataatttataatataactttcttttgaagacattagaaatatggaataatgttgctacagtattcaaaataactttttttttggaacaatgctgtatttgaaaaaaagaaatagtttacatgtgttcagtctgtctctccagccgctgtgtctattttgcaaatatataaagtatgaaactggctaagagacatttttggtcaaaatacagatctattttggtatgtggctaaaagtagcttaaataaaaagctgtgtatctaactatagctaaacatttatttctttgaggattattgacataacagaagaggtaaaatttttttcagaagccatgttatgtgaaaattattgctagaatacttcaaatttttaatgatatagaccagataattccagacgatgtaaatcaaagagagagagagaaaaatccatggtcaagaaatctgcattactcaaagcaatgcctaattatataaagggtgggttctgcccctttacttgaagttctggatttttttttttttttgacaaagtctcactctgtcacccagggtggagtgcagtggcaagaacttggttcactgcaaccttcgcctcacaggttcaagtgattctcctgccttagcctctcgagtagctgggattacaggtgcccgccaccatgccaggctaatttttgtatgtttagtagacacaggatttcgccacgttagccaggctggtcttgaactcctgacctcaagtaatctgcccaccttggccttgtgctgggattataggtgtaaaccaccacacccagccaggacttgtttttttttttttctgtcaaatttgtattctgatcattttctgagcatttcctattcatctaaaaattaattcatagcagagactgctgaacagcttagcctggtatcagagaaaactccacggcttgagttagaacttgatcaattaacagacttgtataaaattgtagcttttttgcttttaatattaaagggaagttccttgcttttcaaaatcttgtcatttgacttgcatgatagacaccgtgggctattttttgagtttagatttgaaatgtaaaatattttcaattattgataacttggaataaatacatttgttcttatgattttgccacattttccacttccttttcaaaatgagaaagctctgtggccctcatggaaaatttctccctggcatggaatcttgcaagaaattcagtcacttatgcttgactcctgctctcaactgtaaatcatttttaaagggttacaagttaattttattctttttaccttgacatcaaacaagccaaatggaatattctttcccttccttattaaaatagccaaaatgttcctttaattgtgtaaaaagttgccacttaaacttcctgaagcatgatgagttaaagacaaatatttgagcttttggaaatttgatgatgatattaaataatttcttgcctgatagtgtagtgggttgaatggacgcatgtccctgtcccaatctcaggaacctatgaatacgaccttatttgcaaaacaggttttgaaaatgtaaataaattgaggatttttgagatgaaatcaccctgattaatctagatgggacccaaatccaatgacaagcactcctctaagagacagaagaagagaagccatgcgaaaggagaccgccatgtgaatatggaagcagacattagagtggtgcagccacaggccaagcaacccctggagcccccagaggctgcaagaggcacagaaagatccttccctaagagcctcctgagggagctcagccttgcctaccctgatcttttggctttctgaaaagagaacgattaactttttcttctttcaaactatcaagttcatgatagtttgacatggcagtattaagaaactcatacagctagtaaaacgtaggctgcttacctggaaacacttagatacatgtaatggatttcaacctaagatcaaggtgacttatacgaacaatcccttttccctgttattcgaataagataattcttcattttgagatattactctgacttattttaacattgtgagcagtttttctcagatggagccctgccatgaggcataatcttgtaggcaattcttattgcctgaacaatcaccattttttataaacaagaagatgagccaagagagaagaaagtcatacaagtgtatttcttgcactggatttctaagtagcttgccccagtgccaccataacaggaccatttttttcatttttttacttcatggaaagaaaaggcattgtattgcaatgccggggacagagtagtaaccatagattatgatgtaaattcatctggcatctcttgtgattttaaaacttcctaccttgtgaaaaatcctctattttgtgagaaacgggaagtccaagttaaaaatctctgatactggaaatagtagcagcttccctaagttcactacatgtgcagtgtggaaaaccaagagagagaatacaggaagttgtaagcccactgcttgtcaattcgcttggtacctctgtgtaccagacactgtgaagacaggcattggcaaatcactgaaactagctgtttaagggattctaagtgggactgggatgcagaacagcaagacaggtgcattgggtgcaagtgcctgtggatggtaacagttgagttttattcatgcaggaagtggggttgaagctgaggcctgtgggatgggcagtgaaaacaatgaaacaatgaaaggacatttcctaagatccaaggaaggaagagcaagcaagaagtcattgaaacttcaggctaacatttttgcaggacagggagctgtagtatcatttattccaatctgttgaaattagagtgggattgaaagccttaagaaaaaaaaaagcacatattgattagtttatttggagactaatacagatgttaattcacaattagtaagagatgcctacctacttaaaagtatttagcaacatatttgcctgctaggctgtttttaatttcaaggaggaagggttgtggttacctgatttgttgttatcagcttcagtcgcttgagtactctcttagagttctcacaacgggactaaattggaaatgtaaccaacaggtgatccattaaggacttgagagcagttaagtcttcctttgggatgtatacttttacagccaataagcctggccttactagctcctagtcagtttgcttgccaataataaagcctcataatgtaacagagtgacacccagtagagccactcctcttaggtttccaccgtcaatattgactctagaaagcctcttaaaaaggcatgggattcactattctgttagaaacccttatgggactcagaaagaagatgactgccatgtcttagttagcttggcacaggttcttgaagataatactacttttaaaaacacttttaaattatttcctgaaataaaagagagtcactaaatggctttaaaatttgtgttcagtaatattaatcatctggcatcataatgtatacacatggccagacagttatctctatgatttatgtcctaaccaattgatggaaaggtcatataatgtgtgggaatgagaatgacatttgccagcaagatataatattacataatagactggggaagctaaaatgaaagaatagcgataataatcagtatgaaagcaattcaactttaatattttaaatatattgtaatttttagggaggcatccccagatgtaataaatgcttcagaagactgctctcactcagtaacggttttacaattcagtagcagaatagctcatcgtacaggtcacctttaaaaggactaaatgcacttaagaaacaaaaatgtttattgcccatttgcagcaattgtttctggatgattgtgagatcaatttttaaatggctttatttttagtatcacgggatgctaacactggaaggtgcttagaaaccattccctttcattctctaattttaaagagcaaagcgtcctgccttggcttcttccttttggtcttgctccctttccattcattttcacactgttggcaaagcaagggatctttttaaagccatctgcttaatgtctctcaatggtttctcattacctacagcagcatttgccaaagtctgtgccatgaacaactagctcagcctgttgtaattggcattattttaaagaacagggagttccacaatcatgtgtttgacatactgggttcaacacaaatggtgccttttctgcaggacttctcaaacccttttatagacaatgttgaccaaacttgtttaggcactgaaacttttttttttttttcccttcctcgaagatctcccgggactgacttgtgattcactggcctgattaataaggtccacaattctaagcgtggaataccattccttcaaaactgacccctgccttctggttcaacttcatataccaatgctccatgtttagattctagatcacacttagaaccaactaaagtaagcttttctgaaaagctgttctgttgtatcttccctctggggtgttttggctttgcttggttaccaactacatgggctttccagattcagttccagtgtcaccaccaggaagcctctgtttgttttctctgggtttttaagggttttttaggggttttttttgggttctctggtttttttagggttatctgacctaaggatggcccacagccctctctcctcacttctcaccacagcgggtaccaaatggggctgtcatcctgctaacttgcaggtctcacctccaaaatccccatttccttttagttaggactgtgtttcatcctctttgccagcacactgcctaggacattggtggtgctcaggagagaaccatggacctatgggagggaggaaaggttaagtggcatgtcaggatgacatggctgcatggcatgcttttcaggccagtgcggggacactacaatgacctatggacattgaatccacaactcattataaagaaattcagcaagatgacactatgattagttctaattaattagtttaattactcccatgattgatttcataatgcccttaagcaaattctaaatatatattttgaaggaaagaacaaggaacagaacaacgtagaaaaaagggtccaagactatttttgcatttatatgatagaattaagttctgggtttttttttttttttagtagctaatagtgtgtgagcctattttaatgactgtgtgtgtgtgtgtatatgtgtgtgtgtgtgtgtatatatgtatatatatgttgaacacatatatgtttaagagaaattccaaatgtattgcagctcatatttggatataactattgagtttgtagtgtctgtggtggctttttcatgagtccaggaaacatcagaaatgatttttaccacggatattagttatcttgcctctgctggtgaaactgctattcagttaagcaagcatgtcagttcactgagagccaagttaaagtatgtttttttgatgatatgtagaaaaagaaagtaaaataagagtaaaaattggatttttttctcttaaaaatgtataaggctttctgtgttatctacctcttttgtatggcacattaaaaattggaaataaaaattgaattggacttctttcaaatatagagcattctcagtgtctgatatatatatatatatgccatatatatatacacacacaaacatatatatatatataatctcagtgttcattatatgtaaaattagatacatatataaaataaaatacattctctcagtagacagtgatgaaatgatatatcagatagtaatatcagttattgtatttgactaaaagtgcaccatacagtttcatgattaatgctgcttctgctgaaacattgacccccaaaatattttcaatgaggtatattcattagaggtcttcctgacttctttgagttctgttctcagatgttcctggaaataagtacatagaaaaatagatctttctactattaattttgttttttcaagtaataacattcctagaaaagacaaaagtatttttgaaaattgagtatagaaaaggtttactgaaaataaacgtgaagatgtagcacatagactgaaaagttagtagtgagtctgaggagttggatggcagttaggtggagaaaccaaccaacccaacaggcaagaaggaggaggcagagcatgagtcccagtgccagtggatcattaaccaggaggcagacctcagggtcctgctctctatggcaaaatgcaaggagagtgggagagtttgaattccaagttattcctccactatgttgtggtcagttatttatttcatgaatgtatcttttaatttttaaacttgaaatcacagagaatgaagaatttaaaaaggtttaaattctggccaacatgtaattccaacattttgggaggccaaggtgggaggatcgctggagactggaaggtcaaagctacagtgagttgagatagtgccactgcactgcagcctggacgacaagagtatatatatatggctttaaaaggggtctgttcatgttccttctgggattatataacgttgccttgcccctggaccaggaagtgacttaatgatcacctaaagtcctttgcatcttaccattattattattctttcctcaggtaaagtgaaaattcattaaatacaggatacttttttgtatgttaaaattcaaccacaatggttgtggtcatagtagaaaaaatgttccccaagttatctataaacagaatatggaaagatataacaaaacatttagaagtttcttttgactttttccaaatgacgtgtatttggcttttcaatttttatttttatgagaactttgtttgcctcacacatgagagatttgattacatcatggactgggcaatactggagaacactgaatccaaaaccatgttttatgtaagcatttatgttatccttgcatttcagttttcctcctgtaagtgtaggcgcagtgtttaaggagggaggatacaaaaagatgaattatagaggaggaaaattagcagacagccactggcagcagggggcaagaagccaagtggaaagaccagcagtagagataaccacgtaaatggtggaaaatggaagcaatgaaacactgtgttaacctaacaatcagttttggatttaggtcatcaggctgcgtgtggtagaatgaagatttcacttttatttactaaacactattggaggggtaaaggttgcctttaaacagtgtcatcccattatttctataatagaattgtctcacagaagccctaaatcaaaaatttcactttgggactatgttttattgtatcctttctaaagtagcttggttcccatcaacttgagataggcctaattttatgtcctatctttgactttagtttttgttaagtgtattaaacatcactttttttctgatgaaatgagcaatccagtaaatgcagtctcttatcttgtgcttattaactacagaccacgctggtttaaaatatgaagtggtttatgggacactaaattgaaaccatcttgggtgaaatacatttgaaagacacaacacaggcatgtatcactttattttcatttccgactgtcagcagaaattggagacaacactcttcctttctgtttgattattctattatcgacagaatgaggagtgttggagacatacatgctgatttagtgttgtgctgatgaaaccattcaggttgtgtgatgtgtcatttttcactgctgccttatcaaggtgttttagctgtgcctaaaccagccctggtaattgctttagttgcttgtggcaaagttatgtcaatgtcagtccctaaatgacttggctgcttcatgtcagatgttctctccaaagaaagacagtgtaagggactttttatacctgggtatgggtgttaattcaaagtctaaaaagaaaaggtgttgttttgttcttccccacctaatcaaaactcaaatgcaaaggctgccatttctgttttaaaatgaagagagtacaattaagttcatgattcacttcaagtgtgatcttatcctatattgatagcttttttcccttggtcctaactgtaaatgtgagtcaagtacagctttgaacaagtgcagtgtacaagtagttatgatgtaggtgcgcttccttatgcaatatctgcttaaaacctatttctaatgtttatgcaactccagtgcttctccaaactctttaagtctccagtttaggggtttttaattatgatgatgatgtttggatttgaggaggaatatacaattaaagaggcgaatgaagagtgtttttttccttaaaaaaaaaaacatctatagttttaatagttgacttacaaattcgtgttgatcaagattcagaggcacaaatatatatttatacatcctccacacatgtatggactggacactgttctgttcaccagtattcacaatatgctgtgatcctttttctacatcaattattttaatagttgtatacttcaccattgtataactcttcagattcagcatttgttttgtttccaatctgtgctagtaaaaagagtgctgtaatcagccttttgcatacattttagttcatttgttgaaaaattatctggaaacatttcagacatatatttactgcatcaaacagtatgtccattttaagaattcttaaaaatgtcgtcaagcaaaccctcagactattttaacccatttatatgatcacttagaacatataagaatgttgattactccacataaccaaaactagagatagagtgctttcaaaatcttaaccaatacaagaagtggaaagctgcatcccataactgtttgatttttttggatgtgagagatgttgagtaatttttctagatccaaggactactttttattactatacaatttcagaagataccaaagcaggtcaaagtaatgaagatttgaactgggctttaaaaaatggtgccagaggccaggtgcagtggctcatgcctgtaatcacagcactttgggaggccaaggcaggtggatcacctgaggtcaggagttcgagaccagcctggccaacacagcaaaactgtttctactaaaaaaaaaaaaaaaaaaaaatatatatatatatatatatatatatatatatatatatatatacatacacacacacacacacacatatatatgtatgtatgtatatgtgtatatatacatgtatatgtatatatatacacacatatatatacacacaaaagtcagccaggtgtggtggtgcatgcccgtaatcccagctactcaggagtctgaggcaggagaatctcttgaacccgggtagcagaggttgcagtgagctgagatcacaccactacactccagcctgagtgacagagtgagactccatctcaaaaaaataaataagtaaaaatagaataaaaaaataaaatggtattaggatttggggaatgaggagcaaattcaaatgtgtaagagagcttgtgggcaactgaggtaagctttccagggtagggactgttgagaactagagagtatatgtgcagcatggctggtgtaactttacagccacagccagtagatgataaacttcataaactgacactcaatgttgtcagatctcccaaaatttaaagagaagcttgaaataagatctttatttatacctcctcttagggagtgtgttctgtatgttttgccaaaaatctacctgctctctgaatttggctcatgtactacctttggtaaaccattgatatttatggattgatagggcatttcatgtcaagataacaaaatgaataaaagctggaaaacctgggacaagtttgatagaatgggatggtctggaactctatctcggtgaattgctagagatgaagcgaggtactgtagataagtcaggatagagtgaattgatttgcagactattttaatatgcaagcagagaagactctgctgaatctagtttaaaataaagataagattgttccttcaagtgtgttttgttttgtttatgaaagaattacattagtactaaaaagagagagatgtaagaaggagaagttcagagaagctgttgtgatattctaggcaagagatgataaagtgttagattgaagcaatagttttagtaatttagaagggagaaatgagacaaaggctgaagagggaatttaataatatgttctaagccattgcataaaagatgtctttcactcttgtttcttacattttttgcttctgtgattttaaattgtgtatcgttcttcttataagtatagttatccctacaggggatagtttctctagatgatggtagatgtcaataaatacagagtatattattcaccatttataattggattacaaaggcaaaacagtgattggtaatatataagtgttaatgattaaaggaagttatagtttctcttctaagtcattacaaaggcttattatatataatataatacataataattattcaaggcttcttcagatgactaaagatattggcaatctgggaacaatataacattaatttggcattgaaatggtcggttgagactaaactgtgctcagactgtaaacaaatcatcagcagtggataaagaaggccagaggaccacataaatcacttttactctctttaataaactgtctgtcattaattattggtcacatgactaattacaagggttaaaacagagataagggtaaaatactacccaggttttaaaactttgatgcctagaataactgattttggaggtaagataatttctataaagcatatcaacttgttgagcaggcattacactgtgggtggcccatgggataaaatggataatactgatacctatgtaactaattgcatttgtgttaatatttcaattaaactcaaattttatatattgtaacataatttatccacatggattaaaaaatttaaatactaaaaggtataaagagaaacatctttcccacctatggtcaaaaatttcccaattctcatactgccttctgccactgtctcctaaaagggtagctattctgtttatgtatctgttcactttctctatttacaggcaaaaaatgtgaaattgtatctatattgttcaccattttttttcctgttttacaagaaaagataccataatatgcataccctttcacaacttttttctaaggtggctttatctcttagagaactttgcataccagtacaaggaaagcctacttatgcttgtttatacaatacatagcattccattccatagatatagcatagtctcttttaataattcagtattgatgtagacttggatacttccagtattttgctatgatacacaatgttgtatgtgagcgactatagttgtaggataaattcctaacacatttttagtagttgtaacacctgctatgtttgtgaaataatcttagcatgtctgaatgtaactaagtctaaatagctgtcaactgaagggcttaagttttggctacaaatggtaccagtgtatctggcaacacttaaacctagacaattgtgcaatataaagtagagaccactccctgcagtcagagttaggagctcttttctcttacagacctgattatcttgcctttgtcattggccattcatcccactcacctaccacttcaggaaattctaccctatagctgcctacattttgacccaatagtggtctctgaattatcacatgactcacacaccagatttaaggtggaacggagctcagtgggaagctaggaaattttctgtaactgctgaacatgtcagaatcagtatggaatggacaacctgggtccacctgaacttccgctcttccttttgtctgcagaaaaagaagggcttgattggaccaatttcagtatgagcatctctacactgtctttaactcttgctttttgcagtcaggaagctgtgttagacctcagacctggagaaatgcctctacattctcctgaagagctctattctgattttcatttttgatttatagaaaatatatcgtatatatttttttaatttggaaagaaattgagaaacatattctgaacctagtgttttatggcatgcagatggaatgggtagtatctgtacagatagataacaataggaataattttaaaatgttgtatattatgagattcccttttgtgaaacacagccaagagaaaatgccctctaatggtagataaatatgcaatttgacctagtggcctgtggaccaataatgggaaattcagaagtttaaatccatcaagagaaatgacagctagtagaccatggagtgataaccactctaaagctgatttatacgcacctgaatgtaactaagtagatatgactggaagagtggcaattttgctgctgagtccatatctagacatgccaaaagaaaagaatgcttatttttaaaatgatgtccctatttttaaagtgatataactattttgtttgttcatgttggttttgacctggaatatctctaaaggtcatcttgttatctagtcatattggtacctaaactggaacaaatagaaaattccttatggcacttatgtgcagccatcatgatttcatcacaaacagtgtatctagtcagagacctcaaagtctagaagtttgtgatctttctgaatatttgacattccctttacctcagcagcttgttacgtgaccaagaccattactaaaatggatggtgatttattaatttcacaaatattcgctgagtgttcaccaagtataatttattgtgctaggtgttatgagcaaaaaaaaaaaatgaacaaagcagtcactgtccccaaggatatgtgcacacatattattataattataataggctaaaatgggacatgtgccctcagtgcagacatttcaaggaaggaaatgtagcttccagatggcagatcatgacaattgtcatggaaaaatatgccctctcagtttgtggatatggagaaatagaaacaagggactcttatgggttgaatcgtgttttcttaaaatttgtatgttgaagttataattcccagtacctcagaatgtgattttatctggagataggatgtttacagaggtaatccagttaaaatgaggtcgccactgtgagtcctaattcaatatgactggtgtccttattaaaagggacacagagacacaaatggaaggaagacagtgtgaacagacacagggagaagatggccatctacaagccaaggagagggtcctggaataggtctttgccttacatgccccagaaggaaccgactatgccaacaccttgcttttggacttctaaactgcacaatagtgagacagttcatttctgttttttaagccaaccagtttatggtgctttatatggcagtgttagtaatccaatacagggagattctgagcagaggaaaccagagaaagaaagcctggtatataggtttagaggaatttggctggaatgtgaagtacgcagagagatagcagatgtgactgaaatgggagttgaatgggattaaggagggtcttctaagccaaagctatagaaccagaaatacagagtaaagtctcaaagcaatgcatgacagatgactgataacgcttatatggtccagtctggtcagtggaagaggctgctctcatttcaaagcaactgacctaggccctttctatgtgcccagattcgattctatggccacaagatcctatgccgtggcaacaagaactgggggtatcaatatctccaagtatgtgttattcgtttttggcctccctttttgagagtctttctataggaaacaaagagccattgaaagcttttgattagcagtgtgacacagtaagagctatgcttgaggatgattgcctttgatggctaggaagggtaccagactgggcaagtgactgggaagcagtttcaagaatacaggtaagaaataatgaggttttgaattaggacagcagctgtggtattagacagaggatatggctgtgtcttatgtccacattacatttgtcattattctttggtaactttgcttccatgactgttaaggtgtttctttcgatcttgataagtatgaagaagataactccaaaggagttagagataaggaataaaaagggatatttagctttgtttattaccctttttaatggtattgcagtatgttgcaattccagaagtagaagttctcataaaactaaagataatttgcttataaatattctgattgatatttgacaacttacagaatttatgtggataaatacaggacattgtattacttttgataattctgctatttgaaaaatacttatatatttactgctgatatgcaatttaattgtataacatgggatttgggggtatatgtttgtgaatgcttagcaaactgattaaggaagatacggcaagagctgacaataaaaactaatggtaataatatacagaaatcaatttggatattctatggtattaaataaaacttaattacattatgcctgccactgggtggactaaattcatatttctatgttacctagagtggttaaacatgtttctgaaatcgatcaaaaattgatatttggttatttatcatagcaatttcaatatttcttcagttttaaaggaagcaatccatttaaaatacattttataatgcgagaaatgttcagaatatgagctgacttattggaaatttcagagaaatgtctaaattttctcgaactttaactcaatattacccaaagatatcatgataccttgtgctgctaactagattattttattgtctttatctattgataaatgctacgggttacattgatttttagctgtgttatccctgcaagatgcatttttgtattttctttgagtttaacttttagtaccctttttttgacagctgcttaattgtattgatttttttctaggtcaataataatttagagaagaacattttagtatattttgtttagaaaatattggctcataactagcagtattctgaaaagtctagctacaaatgctacacattcactgaatagactgctagataataagcagacaggagtaaagatttattccaaactcattatctcagaagagtttcccaggaagcagacttaagatgaaaatgcgtttgcagccaatttatggggcagtgtcccaggagcaacgcaacgtctctagggaaagtgaaggaacaaggatgcaaaagggggagttgtactataaggcagtgagaacaataaccccagctgatcctaccagtgatcccactgggtgttttcaaactgggatgcccccatccagccatgagtgcgactggacccttatgcgtacacacaaaccagtctctggacatagctgccctgaaggtgctgtcaggggtttgagctttgagctgccagcaatccccagtagctgggagaaatgagtgcctccatccagaaggaagggtgtaagcggcattccacagcatcctctgcactcgcagctccatatgtctataaaacaactgattttagaaggcacattcagtttctggtactaagtagttcctaataattgaaatatttgctatttagatttctctgttatcagaatctgcccattttctttgaaaaaaaatatatacatctttagaaaatgagagaaaatgaaatcgtctaggctgagcatggtggcctgtaatcccagcactttgggaggctggagctggcagacctcttgagcccaggagtttgagatccaccaggggaacatggcaaaaccctgtctctacaaaaaaaaaaaaaaaaagggaaaagtagccaggtgtggtagtgcacgcctgtaatcctagctacttgggaggctgagctgggagaattgcttggacctggaaagtggaggttgcagtgagctataactgcaccagtgcactctagtctgtgtgaccaagcaagaccctgtctgaaaagaaaacaaaaagaaaaagaaaaagaaaagaaagaaagtctagatattaaatccttaatttccatgtaactctgaaaaataacatttatcattattaagtggttcctatgagtatgtcaggattaatatcagtaaaactgttttcttactggtaactgaaaaaataaaaaagatatttagctttgttcattaccaccccatacaaagatcatttgctgttaagtaactataggaaatactcaatacaatatctttttttggtatttctgctttaatattaaacatatagcttttcttttcaaaattaatcttgtcaaagaggttccacagtgacctctttgacaagacttcaatttatgatactgaatttaaattttaggcatatgaataaggatgaatcattttaattaggacttcatttgtatttaataattatttttaatatatagcaagtctaatgtatacatcttaactggatactgttggtttagtgattaaaacagtacgttagccatcaaaaggcccaaattctggtcctgtatacattttaaattctattctcaattctttgaactatcaatactactgtttatattttgcctgaagtacaatttatatttttacatatatgtgtgttttatttactcagttaagctgtatgctcctttcaaacagaattgtgtcttctttgtagatgaatgcttttacatcttgaaaccttaattattgtggtgggagggtgaagattatttgtttttagtccttttgggctgctataacaaagtattatagattgaatggcttgtaaatgacagaaacttatgtctcacagttctggaggctagaagtctaagatcagggtgtcagcatggttgggttctggtgaaagtcctcttccaggttgcatgctgccaacttctcattgtgtcctcatgtggcagaaagcagacagaagaagcaagctctctcatgacccttttaagggcactagtaccattgatgagggctccattctcgtgacctcatctaatgctatactcctaacaccgtcacacaggggcataggatttaatatatgaaattggcagaacacaagcatgcaagccatgacagatttattacttcatacctctctattctcgattttccactgcaaattttttgtttgtttgtttgtgttttgagatggaattttgctcttgttgcccagcctggagtgcagtggtgtaatcttggctcactgcaacctgcgcctcctgggttcaagagattctcctgcctcaacctcccgagtagctgggactacaggtgcccaccactacgcccggctaatttttctgtatttttagtagaggtgggatttcatcatgttggccaggctggcctcgaactcctggcctcagctgatccacctgcctcggcctctcaaattgctgggattacaggtgtgagctaccacgccaagcctgcaaaatttttaaatgtgttacacaaaacttcaaaatatttataaagattaaaatgaatattttctgctgactcaaatgtcatgttgagggtagcagagcagaaaagcaaaggactgaagttttttataatgtcactgagcaacctaggggactattttattttatttttttcacctttatattcccagctctaagaacagtacctgacactcagttggaacttcttacatacatgtattttaagtaaaaattttattgtaatattacaaaatactctaaatgttaaaaaaaagaaggatagcatttaaaactcttaaccacattatcaatctggaaacatcagggatgcctaaagttaagaaggagccatagataatttatctgcatgtaggacaaacaaaatcctgaaatagtttattatttctcccatttcataaggagctgtaaaatgatgacaaaggcttttctggaatgtcaaaatcattcttttaactgaaaaaaatgcatcatatatctggtagcaaaaaatcactgctttgaaattgacttaatattatgaataaagattttaagatatcttttatttaagtcactaccacccatttccaagttactacagagaactattttaattgcaaaagtctattttctctttcatttgagagtaccagtgtattcatttttaaaaatggtctgtggtaggcagcacaaaggcctcaaggcagaccagtgcctgtagtaggactgagagccaggaagctttggctgttccaggtagcagtgtcagatgccaagagcacctgaaagagctgatgtcaagtctcacgctttgtgaggcatgcccattgcagcctggttgtcaattgccttatatccggggccatgcatgtagtagttccaaatgatcaaggtagagacatttcaattttgctcatactatctccacatggagtgctagttttttgtattttgttatttttaatttcatattggcattatggagcatgaagtgccagagaatgtataagcttaacacctgccatttaaaattaattatgaaacacctcatttaacattataaacacattactctatttcatgtgcttgaaattttattttgaaatgtgggtggtcttatgccacttagcttaattggttggactctggtgctgatgagcctggagtcgctagttgatttttctataaggtcacattagcttcccacagataaaacaaacaaacaaaaaaacaaacagctcttttcctacactgacatttcacagttaagggggcatgttatattttatgaaaaatattttctcaaatatttttccttgcgttcacaacaaccccagtaggaaagattgaagagtatttttatttttatcctcatttttcagattatgaattttggaagaaattcatacctaataggattaacttagttgacagagccagaaatttgctaggccaggttctctgactttaaatctcttctctgttatatcacacaacaactcaaaaactgtagtctgatgttgatgtgcctttgtcccagaagtggttactttgcttttattaactagtcaatttggatagcagttttgataagtcagcatttatcttatattgtgtcctatatgagtacaaatctttatatcccccatgattttgtttatatcacatcactttaaataggtttaacccagttgccttcaccttcaatgcgacataatcaggattaagaatccaacttctgataatactaatgaataatgatttcagaagcatactggataaaatcagaaactagtttcaatatttcaatgatgtagcatttagtagagtattttaaatgttaaaataaatgtgtaaagttgtacatctctcatcttgacaatatcctttggctgtcttgagattaagggtgtttggagtctctgtgatcccattggaaggatgcatgaggcctgctggaggctgtcctgttttcttctgtacctcagtacaacagtctcatgggactaaaatgttttggttattggcatataatcttggtttcactacagcatttatttggtgagaaagaacaatactgtgtcttctgctaccattgactgcctagaactttttcatttttaccaaaatgagtaaacatacattgtgaatcattctttttaaggaattgttaaaagagtcatatatgactaaaaattgttttcaaagttttattcaactcttgccttctacattttcttttgaggtggtgaatatagagagtttacagagtttgaatacttaaaaataaacagtttatagtcacccttttttggtattcttcatttaatgaagaacagtagttttgatgaatagctcctcttgtttttagcaatcaatctttatattctctaatatattgagctgaacatttttatatggagaagaattgagcatattatcccattgccgattttaaagcctatataacattttatttttctaaggtcacatacaataaattaaaatactgtaacaaatatcttcagatatttgtgattatgtaattaatcaagttcatttttgtcaagctggaattctttgctggaatattttcatttcttaaatttcatgttcttgtcatatatgtagaaaatcagtttaatttaataaataaatgcttgtctaatgtgtgtactgaattatctttcttcttagtatataattgttttcttacagaattataattattttctaatcaattctgtccccctcatctctgaagcctttatcctatattcttcatcccaatattaatctggtttatattaggttggtgcaaaagtaattgcagttgttgcctttaaaagtaatggcattacataaatatttgttgaagtaagccaatttatggctgagtaactgagtattgcatatgaatcagtcccagcacttaagacttgtaaggaattgaaagttgaggccaactcattggctgatatttggtgtgctatattaagtagtggttaccaacagtctctgcagcaggaatgcttgggtttaaatactgctagagccatttcttattggccttgacttatttgcttaatctctgttgcttagcttgttaatttataaagatattttgtaaggcttaaacaaattaatatatatgtaaagttcttaaaatgctcccaataagtgctaacatattaatgttatctgttactactatttttaaataggctagttttaccaaacctatcaagaaaggccaaggctactacgtatcatgagaagggactgaatgcattgtctgggctcctagaggcccacttaaccctttcatcccttccgtatattaaggtaccttaatatttcaaagccttaggatttttgtgtgtttggcttttttttttatgagaaaaagtttatttctctcttatacaaaagaagtccagaggcaggcagtccaggtatactcaagagctttcttaaaaaatgagttaatcagaaaaaaaagcaaaagccattcataaaattaactcactttttaaagaaagctcttgagaatatatacaatattggttggattcccaattcattctttagaagccattatttatttgctgtcaacgtttcaatttatcaaccaattgggattatgagataactttgttttgataggagagaggatgtataagatagagtgtggggtggcagatactgaggagttgaagaaataattgaattcagcagctaaagcaagaagtaagagagaccagaaataagcacaagttgagagaagaatgagtagactttattagtgcttagaaagccctttctcatttaactattgtaaaagtcagggagttttggctgttccttaaaaagttaaacatataattaccatgtgatccagcaattttactcctaggtataaatacaaaagttaaaagcagagcgttagatatgtgtgcacctatgttcatcgcagtgtttttcacaagagacagaaggtcgaaacaacccaagttcccatcaacaggtgaatgggtaaacaaaatgcactatatacacacagagaaatatgattcagctataaaaaggcaggaaattatgacaacatcctacaatgtggatgaatcttgaaaatattatttaatgaaagaagacaggcataaagagacaacaattgcatgatttcacttacatgaagtacctagagtgggcaaattcgtagagaaagaaagtagaatagaagttataaagtgctgaggggagggcagaatcaagaattaatgtatagatacacagtttcagtttgggaagatgaataagttctagaagtagatagaagtgatggttacacaacattgtgaatatgtctaatgccattgaattgcacacttacaaatgttaatatggtaaattttatgttaattatattttagcacaatatatttctaaaaatcctatgaggtttgcttgttctctgatttatagagtatctgagacttgcccaggggaacctaggtcatctctatttctactatactataagctgctattttaaacctcagatttacttcagggagttattttctctacagggtttatttttatttttatttggtctaagtctaaccctgcttagtgaaaacacactgagtactcaggtttctatttaatagcacaaatggcgatcccagaaggcaaaaacaaaattaaaattgaagtattatttttaaataaacagcttgctgaaggatgccattgcaaacaatccacaaaactttatttgagtgactatgatttactacttctcagatatgttttttgtcttcagtgaacttaaagtctgtttgaaaatacagatatgtaacaaatgattatcttttaaataaatgttaaaagttatataagtaaaatcttacatgagtgcaaaacaaggagtatcaagcacattaggggggattaataggagattaggagagaaggcacacagactcagacttgagaaatgtatggcattttaatagggaaagcaacataggaaaggcattccagttaaataaatatctcaggcaaaggccagagtcagaaaaacatgtggcctgtttgtaaattgtatgtatatggtcctatttcccatttttctctgtctatccaggtcagacctaaaacattaaatcacaatgactattccctccatatttaaatatttacttcttgtccttatctaaatatttcgccctgtttctaatttgcagcaatgttgcctatgtgccttttattttaaattccctgtaattatttttggaagcagaaaggatattgattatacatttaaatacaattccagtttgtcttaaatcagtcacttaaatcagtccagtgtcttagattagtcattcagcctaagcaggccttatatatagtgaaaccagtatctgttagattgcttatgcatttctgttagaatgagacctacagatctgtagtgatatagatactcaggatgggaaaatttagcatttagttactttaataacaaagaatatctttcacttggttttaggggatgtaactgatgattgcactttgaattaaccttttggaaaacttgcttttaactcaatttagacaatattcactagagtaagaatagggataagtttgcctggagtaaggagctggtattgggttaagctgaagtcaatttttgatgtggatgttgatatataattgacctgggtaatacctaaagtcaaacaaaatttaatttgtgataaataatggctgtgggtggtagtgcaagtcaggaggacaaggtggggtccaaagggtggaaaaggatcattcactaaatttgttagaaagtctaggaccatggacagctccctggcagctgagatgctctgataaagtgagcgaaatgggaaaaaatatatatatatcctgaaatatacccctttatttgatttttatggcctctcactagaattttctgattctaaaactgattttttaattttttttttaatgtttgccatgcctcctacaagatcaggaaacctattcattttcccaagaacgtcattcttttctaagactgcgttactttctagcccgactctcaacatgagaacacatttccacagaaagctatggcaaaggagcaggtagaatttcattctctatgttaaacctataaacttctggttgcccaccacctccaccccatttttatgctgaagcaagatctaagcctggaattgtagccaagatttcctctatgaaattgcaatttcagttttaatgaagaggttattttattttattttatcttaccttttcctatctgcagcatttttttctttttacaaaatgatcatcccaaataacttatttttaattagtggatttcttctttgtcatttagttgttccctagccaatcctcactatgctggagtgcctaaaattgtgcacctaaaaaacaattagtgtatttcttctctctgacccatttttaatctattcgcttcagctttactgtccagagcggttttctctaagttatcccattatcatttatctttccttaccaaataaagagaacacagtaagattttaaatcacaaatatccttttctttcaataagaacacaagtaatttacctcttgcagtgaaaggtaacaaaatgaaacatcttattttttctccagcctcctttctctaccccaaagtcagcagctgctttaagtctgtatattttagttataatgtagagaagtgatctaccaaaagaacttttgtgcatcaacctttgggcagttgagaaattattggttggttatgctcattgtgactacaattgcaagccacttttgcttattcctatatattttttttaaattatctttaaactcctctgtatttatgaaaggaaaatttggcttcttctgtaggattaaaggcttgccatggtttttttttttctcttatcacattgaagataaacctgtttgacgctaatctgataaaagagttttcagagctgatgacttcttgtttttccatgaaacacttttttcagattcatactgctatttcaaatgaaaaaattattcacaccttcatgtttctgaggtttttctaactgaatgtttattacattatacaactcttggttttatttatataaggccaatagcttaattgttgctgtcctgtatgggcctggaagttgacattgactatgttatgataagttatgaaatttaaaaaactttaaaaaggatcttatatgccgtgatatattgttaaatttaacttgttcagtaatcaaaaaatcatgttttagtgagcaaaataatcatcatttagcaagtttcagacacatggattttggaagttttatagttagagagaacaactaatatatatacttcagtacctaccctatcccattgctgtaaaggttgacttatatacaatggttatttgcatcattgaattgccatttatgtaaaatgctgaaattacactttggggttccactcatagaggttcagtagtatgtgtaaagtcatgcggttagtaaataaagttgctaaaaagaaaacctaggtcagtctattatcaaaatcttatgatttttctgcttcactgtgttgccttttgcccatggaataagatgcgacctgaaattacaatttctgtattccaacatgactgaatgaagcatatttctgaaattatgttcccagatttatttcccgtaatttaagaaatttcatgttcagtcaaatgcattttacaatatttgaaactattttaagaagtcagcatttgtttgatgactattaaaatcacagttacaatgtttgaagaaaagtatactataagtttttattaagtcatataattgtttaattacagttacattgacaatgaaatggaacactgttgatagtgaatggcctgcttggcagtctcttatatttgataaataaatattattaactgtaagatagttctaggaactgttcgttagttcctgtgctgacagttactacatttgctttaacattatggatcattagaaaatatagaaattttccttctaccatcttaaattttagtacttattttctcactcttttttcagttaaatttttgatgaggaaagccttttcttcactcactagaatttataaaatcaggtgaagcaaatatttgaaaatttgtatttaatttgaaaatatgtatagtctgttcaagaccttacttttctctatatttatataatcagtaacacataaaatttctcttcttacatctctcttaattttaattctttcatgaattaagtgaataaaagtactctatcatttacttttacttaaaagcaactttgcatggatcactttgtattaaaagcaaatttgtgtgggtcaaatacttgttacctagcctggtttccataaattctattgaactatgatgaatcttttcttgctaaaaagtagatttgaaaaaaaataataaaggactatgtaataaatagcaagatagaggagaggaaatttctggcctctcttttctgctagattgttagcatcttcaagcctgggtgtacattgttgggctaatcaatagtgactagggtgatacactagtcaagggctctccaattgctttaaattgttaagaattatacatgtatcattaacttacataagtcttagtgctttcacataaataacaatcaaggtaattaatacgtctaaaacagtaaaggtagtttaaatgataaagttaacttatctttttacagatgatcatcaaactctatgagaagctattgataaatagtagtatgctctccaaggccaatctgtaatttattcttaatgtgtcattcatatatatatatggagatatatgtgtgtgtgtgtatgtatatctgtgtgtgtgtgtgtgtgtgtgtgtgtgtgtgtgtgtgtgtagggagacaggctcttactctgttgcccatgcagtggcatgatattagctcactgcacctctgtctcctgggcgcaagcaatcctcccacctcagcctcctgagcagctgggactacgggcatgcactactatgcctggctaattttttgtatttatattttttggtagacacagggtttctccttgttgcccaggctggtcttaaactcctgggttcaagtgatccactcactttggcctcccaaattgttgggattacaggagtgaaccactgtgcccagccaacgtgttatattttgaaagaacatttttctttatagtttaagaagcagagcttaggagtactgagaattatgccaattttaagtgcatattagttaaataaaattaattgtttcatgcccaccttctatagatttctagtaaacttaactacttatggaaaaattcactgtatttaagtatgtatgtaagtaactgaataagcttttattctgttaaaactctatacaactctcattgaaatatccataaatgtttcagcatgcctgatataattatacatcatttatgaaggagaaacagcaacacatctgatttttccaattctctctccccctctcttgctcttttattaatatttctgaaataaaaaacatgcaacattccctgttaagaactctgtaaattgtggctggattctttttacttacggcacaatgtttctctttatgtgcatagacagggccctgaaatgcaacgtgaagtggtgaatagagcccatgaggcttgccttcatagatttgcttgatgagatgtttatctgggtgagaaattggttgttgaaaataaggatttccttatagttcattgcctatttcaaaatatattttcccgtatagcttattgtatgttattcaaaagtttcatctctttccacaaaaacatattttaaaattgtgctccagaaggaacacaaattgaaaagcagcagtcaaagttgatacctggactctacaccaactgttgaaagctgttgaaagtggtaatgctcacaaaatgccttacccttgcaagattgcctaatccaagactgaccaatgtgattaaaccgagttacacatcactggtggccttgtgccagatgcaggcttcggaagaataaattgagttgtgttactgtcaccgcacaactttattgaaaacaaggcagtatcagcacctttaggtcctactctcaggcaaacactgaagatgacattgctgaagcttgagttgcctttctttttttgacttaactaacacttgatattccccaggatcagcctcaacaacattcacctatgttgtcattctcactgggccttgaccaaaatctcagttgttctcaattagcctgttttgaaataataaaaaaaaaatcacacctctgttctggaaaatgatgaaaaagtcatccttgtacttctaatcataaacttcctctttagaatggaatctcataacattaaataaattttctaactgctcagaaacgatgcatatgtgagttaaatctgtgctaaaagaataatcaagcttgttcaattagaaaatagtcatagaaatgagtccataaataaataaaattttatgaaatatttagcaatgaaagtttatggaataaactttacttagaagtttactgagcctccactttttattataaaaatacttcctgaaatcaccctaaaatatgtttgctagcagaatgagaaattgatttacttactttttaaaattgtgtttctcagattgacagcagtaggtataatgcaaataacaatattccaacatgttattttttaacattcaataaaaagcacttctattcatttttaaaccaacaaaatagagaattgaaatgaacttgaaaaactacacatgaatattagaaatattaaatattataatttaaatatttatttcaacgtgtactttcaagcatcatataatcctttgatgtataagggaacagtgatttgaaaataacttttataaatacacttttgttttagatactaagaagtatcttttgagtaaattttctctcaaaatacatattggcacaatatttcttagattttttaaaaaatatctttaaacatttccactccaaaaatgcaaaatagtgtaagatgaaaaatggatatttaaaatatgctttcattcattttcctttggtaatcaactcaagctttttcaagctatgtcaaaaatgatgagctcaaaggcattttggaggtgactgtgacattgctgatattaattggtactttattttcacttctattatgctctgcaggttttgaacctattttccacccatttttgttcttatagttagaaggtaggcaggaataaacaaagatgataatgaattcttatctaattatgagtatcatccagattttataagaagaaaataattccagaaaatgtcttcaaaatcaatttaatgcagtgtttgcaaacataaaaatgctaacagcatgtagaaagacttttgacatttttcctttttgaaatgtattcccaaatacatggaaatatgtgtttttaggtttgagataagtctctgcgaacatgctgtaatgagattataatccaagaaaatgttatatttctatgcttatgatttctaatacggcttttcaactggcaaattgtggtaaatgtgcttgataagacagaaagcatcatttccaactgatgtaaattttctcctctcaacttcacaaactttgaatatttagagttttggtattgcttttaacgaaagttaaaactaaaatgtcatgaaagccatggacaggatgaaataatccacatactaaataaagataagcaatgaaatttagcaatccttttctcaatcttagtctaactactatttggactattttaatacaccttttcttgttttatataacttcatcattagctatgaagaataaacaatgaactcatttatactttcttccctccccctttttttccttttttttttaaaaaacaaaaacaaaaaacaaacaacagcaacaaaacttttatactggttacctccataaattttttttttttttttttaggcagagtctccctcttttgctcttttgcccagactggagtgcagtggcaggatctcagcttgctgcaacctccgccccaccgggttcaaatgattctcctgcctcagcctccctagaagctggaattacaggcacccaccactacgcccagctactttttgtatttttaggagaggcggggttttcaccatgttggccaggctggtctctaactcctgacctcaggtgatctgcccacctcggcctcccaaagtgctaggattacaggtgtgagccactgcacctggccacctccgtaactttaaatgatattttaaagctgtatttcttgagtcatcaacttctgaacagtgtctcttgccttcctgctgtatagcccaaggaatccctttctccatacatcttcttcctctcccagtccccaatttgtataggattgcttgatgaaatcatccccgcatcatgttcaggagatcaagctccttagcatgacctgcaaggccctactgataatacctggccccagcctttcctttggatatcagctctcacttcccttcacccattgccttttctctggactcaggcttcttgctgggactcaaacatgagagaccattacctgatgcactggtcattggatgcattgctagagtgcctttttatggctgtttctctggtatttaggattctgatgaaagtttcctctctcagagcacttgctttacatcccttcataaaatagccatgcaccctcactcctctttgttactactctgctttattttttgccataacatttactactatccaacttaattctatatctgttttactaatttgattacttttctcccactaatgtgaactttcacatggccagccattctgtcggtttttgctgttgaatccacagttattagagcaatacctgccacaaatatatgttagacaacgaattagcatagtttacaaaacttaaatgctgttctgtactgtcaattaaccgtccattactttgtccatacgttagttccaaaattttagaactaacaaataatgttatgactatataaatatcataaattgcagagtccttgagtgtgattagatcatacgttgattagatcatacataacactccagaactaagtctgtgccattcaaaagagaatgttctaagcatcaagatcaactatcccttttcttataatccatcaactgttcaaaacaataacatgctttcatctttatatttattttatgattatcatgtgctgcttttatttcccatggaacttccaactgcatttcatttatcttgacaaatgaagtgagtgtggccttcaaccatatctctaaaataatctgattcctaattgtattacttgtcaaatatcctaaagtggagaaattctttaaggagtacgccaaagttgtcatcattgagtcctttctattcatccaaacttaacttctcttcttcttggctctcacagtttctacttcgttggattctttcttcttttattcagcttgagtgcttgtgaggtatgctttggatgacacaactaattaataatgtctttattttgccctggtatatggtgaatgttttgcttaggaatggcttattgtttgtagtccttttcctctagacagactcattgtcattaagcattcttcgttgcaatgaaaagtctgaaacaaatcagactcttgtccctgtggagaactgtttttaattctacgctctatgcctttttgtttttatcttggaaatgttatcagcatgtgtttaagtgtatttttatttttgtttgttttatctattctgctactgtgtgggtctttttttttttttttttttttttttactgtcaggttagggcgtttgttattttagaaaacattttccttttattagttagattatttcctcttctacttgccctttgtcatttgctggattgagtaaccttgtacatttctgaattgatcatctattcttctaaatactcctttcactttaaaaaatatgtctgccccatcttctgggagaaatccttttatttatttacttactcacttaccgatggttcttgaaaatttaaaaaccaatgtatttggctttcacaatccttcttttcccctccctcttttccctctctcctcccctctttcctcctccttcttccttttttctctcaatgcaattttggagttcgtgattatatatcttgacttgtaattggagcagaactactcacatatcggaaaatttgaggtgggtggcttctgttatattatgcattgacttagggagaataattctgtgcttcaagaactaggagaactgaaaagctaaatgtttcagcacaacttttaatgggaacgaagtagaatatccagcagtccatgagaattgactgttcagccaggagcttgaaaaagtaaagagttaattagaacctgggaaagactggcacaagggagggagcccagaaggataccacatactttcctatgcatgagaaactactgacccagagatttcaactctcattttgtgcagccaagattgcgaagtttaagttgacacatttatccatgggtgataaatttaaattaaagagagaaggaagcaaaaatatacaaagggggaattaaaagataaaaagtagcttgtgaggaaagatcaagctataggctctgtgtaacaggatggctttcaatttagggaagggtaaagggaagtggagtggaggagtgtgtgcacatgcatggctgtgaaagaacaggcacgcttcttcatccatgtgacaccactgtacagagaggtggtcagtcatacacagaattaaagtgtcatcttgatagacccatagtcctaaatcatgcctgatttccttttgcccatataaatattatgagattatatagggaatatacgttgttgactttttataaataatatttttcttacttcaggtgtttttcctcaaaagtctttttactgaatataatttacatagatcatatgctttctataggaattgtggtaaataaaattatttaagcaactatggagaagtcctgattctattactatggatatatacactatagatttcaatttaaaaatgattttttcattattgctaacaagtggaatacatgcgtttcatacctatcacactctttttttcttcttagagaaatctttcctaatgacattattttttttcttacttacctttccttggcataacataagctgaacaaacctatgatcagtatcaggtaaactcatcaaatgtgctcttgagggggaagaattttaaaagaaggcagtagcacaaacctgatttaaccagtttacaacatcaatcctcttaaaaatcaaaggaaagacaaaaggaaatattttcaggtgtataaagattacaatgctcttaatactatattaagtccaagaaaaaaatgtggcgcacagttatgaaaacaaagctgtccagcaagacatgccttttctctgtaaaatgaaaccacttcagtttctgtgttttatactgaggatttatcctagcacactggtcagtacattattttatgatggctcactatgactgcatcacttacatccacagaaaatgccaatctttcttagagtaaatcatttccagtcaaggcagaaggacttcaaagcagagtcagtgaaaacagatataaggatgttctacagcaatagccctggcaccagtgtaaacctaccctgctcctcaatctggtgtgtttctctcctttacagaagcactaaccctgaccaatccagcaagacttacagaaatctcctgggctgcctaaaagggggcccaagtgattcttgctgctcctgtctgacctttttaaatgaggaaaatattgattaggagtttttctttttgaagtatagaattaatacatttttggtagtgatacattttatagtaagactgagtaaggtttgatcttacattgtccttgtagtctgcatacttttacttttgtgttatcagttcttcattaggaaaacccagagttcaatgaataattcaaaagcttgatatgaagtatttgatgcttaaacccaagttttctcaaagcaaggatatcatcaagagacctctggtacttgtgactactctgtgactaaccaggtcatttacttggaagagaggagggaaggtcaagattatgtgggacaaaatattcattatcacatccacttagacttgagcaattacaacacaggaatatttgtatttgtttttttatttaggctttcagttaaaagttttttgcagagatcaaatgtaaaacaatttgtacttacactgattagagaaacaagtgcaaatgttagaaattacatatcaaaaaggaaatattttaagaagctcacaaagaataagcaatgattaaggaccttgagaatttgacttacaaggagaggttataaaatatgcacatcccagggacatttctgcatataagcacaacactttaatgaataaacacaaaaaccaaagagaagagttgattatcacattgtgtattatacaggtaaactagagatattgcagatgcaggtctagacaaccacagtaaagcaaacattacaataatgtcacacaacatcattggtttctcagtgcatttaaaatttgtgtgtaatagcattatggattaaaaaaagtacatacattaataaatactttattgctaaaaatgctaatgatcatctgagcactgagagagttttactgttttttttctgatggagggtattgtctcagtgttgagggctgctgactgatcaggacagtggctgctgaaagttggggggctgtgacaattgcttaatgaaagaaaacaatgaagtttcctgtgtcaattaattttcacaaatctttcacaaaaagatttatctgtagcatgcaatgttattcagtagcattttactcacagaacttcttcaaaccctgccaccactttacaaaataagttcatgtaatattccaaatcctccattgtcatctcaacagtgttcacagcatcttctccaggactacattccacctcaagaaaccactctttgtcatcttcaagaagaaacgcctcatcctttcaagtgttttcatgagattgcagcaattcagttacatactcagcctccacttctaactctagttctcttgctagttcttccacttttgcagttacttcctttgctgaagtcttgaagaaagacttcaaatccatcagggttggaatcaactttctccaacctgctgttaatgttgatatttgacctcttccatgaattataaatgtttgtcatggcatccagaagagtgaactctttccagaaggttttcaatttactttgcccagatccatcagaggaatcactatcaatggcagttatagccttatcaaatgtatttcttaaatacaatagacttgaaagtgaaaattactccttgatccatgagctatagatttgatgttctgttagcaagcatgaaaacaacattaatctttttacacatctccaccagagctcctgggtaactaggtacgttgtcaataagctgtaatattttgataggaatctttttttttctaaatagtaggtctcaacagtgggcttaaaatattcagttaaccgtgctctaaacagaagtgctgacatctgagctttgtttttttgtttctagaacacagacagtgtaaagttagcatcattcttaagggccctaggattttcagaatggtaagtgagcattggcttcaactttaagtcaccagtttcattagcccctaatgagggagtcatcctgtctattgaatctttgaagccaggcattgatttttcctctccagctgtgaatgtcctcgatggcatctctttctacaagaaggctgtttcatctacattgaaaatctgttatttagtgtccccatcttcatcaattatcatagctaggtctcctagataacttgcggcagctcctccatgaccacttgctgccccagcttgaagttttctgatagtggagacagcttctttccctcaacctatgaacctctgctagccttcagagttttcttgtgtaacctcctcacctctctcagccttcatagaattgaagagagttaaggcctttctgttgattaggctttggctgaaggaaatgctgtggctggtttgatcttctatccagacccctaaaactttcttcagaacagcaataaggctgtttcactttcttgtcattcgtgtctttattggagtagcacttttcatttttttcaagaacttttccttcacattcagttgactagctgtcacaagagacctagtttggcttatctcagcttttgaaatgcttacatcactaaacttaattatttctagttttttatttaaaataagaaacttctacttgaatacttagaggccattgtagggttattaattggcctaattttaataatgtcactttatcggggactagggagacctgagaagagggacagggacaagggaatggtcagtgagtagagcagtcaaaacacacacatttattgatgaagttcatcattttatatgtacgaggctagtagcaccccagagcaattacaattgttaatatcagaggttactgatcacagatcttcataccagatataataattataaaagtttggaatattgtaagaattaacaaaatttgacacagagatgagacatgaatccatgctgttgtaaaaatggcactgacaaaaggctttcttgacaaaagcttgccacaaaccttaactatgtaaaaaaattcaatatctgcatagtgcaataaagcaaagcacaataaaacaaggtattcttgaaaattctaatggtcaaaatacattctggaaacatgagttaattaaatcaaaagattttagtccaccccccgcccccgttaacaaatgagaaagtaacaaagatatctaaacttatgacaagttaaaaatggtaaatgctatagcacttttagaactatctacttaatatttgaagtttgggggaggagtggtactttgaagacttatccctaggtctgtgattttatagaacagatgaaaagaaactctctatttttagcagccaactgtttaatatcaaacagatgttgttataaccgtgattacaggatttcatttaattcagagcaaaagtatttgggacttaccttggcatgagagctggctttgtaatgatgatagagcacaatttaaacattacaattaaactatccatgaattgtcaaccaaaccaaatgcataagtagccaataatttagggaatttttgtttttgacatagtttttaaaaaggcattatcccttgcctctttgagctcgagcccaatattgcccatatttattgttttcatattacaaattatccctcgtgcccttctgattaacttaaaatcagttcattttcttttcccctttcatgggcacatatatggaagggaagtagctagattattttctgatgtgggcatatatttgtacttacatattaaccagctatggaaaataagcccccaaataaggaagaatttattctgcaaataagccccaaaataaggaagaattagttctgtacgatttctttttgagccacaatgcaaaataaaagctagcaaagaagcatcacgttgtcatgaactaaaattgagagttaaatgattaaagcaggaatatctttaattttctctcaataaccttcatttttcacctttttaaaaatattacatatacttatattttaatattattaattttcttaactgcattatttaaaaaagaattaacccatagtatagcataaaaccatgtgttctcagaatcctattgtttttactcatggaagtcaatgctggatgaaagaaatttatccatctgaagaaaatactcaattttaccttgaaaagttgttacagaaccaaagtgagtctgttggcacatgcacaatgtaaaagcaaacatggaagcactgggtttttgcaatgagccgacttgcagagaaacagcaggaaatgctcaaatctgtctctaccagctgtaggctgagtctattcttataagcatatggcaatgaggcatgatctggttggatcttgtaatgacgtgatgctggatggcatgatctgactggatcctcgccatgtgggtgacaccagggcagtctgcttggatcttgtgtcctaccatgtcatgtccatattcttaattcagtccctgttccttggcctgagcacttagattacacctgtatttgcatacgtggttcctctaggcatgttcaggttatgtgaccttcaacttggggattcatggcaacagaaaaacaactcacaactttggtacataaaatatgaatcagattggtctggagcagttacaaagttactagttttccttttctatatctgcttttgaagtgtattctatatcatgttgtccatacatatgtcatatacaaatacaaatgtagttaatctataggtttggtctcgataagtgctgccaaagtgtagtttgcaaaccaatgctcttctgcaaactcttcctggtccataagaaaataagaatagaaattgagagaaaatgtttagaaacttttatagcagcatgacagagtaattttgttgttgaacttacaatttaaaatgccctagtattttgtcttttttgttattgtaacttaaatgtgttttataagtgtaatataggtttgtgaaaatttggtgagaaaattcgtcttcagcacagaaaacttgagaagcactagttctcaaatcttgggaagactagattcaaggcagctagagggagaggagagggaagctgtgagcattttgcaagatagatgagccaggatggaattaagtagtgtttcagatagttaatggatattggggatcaaaacatgagaaccccaggacagtctcctgacccaactccatgtaattggctctcccaatcctctggccaagtcactctcaccgacgtctgtggcacactgagtacttgccaataattagttactcttctgaatgccccagcatcctttctgtttttttttttttgtatacttcctaagagtaagttgtttttattcccaagtgattttattctagctgtaattttcttgtaattatgtaatttaattaaatattatataaaccaatgaaacatgaatacatacagaaagatagctgttgtttccatgataaccaagcagaatgtcttggggaggctcagtaagtctaattaccaaaaaatggaaaaaaatgtagaatctggtgctgttaagtagctgtaaagtttgccagtagacagtaaaaggtatctacaaggattttgcacatggattctttctcaattgtctttaagttcctatttcaccttaaaaaattaaaattggaaattgtaggaaatgtaaagctggtgtgtcatacaagaaatactattcaaaaatgcaattattagacaactactttaaatatttttgaaaatgcttcttcctaaataaaaagattaagaaatgaatattcacctatttaaaaaacttaccatcttcaccaatttttaaccagttatacccaatcatatcagattaaaagtcttctattataattgtatataggcatttgtacaatttgtatactacctgtcgccaacatatttcaggaatagtaattatctgcatgtaatcactttaataaaacgtttgtttttgaaattcgttgcaacacagaattagatagaaatcttgacagattctcctttgcttcagttaatcactgctatcaaaagccaatttattgagagaaaacgtagctgtaattaaacttctggaatgttctagtcatctgcaagtgtcatgtagggaataactaggcttctggaggaataatttgacttgattactaaatttaaagaacccaggagttggggtccagtcattcattcatccattcaatagtttaataatggagaatctaatatttgccagtcactataattaggttttagatatttaaagaaaaaaaaccatgcagctcttgctcttgaggagcttacagtctagtggcagagacaaatgtggtaacagactagtgagaatacaatttggtaagatatgaacaatggtccttcagaacatgccttgagagtagacaagatgagagggaattgcactcattgtatgtgggccttctctagtgaactgggcgacgtaggtgttgagtggtgaggatgtgaccaggagctatagaaacaatgtttcttctgcttttgttctctatttcctcctaacattatctgcttggggataggcttgaaagtaattttcttctttatacttacctataatttcaaatttaaaaaaatctatcatttccatagttagagttagctaataatgtttgtgagtgctaaataattagaacacatggacacacagaggggaacaacccacactggggctctttggagggtggagggtgagaggagggagaagatcaggaaaaataactaatgggtactaggcttaatacctgggtgatgaaataatctgtacaacaaacccccatgccacagactacatttgtacttctgaagttaaaataaaaattttaaacatgttttttttaatacagctttgagtgttatggacttagtagcatattccatttggtgaagatagtgtttcaagaaaaattggatggtaggcacatgaatacttctagtaatgataaatctaaaacaatgtttctacctcttaagaaatgaagtaggctctcctgtccccatcaaggcaatttctggactgtacatccaggtgttcctagaccaggataagattgctatgcataacaagggtttgcctgaagctgaaatacctaacactaatgaaagaaagatagctagcatcttatagtggagacctttcttttatttcttatttcttgtgatatttttagattcgtcattctgcgatatgtaagagtaacacatttaaggattatattttactaaatgatatttttttcttctagatgatctggtataaagatgtccatatcacagttgagttattccacatgttctggcaatcacacttttgccaccttcggcataattctgataaaacaattagaagtttatagccagtaacgaaatcaacaaagggaaataatatatggcatacaaaggaggaatcaatacatgatatggctaatgtccaattcctattaattttgatgttagctcacatatctcaatatcatacagaaatattactaatacatcatgttgaagaataaacatcaaacaataatgatatcactcatttagcggaaaacattataaatattttgaatataatcttatttcatgacaagtctaattatttacaagatttcccttaattaagtaacatatatgtgggcacttgtatgtgtacataaaatattgtattttaaacacatagtactcaacaggaaaaagcgtgtcatatattttgttttattttagctttcttttaaattttcaatgtactggcatatctttttttatccctgggatgttttagggcctgtttctggcaattatctgctggcagagaatcacatttgccttaccccagcaacttagcaaagatagcaaatactacaaatgtcttaaatggcattgtgctcagtttattaaattttcttgtgtttagagatatctttcagcaatgactttggactttttatcagtctttgaggttttgctgttatcctctgatattcacttactgaagattgtgttgtttttaagtgacattaaattattcctctttatgagtgtccaattcacagtgtgcatgtgaatttcttttctcaagttctatttgtcataaggatttttggcagacattcattggcacacagttttactactgtctttttaacaatgacagatatttaacatgagttcaaagcatatttatggtaagccaggccactaagattgacacttcagtaaaagatgctactgccctcatggactccaatccaactagggaaaccaacttagaaactagtgacagaaactcactcctcccaggtgtgatgctgagctcattagtaacatttgtgcttgctaggtttcagaacacatcttcaaagttaagcaaattgcccaagccacacagggagaaaagggcagagtttgagttcacaactttctgactccaaggtatgttattatatacgatgtattgaaggatatcatgcccattatttctcaatgtagacccagttaagatgcacaaattaagtgagaatattattttgcaaccaagaaaataatttccattgccatttttagcatgttacttattatattactaaagcaagtgcttcataaaacaagaaagaaagtaggttataaggtggatatcaatctagcctgcctttcttccaacctaaagtttcatggatagatgaaatttaattaatctttaaaatactgttcacatcttcacttcttaaccttcccaagacttaataaccttctgtgtgtggctgttctgccttccatctaagttacagacattccttccgtatagagattgagaacatctggttaacaccctcttggtaataaccttacatatttttttttgcttttaaagtagaattaggcagcattattcttagaaaatgacatttttatattgaagttcctttagctccatgacttttgaatatacacttctgctatggctattagacatttctctcttgagaggtttccataattctgaaaacatcctttcttcctactgaaattctgttgtcaattactttgtttgtgcagctgagcataatttgtcttaaaatgaaagcaggaaattcagaaagagatttggattctttggtgtttcatcattattggaaaaaatacattgtgtatctccaaactgggactttgggtttactcaacagtgttaaagataaatagtgtcactaagtgtcttttagtgtcaggcctattttggatgtggttctcttagttaattgacagagaaaagatttgagtagtttacacttggctggttaaaaaccagattcccgtcaggaagtactagcatatttttcaaattattaacagaaaatattataaataacagttcaggactaggaacaaacataattaaaagcacattcagaaaggctatataaataaggtccatcaattacaagggtttacatagcttacttccccttgcttgtaaattaccattggaatgaatggtttcaatttcattttcagtggaaatacttacattcatggatagagtattctaggaaacaaaaataggaagatccttttggttgaagggcttcttttcttgaatgcatattttgaattacatgaacataattgaagtaattaaaaattggtctggtaaagaagaaattattgtaatactcttgaacaaaagtaaatgcatctctaatattgttagtgaactccacagaggattactattaaagatagtatgcatatctgtcatttaaaaggtagcacctcaggtggactttaaatgacccaagggtatcttggtacagagcactaggagttgggaaatttagttcatgtattttgcatgttcatcctgccaaatctgtccaagatatcacatcttgtgtagtgaatcaggcagatatgatccttgtgatgtacacagaaaccaataatggtatgtgtaggagagcaaaacacaatggtgttccaagaaacagagccagcttcctcatctcgtctattaggaatcgttatctgtccactggctcctataagttatcattctaaatattttattattttgttcttaaaatttgactattcctcagttttttgccttgtgtaaattaatttgtcatttaaagtccccccccccaaaaaaaatatggtctgtatgaagaaacttatagaaattatagtgtagaattttctgaagggtttgaaccattataattttaagtaatagcctctaatgttgaaaattaaactagcctattttcctaaatgtgtaaacatgcttattgtgcataacttaagtactcttgaaggtaggcaaattataaattgtaattaaaacaccttaagataaacaatataatcatatactcaatgttaaaaataaattacttattagaagactgaaagcatttctgttcataacttgttcattctttttccacctttgccccaaattattaaaatcacctgaatatgaccatatgtttaaattcattacagattaatgaagtgcagctaaaacaaggctgagaaattataagtgataagctagagataaggagtaaagccttccaagttcaggtgacaaaatggtacatctgaaagaagagatgacattaaaactctaactaaatgttttcaaggtcttgtgtagctgtttctgagtttctggatgtgactcacagttccacatggctgaggagacctcacaatcatggtggaaaatgaacatggaagcaggcaagagagagcttgtgcaggggaactcccgttcataaaaccatcagatctcgtgagacctattcactatcatgagaacagcacagcaagaacccgcccccaagattgaatgacctcctactgccctccctcacaggacacgtgggaatgatgggagctacagttcaagatgagatttgtttgggggcacagccaaaccatagcacattcagaaagccagcataatgtcatggtatagataaaatcagacataaatatgtcatcccatctaatgtcttttttaaatttttttttttggtctaagaatctccagttgttctgtattggacattcttggactctaatacaccttttattctagccaccagattaagtcaaaccaagagtcagcttccttagctgcactattctgctctaattttctgccccagggcatttctgacaagaccactggatactggcaggacatcttcctttattcacccaagcatagcctggaaagggataggaactaacatttaaaatggcaacccatgattatgagaattggagaaaaaatgcccccctctctgtttcttggtaagacaattcacaagtacattatacatggttccttagaggatcatggtgagatcaagcccgagttgcccgctgtgtagactaactggaggacacacttcacattgattttccctccctactgatgcatgctacctccctcactcttgctacttggcatcacttttcaaaggaaaatccttgcatggcagcctgtgttccaggctctgctttcaagagtcaaggagcacaggaaaccatgtctcacaatatttaaggagtagtccgctctatcatgtctttcatatagcagcattttatcagatgcaaatccttatgatttatataatttgctcaccaagttgacactaaaaaatatatggagtaatgcgcaaaaatgccaagacactattgacaaagaatgagagagaagatatgtcctttcagattaaaaactatcataatagggcaatcatatgaaatataaaacattgaaccccaaatagaccaagttaatgaaatgcagggaggtagcacgcatcagtagggtgggaaaatcaatataaagtatgtcctcacctgtcccctgtgtatcaatattttgttttggctttgggtacctagtttattaagtgataataatctgatcaaatgatggttttgcctatcaagtctgcctgtcttttcctgtgtgaacaccttgaataaaatagaagactgtgccccttatatgtatgatcaaatttacctattaaaataatttttggggagtcctaaatggagtgtagtttttctatccaatatttctgatatattttgtcctgttttttttctcttctgtgtatgcctacccaatttatattaggtggtgtaaaattaataccagtttttgccatttttttaagtatgacaataaccacaattacttttgcaccaatcaaatattttcctggggaacaaaatcaattccatttatatttcctgaaatattaggacaagactgctaataatatatatttcagaagataatagcgtattttaaaaattgctaatgtattaagccgcattttaaaaaaatttctaaaagtaggcaacatacagaatgtattttcaatcaaaatataataaaattatatattcacttcaaaagaattggcaataaatatatatttatgtatgtatttattaaaaacctcttagcaatttaagagatgtatctggatggctctttgattaaacagaaattaaaaacataaattttaacattttagaaatggaggtgcaaaaacacattttatccaaaatataggattcaatattaagattaaaaatttagcaataaatgcaattactggtaaacataaggactaaaagtaagtgagcaaagtagtaaactctaggagctacagaaaaaattaacctaaagaagtagaaaggagataacataaaagcagaactcaataaatagaaaacaacaaagtaaagttgttaataaagcaagatctggttcttttaaaaagccaataaaatagacaaattactgccaagactaattaagaataaagatgagaaaaataaataacaatgtcagaaacaaaaaagggagagaataacacgtacaaatatatttattttggatttatttatctatttataattggagacagcagcttgtgctgtcacccaggctggagtgcaatggcataattatagctcactgaaaccttgaactactttcttctgtacagtacatactttatgattttatgtcattactagaaaatgagaatcattctggaattgatttaaaaataacttctagttctatatttagtgatgttaattgcccatttgtaaaaaaaatgagctgtttaatactacttaatgtaaacttcatgtaactacagcagtttatgatatttttatatcagcaacacttattctacatatttggtaacgaaggtggtatctcaggctagcagctctaacagcacctgggagagcattaaaaaggcaggatctcatgcagaagaatgaaattggacccatacctttcaccatatacaaaaattaactcaagatggattaaatatttaagtgtaagacctcaaactataagaaccctagaagaaaacccaggaaacaccattctgttcatcagccttgagaaagaatttatgactaagtcctcaaaagcaattgcaacagaaaagcaaaaattgacaagtgggacctaattaaactgtcgagcttctacatagcaaaagaaaccatcaacagagtaaacagacaaccaacagaatgggagaaaatattcacaaactattcattcaacaaaaatctaacatccagaatctataaggaacttaaacaattgagcaaatgaaaaacaaccccattagaaaaatgagcaaaacacatgaacagacacttttcaaaagaagacataatcagccaacaaacctatgaaaaaatgcccatcatcactagtcatcagagtactgcacatcaaaaccacaatgagataccatctcacaccagtcagaatggctattattaaacagtcaaaagacaacagatgctggcatggctgcagagaaaaaggaatgcttatacactgttgctgggaatataaattagtttggccactgtggaaagcagtttggaaatttatcaaagaaattaaaagagagctaccatttgacccagtgttcccattcctgggtataaatccaaaggacaaaaatcatactgatgctgggcagacccttggtccttgagggggtcatgggagatgggttcttgattttgtacaagaaggaattcaggagcaaatcacaaggagaaagccaaagtaaagtttattggagtgcttctccacagatggagcaaggcagtctcagagagaagacatgctgggagggtcttaggtcggcagtgttactatgtttaatatgcataattagagggagggttattcataagcttttcatggaaagatgcagtgatttccaggaaccagggaacagtcccttttctttatcatgtagggcttttccagtggttgccatggtaaacaaaaactgtcatggtgacaggggtatatttttactatggaaatacagtataattagcatataaggagcaatgaaggtcagttttgctgccatcttggttccagatggtttaggctgatttctttactgtatcctgtcttatcagtgcggtcttgtgacctgttgtcttggaaactagttctgctgaatttctatctcagtactaccaaaaagacacatccactcatatgttcatcacagcgctattcacaaaaacaaacacgtggagtcaacttagatgcccatcaacggtagactggataaaggaaatatggtacatattcaccgtggaatactacacagccataaaaagaatgaaatcctgtcctttacagtagtatggatggagctgaaggccattatcctaagaaaattaatgcaggaactgaaaaccaaaaaccaatattctcacttgttagtgggagctaaatattgggtacttgaggacataaagatggcagtaatagaaactgagtactactaaagaggggagggaaggaggaagggagggaagcaacggtggaaaagctaatgactgagcactattctcagtacctgggtgatgggatcattcataccccaaacttcagcgtcacacagtataaccaggtaacaaacttatacatatatcctctgaatctaaaataaaagttgaaaacagagaaagatatcagtttcaagaatatgaaatatatgagaaatagtttaattgtaagctatgcgattatgaaccattttacttaaattctgtattttctcatgtgcaaaatgggaatggtgattattttaaactacattggcatatcatgaggattaaataatgtatgtgtaaccaaaaaaatacagaatctcaagcctcactcagtcctacagaattagaaatgtattcgataagattgccaggtgtgatctgtatgcacattaaagtttgagaagccctgtctattctagatatcatatacagtcatgcattgaataaggatgtttcagtcaatgaaggactgcatctacaatggtggtaccataagattataaaagagctgaaactttcgtatcccctcgtgactcatagctatcataacatcataacacagtgcattactcatgtgtttgtggtggtgctggcgtaaacaaacttactctgctgccagttgtataataaaagtatagtacttagaattatatacagtacatactacttgaaaataataagttactatgtcactaatttatgcatttactatactatgttttaatcattatttcagagcgtacacctcctacttataaaaaataaaagttacttgtgaagcagccttaggcaggtccttcaggaggtcttctaggagaagcattattgtcataggagaggaccgcttcatgccagcttcaggtcttgtccctgaagaccttccagtgagacaagatgtggaagtggaggacagtgatattgataattctgaccaggtgtaggcctagggtaatctgtgtgtttgtgttgtagtttttaacaaaaacaaaattaaaatgtaaaaaaaaaggaaatagaaaaaaggatatagagttgggatatacagaaagaaaatatttttgtacagctgtacaacgtttttgtgttttaagtaaagtgattttacaaaagagtcagtaagttaaaaggtttataaaataaaaacattacaataaactaaggttaatttattattgatgaaagaaagtttataagtctttgtaagtttagtatagcctaagtgtacagtgtttatagtttacagtagtgtacagtaatgtcctaggccttcacattcactcatacctcaatcactgactcaccaaatcaacttccagtccttcatactccattcatggtaagtgctgtatagaggtatactattatttatcttttataccatatatttactgtatcttttctgtgtctggatgcacaaatacttgccattatgttacaattgactacagtagtcagtacagtaaaatgctgtacaggttttcaggctaggagcaacaggctatataccatgtagtctaggtgtgtagtaggctacaccatctaggtttatgtaagtacacactatgatgttcatacaaggacagaatcacctaaggatgcattactcaaaacatccttgttatgtgatgcatgggtgcgcacacacacacacacagtgtaacaaaaagttgaatgcttaagaccagaaaaaaaaatctactttttaatgcagatagttcaacttgagtactgtagttattctataaataaaaggtccagtttaccttcataatgaaagcatatttatttggtttttaaaattagagtcttctttaaaattctgatttaagtgtaaataagttggaaaataaataaatatgtaggtgtgtaaataaaatctacctgaatgtccttgaatgtaattataatattatggaaatgacttcacagtgggtaatccttactattgagttttcaaaaagcaggggaagaaaaagtcatgtggaatgaatatatgtggataaaaatggcatcatctattaaatatatgcctaataattcctggcatctcttttataacatgatgctgatttcactcagtttatggaaaacaactattattttttagttattattatttaattatactttatgttctgggatacatgtgcagaatgtgcaggtttgttacataggtatacatgtgccatggtggtttgctgcacccatcaaccagtcatgtaataggtatttctcctaatgctatccttccccttgccccccacccctgacagaccttggtgtgtgatgttctcctccctgtgcccatatgttctcattgttcaactcccacatattagtgagaacgtgcagtgtttggttttctgttcctgtgttagttggctgaaaatgatggtttccagcttcattcatgtctctgcataggacatgaactcattcttttttatggctgcatagtattccatggtatatatgtgccacattttctttatccagtctattactaatggacatttgagttggtgccaagtgtttgctattgtgaataatgctgcaataaacatacgtatgcatgtgtctttatagtagaatgatttataatcctttgggattatacccactaatggaattgctgggtcaaatggtatttctagttctagatccttgaggaattgccacactatcttccacaatggttgaactaatttacactcccaccattagtgtaatatcatttctatttctccacatcctctccagcaccggttgtttcctgactttttaatcattgccatactaatggacatgagatgatatctcactgtggttttgatttgcatttctctaatgaccagtgatgagctttttttcatgtttgttgggtgcctaaatgtcttcttttgaaaagtgtctgttcatatccttcgcctacttttgatggggttaattatttttttcttgtaaatttgtttaagttccctgtagattctggatattagccctttgtcagatggagagattgcaaaaatgttctcccattctgtaggttgtctgttcactctgatgatagtttattttgctgtacagaagctctttagtttaattagatcccacttgccaattttggcttttgttgcaattgctcttggtgttttaggcatgaattctttgcctattcatatgtccttaatggtattgcctaggttttcttctaggatttttatggttttaggtcttacatttaagtctttattccatcttgagttattttttgtataaggtgtaaggaaggggtccagtttcagtttgcccaatggcatttattaaatagggaatcctttcctcattccttgtttttgtcaggtttgtcaaagatcagatggttgtagatgtgtagtatttttctgagacctctgttctattccattgttctatatatctgttttggtaccattaccaagctgttttggttactgtaaccttgtattatagtttgaagttaggtagcatgatgcctccagctctgttctttttgcttaggactgttttggctatacgggctgttttttggttccatataaaatttaaagtagcttttttctaattctgcgaagaaagtcaaaggtagcttgatgggaattgcattgaatctataaattactttgggcagtatggccatttttcacgattgattcttcctatccatgagcatggaatgtttttccattagtttgtgtcctctgttatttccttgagcagtggtttgtagttctccttgaagaggtccttcacatcccttgtcagttttatttctaggaattttattctctttgtagcaattgagaatgggagttcactcatgatttggttttctgtttgtctattattggtgtataggaatccttgtgttttttgcacattgattttgtatcctgaaactttgctgaagttgcttatcaggtgaagaagttttggggctgagacaatgaggttttctaaatatacaatcgtgccatctgcaaacagagataatttgagttcctctcttcatatttgaacatgctttatttatttctcttgcctgattgccctggccagaacttctaatactatgttgaataggagtggtgagagagggcatttttgtcttgtgccagttttcaaagggaatgcttccagcttttccccattcagtatgatattggttgcatatttgtcataaatagctcttattattttgagatacgatccattgatacctagtttattgagtgtttttagcatgaagtcctgtttaattttatgaaggccttttctgcatctattgagataatcatgtggtttttgtcattggttctgtttatgtgatggattacatttattgatttgcatatgttgaaccagccttgcatcccagggatgaagccgacttgatcatggtggataagctttttaatgtgctgctggatttgggttgccagtattttattgagaattttcgtattgatgttcatctgatatattggcctgaaattttctttttttgtgtgtctctgccaggttttggtatcaggatgatgctggcctcataaaatgagttagggaggattccctctttttctattgtttggagtagtttcagaaggaatggtaccagctcctttttgtacttttgatagaatttggctgtgaatctgtctggtcctggttggtaggctattactgcctcaatttcagaacttgttattggtctattcagggatttgacttcttcttggtttggtcttgggagggtgtatgtgtccaggaatttatccatttcttctagattttctagtttatttgcatagaggtgtttgtagtattctctgatggtagtttgtatttctgtgggatcagtgatgatatcccctttatcagtttttcgttttgtctatttgattcttctctcttttcttctttttggtctggctagcagtccatctattttgttaatcttttcaagaaacagctcctggattcattgatttttgaagggtttttcctgtctctatctccttcagttcttctctgatattagttatttcttgtcttctgctagcttctgaatttgtttgtccttgcttctctagttcttttaattgtgatgttagggtgtcaattttagatctttcccactttctcatgtgggcatttagtgctataaatatccctctaaacactgctttagctgtgtcccaaatattctggtacgttgtgtctttgttctcattggtttcaaataacttatttatttcggccttaatttcattatttacccggtaatcattcaggagcagattgttcagtttccatgtagctgtgcagtttttagtgagtttcttaatcctgagttctaatttgattgcactgtggtctgagagactgttatgatttccattcttctgcatttgctgaggagtgttttacttccaattatgtggtcaattttagaataagtgctatgtgatgctaagaaaaatgtatattctgttgatttaggatggagagttctgtagatgtctattaggtccgctaggtccagagcttgaattcaagttctgaatatccttgctaattttctgtctcattgatctgtctaatattgacagtgggttgttaaagtatcccactattattgtgtgggagtctaagtctctttgtaggtctttaagaacttgctttatgaatctgggtgctcctgtattgggtggatagttagctcttcttgttgaattgatccctttaccattatgtaatgcccttctttggcttttttgatcttgttggtttaaagtctgaaaacaactattattattaaaaggaacaactttatttgcttttagagtagctgattaaagtaaaactaagagaagggatgaattgttagaattttgattacttcagacttgtttcttcttatccataagtgtggcaaaatgcaaacacaaatttgctgatgagattgatgaaataaagagtctccagtactaattaaaattaaaaaggatgaacagatggtcttaacacagctggaagtattaggatgaaattctgcccgtgtgtttagtcagacagcacagttgcaagaaagccacacctgtttacttttctaagagcaaaaatattattaaatgtggttttgatttactgctattttggctattaaatcattccttagtccttatgtgtctgtggtatcgagagataatcagctttaagtaacttaatagtatacatgtatgtctgtgtttctttctgtctaataatattgatcatgacatccacatattaaggcaatcttttgctacttatgcgatttttgtggccacatagtcaaaacaccgatggaaagggtgaaaaagaaaaataataaatattagaatatgcatttgctttgaaaaattctaagtaatgttttcagatttttaatatttaagataatcctctaagccttactcattattcagtgtcttggaatttttgacaatatacagcagataaatgattttaaatagcttcacttaagtactttaataaataacattgttttatggtattcttaataaatagtaaatatgcaaaaaaggaaagtttaaagattaagggataatattaatgtagaataatccttcaattatggccattttaacctttcattaatcatgcctgaatatttttatatgtagaggttccttttatatatacttgtaattaggttctacatacaatattatatttcattcaccggtatttattaagtaactaaataattattgagacactattaccagaaacagcatcaaacccaaacaagagtaatatgacaaatacttccaaattttactggatttttaagtatttaaattaatttgtttaatttaaaggaacgaagtgtatgtattagcccttagattagtaagacctaagtcttactagtgcccccatcctcttattttaataaatgtaatttgtctgtttacctatcattgaagagtccccatatggctggcataaagatttttatttcaaatatcaaagaagcatcaggaaaattgttactttgctttctgacttacatattgtattcaattcctaggactaccatagcaaagtactacaaactgggttgcttaaaacagaaatttattctttcatggttcttatagctgcacgtctgagatcaagatgttgacagggccaggctctctctaaagtcactagtggtgaatctgttccctctgttccattcctgcaattcttggtattcctcgacttgtagacacatcgctccaatctctgcctccatcattgcctgtccctcttcctgggtgtctcttctcctcttcttgtaaggacactagtcatattggattagccactccctgccacttgagacccccatgacctcatcttaacttgactgtgtctgtgaagaccttattttcaaataaaatcacattcacaggtattaggggttagtaccccagcatatatttttggagaataccattcaacccataacatacatttctatttgacaacatttagctcaatggcaataatcttggtaattactttcttaatataaggatgctttactttttaaaatccccttgcctcttttacctaccaacagtgcattgttgtaggtagagctgatattgctacaggttttactgatgaagatgagaacatatttgcagaaagccagcctttgttctggagcatccaggatgcattacttgtgttttgatgctgatgtttcctatgggaggcagtttctgatgtgtcttttcgtgatctctgtaccctggtgtgcataccctgctgtaatccccttactttaaggatggtcttacctagcaactcacttctaatgaaggatgtacagcaaaaggagcagtatatgatttcacatcagattgcaaaaactgcttccaagccaagccttcagataactgcagcttggcgagagtcccagagccgcaggagtcaactaagccacactaaaatttctgacctataggaactgtggcataaggaatcttgttctaagctactgtcttttggtgtcatttgttatccagccatggataactgatagacttcttcatccacatctgctacctgtagtcaaccaaagcagttttatacaaaggtactattttctggctttttattccaaccagatttcacaatttttttgagtgtgggtgtagaggatggtgaaatatccatggaatagaagattgttgaataagaaagtcagaggtagcaaggaaaatgtgtatttagttcaaaaaaatcctatcaacctagttgtatgtgttgataataaagatctctctgtctttcccagcaattcggatcaaccttgttaaggttgaacagagacagacccaggtgtttgaatggttcatatttgtgttttactcctaagggtgaagcacctgtaatttttagggcttaagatatcatcatgaaaaaaattaaaagaggatttttaatggtgaatggagatgctaagcttgtttaatggctattttttttttactacaagtaaataataacttattttcataagcttttaccgatggtactggccatgctagcttcagattccctgactaaattttcccatgtagggacagcagttgcttatagtagatttggtttgcatcacaggtacacactttcagtttgaagatgtattgctttcagggggagtttgttactaatgttcttcttgattcatcatttaaacaaaattaaagcatgtaattttgttcttctgaatttactgtgactctcagcaaaagctatttgttgatcatttctgctgatgaaatcagcaaatcctgtggttagactgtttgattacttctatcttatactttctcgtgagattctgtttcaggaagcaaaaacagtgaattcttcatcttatatgtttgttttaatgaagtgtttctaaataaaatttctggtacaacagagaaattatattttgccatgatctcaaagacatcaatttctgttatcaccagacttcaatttaggtgatcgttttttggtgattaatgcccagatttagaagtaatctgagaaataaagattcaacacaccttttctctaatattatgttgtatttcttttccctggtacattttgttatacttttggatcacttactgagatttatttacctaaaattgtgcatccttggcatatcactttaaaggtgcgatcattcattgatgcacaatttatcttgatttcatagcagtatgatgaaaatccatcccttagagatgttacatccgtataaatgagaacgattttatcatcttctctaaaatgtttgctcttgttgcactcatggatttaaggtgctatagagaatgaaactaattgtatctctgtgaaacctaacatttaaaaaaaagtgccttctgtgcactcaaaggcaagatttgatcaataatgatgtaacctatacagttcaatgctcagtcttaaatcctgtgttgtttacctaaagaagctaggtttagtcatttttaattgactttaagttataaaattaccttgaagagtagaatcaaaatttcaaatatccttaaaacttgtgagcaaaatcaaataatattcagtgagtggaagaacagctaacattattgggagaaggccatgtagtgtttttgctgttttttaattgtttttaagtatcacaaagacaaaaatcatctttatctcatgctcttagtagtctttgagtttactcttggttgtaaggccttaaaaagatttatcaagaaccaacataataagccagccacttatgatgaaactccctttctcctaaaagcagaattagagggagaaatatcaaataaacaaaagaatgcttctcagaccctttctaacctgctaaatctagttatttagattatagagcttgaaataaaaaagagtagaaaattttactccaaaaaaatagagagagtagatttctcagagggcccccatgcccggtaaagatttggtcagttcatcttgatgcagtttacagtttatacagccccaagactgtgcattaccaataatcatcaatattagagtcattaagttgttgtactttatgtttcctctttgtccctattaatttgttaacaaagcatctatatccaatagatgatttgtttttaaaactagccatttgtaaaataccaaaaataccaaaaataaaaagaagaaaatcagtgttttccacacatgcactattaaataatttggtgaatggataataaaatacattcactttattttgtctctttagataatctagcaagtcagtaaatttttggccaatagaaaacaagacagactttaacaatgggtctgtattaattagaatgctttcattttgtcccactgaaaatgtagtggcccaattaaagttcatctaatttatatttagatatccatagctatcattcacttcatggaggacaacaaatgcaatcagatgcaaaataaagactttttccttcatacacacacacacacacacacacacacacacacacacacacacacacacatatcaagcaaatgcccacttatggaggctatttatttttcttcttggtggcactgtttgagctctctgattcgtgtatcgaacatggtgacatatttacgtctgtgcattcatgtcagtcctttcggaggttctccctgcttcctagcagactgtttgaaatagctctttgtcagtttcagtttacacccataaaattggcttcaagtttccaccttgtttgaaactccctggccaataaccttcctaacccaaaccagatgtgaaaaagttcatccaaacagttttgaatgtgttgaccttgtccacatattacagagtaggggtttgtaaaacctaatctaaaatcctattttccttccctcggggtatgtcagagaaaatttcataacccttctaaggtcagatgtatgtagatctgcaaatctgtaacatctccactttttttctaaacctgttttagttccttgggaatcatccagtgtcctctgtcctcccacctttttgaggatgggcaattggaatgcccgccccctgcctggaatttttctgtggttagctaagtaatttcttttttgtagttatccctgcacaatggcctccatcttcccattcatcaagagtcacattcttccaatacaaggacaactacccacttaggactagaacttaatgtcttccacctgtaagaggctttgggctgatggcctcctcattagcatgctcagtgtaagggatgcccaaatggacttgctccctgaaattattttcttgcaggataatgttgatgagagaaaagtcttgtttgcaaaatcagctggagtttatatgttgatatatttatataaatagggctccatttactcattgttttatgcataattgaatattggggacagtcttgggaaaaggttttaaggaacaaatatttactgacacagtgacactgaaaagagaaggcaagcattttacctactggcatgtgatttcattttgtggagcacctaagtcgattactgtaatcagagagatgtgtaactctgaagataatagtaataatattttccactaaaatatactgctcttaccatgtaaagttgaaagctttcaaatatggactctgttcaggaattgtagaagagcttaaactgaccactggctacagaatattgcatttttctttctgtctgtaattcttctatagatttgattacacaatctccccacaatctatccacatttcatcactccccaccccatttgccctatctggcccacatcatctctttcctggaccactaaataatctcctgagtggtctcccagcttacactcttgcccttccccgtggtttatgttttataaacagccatagtgatctcttaaagggaagataataaatgttttgggcttgtgggccatattatctaaatcacatctactcatctctgatgttataacatgaaaccacaaaaccaagcatgaaaccagccacaaactggtttgtgcataggaaagtgcatagctgcattccaataaaattttatttacacaaactgatggccagccatttggccagtttgccaaccctgttttaaaactaaatatcaggatgtgtcactttcctgtctgaggccctccttggtcttcttattttacaaatataaaatctgaactcctctccatggcttacaaagcctcccttctgtgaactcgctgctaaacattcctaaccaggtatcctccttcctggctgcttcacagagagagtcactatcccctctagcctgtttgctgtgactgtgtccttatgaccttgacatttgccgttccctccagctgaaaccctcttcactcccatcaacaccttgctggggtatttttggttttgtttttaaacacttgggttttagcttcaatctacctctgtggagaagcttccttgaccctctgtaaaaattattgcactctcatttcctgtaccaacactgttcatccatttttgcagactcgctttcttcagagtctcactatttcaagttatctttttggttttgtttgtttgtttgtttgtttgttttttgagacagggtctttctctgtcagtaagactggagttcagtggcccaatcatggctcattgcagcctcaatttcccgggatcaagtaattctctgacctgagcctcccaagtagctgggaatacaggcctaccaccacgcctggctaaatgctttttttattattatatatatatatttttattttttgtagagacagggtctcactatgttgcccaggctggttttgaactcctgggctcaagtgatcaacccactttggcttcccaaagtgaaaggattactggtgtgagccaccatacccagccttattttatcttatgttatcttatttatttatttatttatttttgagacagagtctcactgtgttgcccaggctggagtgcagtggtacaatttcagctcactgcagcctctacctcctgggttgaagtcattctccagcctcagcctcccaagtagctgggactttaatcacccaccaccatgcctggctaatttttgtatttttagtagagacagcatttcaccattttggccaggctggtttcgaactcctgacctcaggtgtatccgcctacctcggcctcccaaagtgctgagattacaggcgtgagccactgcgcccagccttattttctttattaatttattgtatgttgaggcatggactttgcttttctagatcagcaatatccagagaagtgtatgagtcataatcagtctacaactaatggttgctgaatgaatagatgtaagtatagctttttttagtattagtgcagagtctaagtattaagtattagtagaataaaaataataaatccttaaaggctgattgaaacaaagtaagaggatgatatggaactgcttatatctgccttgctacttgatctgttaatagaaatagagggtctaatagtcttaaatagagtcctgctctcttctctgtgtagcttaacctacacccagaggaaaattcagtgggcaatgctctacaaggacattgagattctaaaagagtccaggagagagccatcaaggttgggaaatgcatcagaccacattctcagaggagcaataaacacaatctgtttttgttcagcctagaagagattcacagcattaggtgctctatgttgacatactcctttataatgtaccatgagctcaaatatccaaacagcagtaaacttacataaaggtacaaggagtcattggtcatgagagaagtatcaatgaaaacctcagtaattgcaccactgtatactcatccaaatgcctaaaagaaaaataacattatgtctttcaaggtacgtgtcatcttagataacatcaagagttggcagggttgaggagcaaccggaattctcaatttacagcaaagtagaaattggtacaaccattttgggaaactattggacaggatctactaaagctaaatatagcatagcttatgattcaaccatcctagttctagatatatactcaacataaatgcttacatatgtgtgcacatggctgtactattcaaattagcccaaactggaacaacacaaagtaaatggggtgtattccttcagtggaataccaacagaaataagaatgggaaaaacagttgccatatgcaagaagagaaaaaaatggatacatctcataaacaatggcaaatacaagaatagtacactgaagcatccatgctgtctgagcttatttacagaaagttaaatttttaacaatctctgctggaagtcaggggcctgatgattgggaagggagtgtttgtggcattggtaatattctgcttcttgccctgggtgctggtcacacaggcctgctcatttacccgtatactgatgtgatctttctgtaagtaagatatgtgttaataaaatgttcacttcatcataagttgcttgatggcttccctcaccatctagaatacagagctcacatcaactttctctgatttctctcccaaaactcctaccaggtcctctcctataccagacactcatcaagtgcaggagacagtgctcttaggaggaacaagacagttgaatatattaaggaatgttctagctgttttataaatagcactggatggaaaaaataacaatttgaccttaataaatcatactcacactctcacttgctttttgattttcaatatcaaattgcaaaactctacaaatgtccttgttgctgtttcattgcatattagttcctgaatggatttatgataatcctcctgcttccccagcagagatgtcactggcatggccctcccccagagcctagtccctgctctgtgccatttattataactaattggcctagactgcatgagatcacatttaacaaaacatctgatggctcctctggttgatatgtgcttcagaaggctccctaaagtgtctaaggttttcattagtttttagagcacactgagttaattatattgctcactagcttttcaggttgaatagtcaactagaaaaagaagtaagcatggagaggctggagagggagtaaaaccatttcttgttttggcagccttcaaaccttgtcctcagaacttgagagtttttaactgcggcctttcttgaagcaaaaagttgatgacctaggagtgacttactaaatgcaggtggctggtagaagaaataaaacaggacctcaccccttgctggaatgtgcaatttgtggtaaaacttgagggcgcattatgatatgttgacagcattcctcttgaaagatcaggacaaaaatgaaagctagagaagcaaactgcatttagattgtgcagttgctctgtggtccacagggctttgtcatgagggagtgtgggatacagtgggatacaatgaaggaaaaggttaccgaagattgtaggggtgctcattccctgcattacagtactagggagaaaatgaagagggccatcgtctgtagtcagtgatagtgctaggaccagttgacaagtgagttagcttttatggctctttctggatctgaattctttttccaacaggaatatggtagccacactacatcacaaaactctcatgtgtttttgaggtcttgccagattgctcctcaccgtggcaatgatgtctatggggagaatctgtaggaagcttactgagtcttttagccctgaacagagcacctagcttctgaatggaaggacggttgtcatggaacattccagactgctggaaattagcttggtggttctatctccttcacaaacccaccattgtgttagctttctaattacaggactttgcaaaccaagcgtctattctaaggaatattaattatatcaaatgtattgtatatactaaggatagttactaaagtattcactttttcagtcatgtgtatgtgctgtatattttaagtatggagtatagatatacatgcagatatgggcatccattgtacatctagatatgagtggattatagatatggatgtgagcgtgaattgtatacaaatatggaatattcacataaaggaagcctagttataaagggaagaaagggccatattaaggcatttttattttttgaagcagatctgtccctccttattagccttgaagatcaattctgaaaatctaactaatttgagaaaaaaaatgacagtatatatatgtaataatgaaagtgacttagggtgtgaaatgcttaaaggcatggatacaatattcttcatctctgtattcccagcaccttcacacaatagatgtgactgataaatgcaaaaatgaaagaataaatagcatatgccttcatccactcgaagcaaagaaaaaagaagtaaatctctaaatgtttcccatcataggtagatgcagctttcccagctttctattctgagagaaaaaatgctgcaaatcacatctcccttgtcctatagttttccaaagtgatgtccacatgtccctgcaaatttatgctgggtaggaggccggctccttgctgcacagccagggagtaatttcagttgttctctggtggaataagacattttgtgcatcagcaaggatgtttgcagctgacagtcctatcagcaaatgcagcttattaagatcaccaccaccacaacaaaaaaacaaatattggagatgaatataagacagatgattttgtttatctcaagtgaaaaagacaagcaatgagacccctgggagcgctgaaatgagaaacttctgaagctaattgagatatgattaaaaagattgctgtgtgttattgccagcagtcatagagttttgtcattaggtttccagtgttggagcaatcaaaccagttatggcttcagcaagcagcagagtatcttttagtatacatatttcctggaaaactataacttattaaaggcataagtagggtttctgaaacaaattcaataaatgtattttaagaaattgctctctttggtatcatttattatagactcagatgtgtcactagattttgtctttttatatggcagtgctgtccaatacagataggatgcaagtcatgtgtgtgattttaaattttcttgcagctacattaaaaaagtaaaaagaaagaggagaaattaatcttaatattttcgattaaactaatctatatataatatcatttttacatgtcttcaatatgaaaattattaatgaaatattttacgttgttttttttctgtaccagtctttgaaatccagtgtgtattttacatttacaagacatctcaattttggccagctatatcatggctaatggctaccatattgcacagggcagactaaagcttctcctctacttggttattgtcagagataaattatataggttatattacttccagtatgccacttggaaatttcaggactatactctttaagtgatattatatttgctaatggaggaaatttatccttctacactcatcttactgtgactcaaaactctcaaaatatgaaagaatcatctgataatgaagaatacatcctggttttgtagaaaaccattaataagtaatactatgtattttaattatatttttaccatgccccaagttattgttcaggctaaatttcaggataaaaattatctggcttttatatatggttcatgacgatgtgttatatattgtaaaatcctcactaaagaaaaacagaattactattcacaagattatctttagaaaaatgtcactgtgtattagatgcttaagccaagtgtgaaatagtgtagtctatataatgtgatcaggcataaaatatatataaatatataaaatatataaaataaggctaatcctctatcacacttgaaatttttatgtaaaaaaaaaaatctgagaagtcaaggatcttagctgtccttgaagagttggcatgaaatgattggtagtccattcccatagtccatctcatggtaccattaagttcagttattttactaatgagaaatatttgtatggagagcacatgcagaacaatagaaccaagggcaagtaatggcagaaacacacgaggacgatgccctgacttagaaactcagttacgtggcattgaggtagctgagatagagaaaaggaatggttgacgaagaggcaggttcactgtgcttaggaactggtgagatgatggtggatgtttttctttgctcttcttcttagttgattttgatagttaatataaatttcatgttctttcattcatggtcttcaatattaagctatccacacccacatactttaatgaccccctagccaacattaaggtttagccaccttaaatatttgctattgaattcatcatgtgttaaacctcagcttctacagaaatgtaggattagaattctgcagttttgggttgaaaatgaaaatattgttgttttagtaaaaacaaaagtgttttgaaggcttgaaatcccacaaataagccataaactgtattaaacatgaatgaaccataaagctcttcaaaactcaaatttggagtcattaaaatcgctttgaatttgtactacttttgttggtaattaaaacgtttgcagaatctcactagtgggaacaattgtagagttattgtttcacaatgacgttagcacatcccttaaacaaaagctgcagccacagtagacatggtagaacctgagcaatctgagtgacagattgacttgttctccaatttgtctgggtgaagagcattgaacaattaggcatacttttgagggactggaaaaccactccctgttccatcactggggcacttaaaattcagaaattttaatttgggagtaagaatttcattgcttttttatccaagtagaatctaggtttagacatttttaccaacttattagaataatttcaaggatagactatgtatattaaaaaacaccaaattgtgatggagatattgtaaatgtaaaaataatgagccaattaatatatccaaaaataagcacatgaaaattggctctgatggaaatttttaaaaataaccaattgcctgattattgtaattacatgtttccctttcttattctgcctcctgtggaaaacaaacaacaaaaaaatacagagaaactacacaattaataactattaatgattaataatggtttataaaccatttgaaatcttcctgaaatacagtagataataaataaagtactaaattatattaactccaattcaaattacaaggtttcccctaatatttttaatgagtagaccttaaatcttaccttataacttaagattaatatatagcctcttattgctgacatgttttgtccatatgtgtatgtatattgtccttttaccaatacatctcaattggtgataatgatttttgtgtcaataaagataattactgttgtatgttttccaatataaaggaaaaacaaggagcctataataataattcaagaaaactcaattaactatttcgtgcatacctggtttctgtacccaggactccaaagtcttatgtgaagaagatgtcgaggttgggtgtggtggctcaaacctgtaatcccagcactttgggaggccgaggtgggtggatcacgaggtcaggagttcgagaccagcctggccaacatagtgaaaccccatctctactaaaaatacaaaacttagctgggcatggtggcgggtgcctgtagacccagctactgaggaggctgaggcaggagaatcacttgaacctagtaggtggggttgcagtgagccattgcactccagcatcggtgacagagcaagactccatctcaaaaaaaaaaaaaagaagaagaagatgtccaaggatagacagaggatgatgagtaagggatgacaatcatctttgatcaatctttgccaggttagtcatgaaactgattcttctgaaaagctagatacacttccattttgtccttcgtctttgaagttaatgcctggtcaattttcaaagccaaaataataatcactacctgtaacaaggctgcctgacgcattctaggggacaccattgtattatggactatatgaatggctggagttttgcagtgcatgttctgtactatttgtctggaggatctgatccatttctatgctggatatttgcatccattatttggctaattaattctgaaaagtaggtcatattttacctgaagttaaatgacttgcccaagggtcttgttccttttgcctatgggcgtgacagtttataacttctctacaagactaacatcacttcaaaattgatcttaaaaagagaaaagtatacatcctgaaaaggattttttaaatggaaagagggtgctgtgctcttggcattctcaacttccagacagcatttggctctagaagagtttatcatctttctttgctaaaaaagacacataccatattatggaaggctctcaggggcccagacagtcacatgttaaatgaatataaccagaccctttagagctgaaagctctcttgaaactagagatgtatgtgaggaatttcaaaatagctatatatgaaaactttaaatgtgtgggaaactttaacagcaagttctcatctcctaaatatgtgtgacagcacactgacatccatgaactatgagtaatagggctgctattatgtttcattgccatatacatacatctatttttaatatgttccaatataattttcagttcaagagaatgcatgccacttctctttaatgataatgatgaatagaatattgattagaaaacagtctgaataacaggtaattgataggggtaggagatgtggcattttccatcttctttttacataataactacaaatttccaaactgcaacaatatatatatcaggcacaatcaagaaaatgaaatatataaattaatttttaaattaaatgtctgatgcttaaataaacatagccttataattgtgtactacaaataaatttgatgtatttaccagttgaagaaaaatagtatcatttgcacggagatagaggatactgattagtgtttatggtaagaattttgaatgtgtctttcaatttgtttcttggatggaaggtacatgcacttctgaaattatgacattcacaaaatacactgttaaggttcttatttactctgatactattgagtccaatagcatgagaaatgcccacttctgttagctaaactgagaaaggccacaatttcctattaagctttgtatagttttatgagaaaataaagataaaaggcatgaggaaatgaacgagattgaccttctccattttccaatatgccattgcaggcattctgtgtccaccttacttttgcttttctctgcaactctagttgtacctttttattttctttctgctgtttactttgaatgtgtgcttcagagcgtcctgcatgcattgcttggccattgcactatgactggcttaagtaagttgaacaaacaactatttgtagaaactagaatcctggttgatatggatttatttcaagcaagaagaccaaaatcatctcttaatggattatagtggcctgcgaggacctttaaaataagaagccatattactcatttaattaaggctttgatgaaagtgcttaagatttttcctacaactgtgccatgttttctaatcttctgaagtacattaaagatagatagcccccgttctcaaaggtacttcaattaaaaacaacaggagcaccataatccttggtagaaaatacttggaaaacttgataaaaggagtgaaaggaagacaatcaaagttcaacattcatcgatttatttttagaaaatgcaatttaattaagtatagtctccatctctttacctgctttcactacatcttgagagactcgggaaagctttttttacaatagaagatgagtgaataacaatttctgtgaaaaaatatgtttcttcttaaaaattattggggccattcttcctagaaaaagtaggtgaacaaatataattttttataaaatgttcctatgttgtgaaaatgttgattggtaggactctatactctagaaatagctttgtcaaaacattatatttattttggatgtctttacagaacatttgaatttgctgttagtctcaaagctttttctaagatcagcttttccttaataatcaagcagaagtatgtttttaaaagtactcggaattatgcagccttagacttgaagcaacactgaaaactcacttgatgtcatgctcctcaaacttcttatattttcagactaaagatatctacaacttgtgccagattaccaaccacttttttacctggacaaacaacttgatacgtcataggatatcagtgaatttcctgttcttaatatttgcaaatagcaacaaaatgcaatctaagttaaggaaaatgctagtgcttcatgtaatatggctaatgcctgctaaatagtcttcgaatatatcttcatgaccaatggaatgtctgagtggatatataccttattattatcattattatatttttcatatgttagctttttcatcattaatgagctgaatattcttgacttttggcctacagtagacagaagttgttctgaatagtggtatctggtcgggcttggtaaaatgatcacccatgttttctgaaagcacagtgaccataaagaatgatttgggtcatttcatgacagttttttcccatatattagtttcccatagcttctaagccgttttcagactacagcttcacatattactttaaaaacaaaattaaaattcatataccacatatttacttagaaatgacttcaaaacagagccaaagagattgtcagcattttcccattctgcatttaatcctcatggttaacattataatagtcaacacttccatcacacaataattctcagaggtagagacatgggggtttggagtaggagagagaggaggggaagtaaagcacccctcgtaggaagccatattagaatttcagattgtggactggacagtttgaaagaaagaaaaacaaatttgaattctacacattctgatactttatgaaaggattatgcttatttccttcctatctgccactgtaaagttcactgttttagcagttctctagttcacataaaacctgtttttgttttagtctgtcctccaaaacaactcacagtgatagtttaaattccaagtgcacttggttttacacacacacacacacacacacacacacacacacactcacacacatgaaatatcaatggttttcagtaaagatataatgacattctggccagttacccaatacagaggtcagatatgagatgggacaaaaggaagctgctactggaggtctccagtatctacaagagttcttgtagatagctagatatggaagtaatatggcccgcagtgcctttcccattagttgaaatgtgcataaattcatgggaaaattgttagaatctcccacaatggactttccctaccttccccatcagacaatagataagagaagaaaactagttaggtgatgaattttctccttctataagcatgacatgtggcttctgtaatgtgcccttgaatatataaaagggagtcatttttcctgtatgtattaaagctcaaaagaaacttttaattatacataataaataagtaaataggaaactttttatttcttaattcttcaaatacatttttttttttttttgagacggagtctcactctgttgcccaggctggagtgcagtggtgcgatttcggctcactgcaagctctgcctcccgggttcgcgccattctcctgcctcagcctcctgagtagctgggactacaggcgcctgccaccatgcctggctaattttttgtatttctagtagagacggagtttcaccttgttagccaggatggtctcgatctcctgacctcgtgatccacccgcctccacgtcccaaagtgctgggattacaggtgtgaaccaccatgcccagccttcaaatacatatcgagtgtccattgtatgtcaggcccttttctaggttctaacactagcgtagggatttaatcccttaggaaattactgcctgcatgaaatttatagtctaatgagagtttggggaaagaagtcacacagtaaatcaaatgaataagtaaaatacataatttgtcagattgtgaaaggtactatgaagaaaaaataaaatgaggaaagagatcgagagaagggttttcattgtatggggcagtcagagaaggcttcactgaattggaattaaaaacctaaagcaggggagataaatcatggtgttcccctttatttgggacttcaccatcccctttcaattacaaatgatctaagtcattgaagaattgtttccaataaccagtaagacagttgtaaaacacctttgaaattacaaatcactagagaatactatagcaacggcacattgttctatgtcgtaaggtctaattttaattatattaataatttattgttgatatacattttgttgaaagtgtactaaagaagttttgtgcagtaaaatgatgccagattagaggacataaaggagtaatcacctaaagtaaacatgtagctggaactaaattatttactttagaaacatttcaaatgccagagtctaattccatggacaagtgttttcttaaagcattgtgcggcaattaaggataaagactggaaaaagtcaaggtcaagaagcattgttctgtaattaggccagagttatggcagctttttgctgggaggaattcaaaacatgatcagaatgataagtggggctgaaattgataaacagtttaatattacaattgctctgttgtaccatgacagtatcacatttgctaaacaatgcaaatattttatgagataaaatctcctgatcatatttcaaagcttttagtagaaagcaagtggcagttcagcttgtggcagttcagcttgcaagatacattagatgaatttaatgctaatttcaaagaacaattctaaaatgattgaaaaataaattcaggtacaaaaagaataaatacaagactcaaacagtctgatgcctaattacaatctgggacattgtggctaattttgaggcaaagcttcaaaaggtcatttactttacgtagaaaactatctcgtttaaaagagaaaactgtgtggttaacaagaatgtttctggaaagggaaataaggagttgttatggtttttcattagtttttttatatgtttgcaattagaaaaacatgatgctattgattttataattattgaagaaaccaaataatgtacctaatatatcacaaagttagtttttctattatgtttgaacttttgtagtataccgatacccatccagaatcttttttttttttttttttttttttgagacgaaatctccctctgtcgcccaggttggagtgcatctgggctcactgcaagctccgcctcccaggttcacgccattctcctgcctcagcctcccgagtagctgggactacaggcgcccaccaccacacccggctaatatttttgtatttttagtagagacggggtttcactgtgttagccaggatggtctcgatctcctgacctcgtgatccacccatctcagcctcccaaagtgctgggattacaggcgtgagccaccgcacctggcccagaatcttcttaatcttgtcttctacaagacatggagtcacagggcaagttatttaatccttgttagaatgtggtctcctgtttctcatgctcatgctcatctcacatattttctttgtcattacttctcttacaaacctgggattcagtgctcttccttagacgtaatatagacagcatagccccgcccctgagtttaaattatattgtattaatctccctatatctatgtttgctttctataatttctgtgtccatcctctgttgcataaataactttattgattggttattagttttgcttttttccataaaccagtaaatgcttacccccagcactcttactctacttaaatagtgttagcatgacctacttgttgaactttccattagtctttatacacatccctaattctccaaatctctggcaaattctctctcatcttaccttgttgtatcaaattatgactcctcccaattttatagttttcactatttaaaaagaactatatttacatattatatttttattccagtaagaacagagtcagaaaatgagacagaactaaaaaaatgtaaataacaaatgtagaattgtcttgagagttgcttgattagccatatcctgtgtcaggattaattcaccctccataggtccttggctggattgttttataagaaagaacatgtaccaagtttgatatttgacataaataaatactttgtggtgtctatatttttattcgtggagatctgtcttcaaactgaaaatttagaatgaacatttcaaagtaggaacaagatggaaatatgattccatgtaaagtgtgccaaataagctcaatttaaatataaatattgttgagtttaactcatttgatgctggccttacttctattttgatggcctttctaggtgagaagaaatctcctataattcattaaatgatagagagtttgaagaagttggccctaaaatacaaatggctgattatcatgatctatgcacttttgtttatgccatgtttcaagggaaggttacaggcattgtgtgattagaatttaggaaacatttttcaagtatctcttgatagccttgtgaacaagatggataaatgtgggccagatgacaagacagacaagtggttttgtatctgatggaacagttgtctccggatgggttgattaatgtggggatatcaatggagaggctgacacctcatgtcatgcctctgggtgctgttcttggccgtgtctatatagctcatcactgttatcaaagatcatcacactgataagaagcatgctcatcaaatttgctaatgatgacagacttggagaaaattaataaaatggtgacagaatcaatattcaagtgctttcaacaagctggaagtatggatgcaaacaaaccagatgaatattaccagtaaaatatgggtttccaacattcccgtctgcagtacttgtgtacgtaactgaagaagatacttcagagcatgtttcactatggaaaaatgagtgggtagatctacacggagggagaaattttaggggtcgtgtacaggattccacagagaatatgaagaaggcctgaagttacaggaaaaacgtggaggtacagaaataaaagtagttgtagttagctacaagcagtgatttagagaaatggtggtctatgagtagaagaataacttccaagagtctatcatgagcaacagggcccagagatagagactgcaggtagagaggatatctgtgctggcaaatatagaaagatcttggtatgtgagacactgaaaggtcaagtagacaggtgtaggtatcacagaccatggggtagaggagttacaccaaagctatggtgtctgaaagacctaagcttgaatttctatctctaatgcttacaataagtgttttccttaaaaaaatgaaataataaaaaaattaaaaaacgatataatgtggccaatactattcatcctaatagataaaaataacaaatcactaaatggagactttgaaatgtattatcttaaggtattcatcattagactaacatttttctctaattttcattattttttactgtggctcttacagtctatttccttgttccaattttctttgtttataggtttttgctttaaaaaaatttaaatttgcctgtgatttgtctgttttattgtactcttctatgagccaactctttgtttatattattctgatttttaatggcttctaatatatttattgttcctttcatctttattatttccttccttttattttcctttctaacagatcttaagaattaaaatttattatttttccctttttaactaatagaaacaattcaagaatgtctccctgtgtactattttgaccaatatttaatatcccttgctttcattggtattgtgtgtatggtgagtttacttcaatcctgatcaaactgatacttagaaatactgagcagaaggtttttttaagttttctgctgatactgaatggcattaatttgtaattttactgactttacgttagtgaaattaatgtataaaatacagttctaattttgtatatattgaattttggttttctggcgaatacagcaaaaatactttagagtacagatttattccctgctggaggaggtttaattccttttatactgtgtttcagattattctcagtttttgccaatgtgtttgtcactagatacatcttctgtggttgattttcctctcccggcggttaacattgttgacctttccacatgggaggtctctacccgcttgacttccatggccagtgtttttcctgacctctgacttttctcatcactgtttcttcttcactcttttatcttcctcagctcagtccttacattgatgaagctcgtctctacccatgaactgctgccttcaacctgcttttctaatctatccccttgagtttctccatccccgtgcattccacttcttagtgcccactgacctctcttcccaggaaatcaagtggacttctctgcctggattcctaccaggaccttcaactcacgatgttcacatctaaactccttgtcttcctccaaacctgctttccctagtcttttttttttttttttttttttttttacagttgatcaattcctccacttttataagtaagaaaaatagggtgttgtcacctcatctgacatcaagcactgtcaaattttgtaacataaatatatctctcggccaggcgtggtggctcacacctgtaatcccagcactttgggaggctgacgcaggtggatcacgagttcgagaccagactggccaatatggtgaaaccgtctctactgaaaaaaaaatacaaaaattagctgggtgtggtggagcatgcttgtagtcctagctgctcaggaggctgaggcaggagaattgcctgaacccaggaagcgaaggatgcagtgagccaagatcacatctatctctgcactccagtgtgggcaacagagcaagactctgtctcaaaaaaaaaaaagtatatatatctcaaatccatttccttctctccatttcctcctctccacctccacagtgggggaacatagctcatttccaaaagccttcccaactccaatctgagctcaggtcagtcagttccccaggctcacaggtgagtcctccatttacatgcaaatccagctcattccctggacaaacccgatcttaggctctcaactctctacagaagagagttcagaatacttacattgcttacctgacttcctttgtttgtaattttttcctttcagccttccagcctcaaatctcactattcttcttcctgctctttatattccagatgttttctcaagtccctctatgtcccatgccttttcaccatttccttcttctgcctggaatgactcctttttttgacctttatctgacctaaagaaacttcatcatcctttaaatgtctccccaaatatcttcatctgtgaccctctctgatactccctcctctcatcaccttgttaagtcactgacttctccacactaggtctttaccttgcatatacttcttactgtttctattattatttaccaaattacagacagtccaaacttacaatggtttgacataactactttttggctttacaatggtgcaaaagtggtacacattcagaagaaactgtacttcaaattttgatcttttctcttttgagatgataagcagcagtaggaagccacagctcccagttacccacaggatcaggagggtaagcaaccaatatgctagtgtattgtgttgccagcttttttggatatgatgttttttgttttcccatcctacgatgtctatgtgcccatctgtatcatctgcttctgatgataagaagaagaagacagttatttttgagacgaaactcaaaataattgcccagcatgaaagcagcaagccagtaatggccatcacatgtgagttaggactttcacaatccatgattttgaccatcatgaaggataagaaacaaatcagtgataatgaaattgtcagcatcagtgaaatccactcttttcatgaagaaaagagctaggctgattgatgatttggaaaccttagttatcacatgagtggaaagccagattcagaaccacataccgcttagtctaatgatgagtcaggctaagataagaagctgttttgatatactacaaaagtgtaccaatgatcttatgcacatgcaaacatttatagcaagtcagggtgattccaactcttcaaaagctgtcataattgtaggtgtcacaatgcgaaggtcagtggtgaggcaggaagtgccagtacagaaggtgcataggataattgcagatgataaatatttgccagaacaaatatttaatgttgataaactgagcttattctggaagcttatgtcggagcatacatacattcatgaagagtccaagacaacgccaagattcaaggcattcccagaacatgtaaggctgcttttcggtagaaatgttgcagggttcaaattaaagcctttcttaatctaccactcagagaaccctagagcatcaaaaaatgtgagcaagcatacacttccaatttattatcaccataacaggaaaacctagatgaaatcagcattgtttgaaaattgatttttgaactgttttaatccacaagcaaaagaatattggaggcaaaacaacaccatattcaagactcttctgatcttagacaatgcccaaaggtgtctatagcatagcagcaatatgcatcttgatgtaaagatttgttatggaacacaaccaaactcatttaaccagtggaccaaggtgcaacagctgggttcaaagcctactcttgacaccaaatgtttgtacaagctgttaaagtgatggaatctggaccaatgctctgagagctttggaaagggtttaacattctaaatcctgtccagaacatccctgaaccatggaaagaagccttacggcaattcatgaacaggatttgcaagaaaattttgaagacatatgtgaacatgttcaaaggcttttaataaatattctgctattaatgaaatattaagtaataaagtcttattacttgaggaacagctcgaattagacactgatgaagaagatattcatgagcttgttggcattgaggctgaagagttttccagtgaggagctgattgaactggcagaagaaagaagtaaagaagttgaggccaaagggaggtagaagaagatatacctgaggcattaataaagtttacagaaaagaaattggtggaggcctttgccactatcagcagtggcaccaggatgttaaaagaaatgaacatcaatgacaagagatgtgaaagagctgacaggcagctacaggacgctcttgcttgttatagggaaataaataatgaaaagaagagactgtacagtcaaacctagtatcttcctgaaacacactatgcctactaaaccatcagcaagtgtcagtgccccagtgccttctaccagctattctccagcctcatcagaagagagagaaattgatggccctgtcgctgtcgcattcccatcatccagcaattaattttagttcaattcctcaaatgttcttcaggcccaatcaatgtgcttttggctgcgtatgtgactacccatacaaccattctgtttttcacttttagggcagtattcaataaattacatgaggtattcaacacttcattaagaaataggatttgtggagatgattttacctaactgtgggctaatgtaagcattctgagcatgctctaggtaggctaggctaagctatgacatctgctagattagatgtgtgacatgcatcttcaacttaccattgtttcaacctacaatgggtttaccaaggcataaccccattgtaactcaaggagcctctgtattcagcagttacctgtttagatgcctttcttctttcctagactgcgggcctttcaggggagggtcttattcacatctgtattcacagtgcttagtgtagtgcctggctcatagtatgacttgataatagataatgtaaaaacaaaaatgttttaaagtacagtatttgctcgatgaaaatatgatgttgtgacttgcttctgattgactgtcttttataatggtatgataatctgctttaatcgaatgtagtgcttactgccttaaattctgttttgctcaatattaccaacgatactattcttttgttcaaatttgattgatagatctttgttgaatttcttatttttagcctttaaatgacatattgctttgtaagcagccacttgttgaatttttaaatgcaatctgagaatttctgacttttaaatgaggtgagggagacagtttcatgttttatgtagtaattcctatttttgatctcttcctacttatttcactttttatttgtagctttttgtgatttaatttttttttgctttttttatttttgtgtggaatttgccatgttttcttctatctttaagtaatttaaaagtttatcactcaatttttaatcatcagtgcctattgcaaaatagtatacaacatttctaattctatattttcttaagtttttataaatgacaaggaattttgccgtttatggcttcatatgcagtttcatcctatatcttattccattcataattaagtcttaagaattctctaaattggttaatattattagcagtaattcacaaagttctttaattatgtcttcaaatgagtagcatttactttggtaattaatacaatactttattaattgtccagcggattttgtagtgaatatctttagtgaattttctaagtctttgaagggataagagtgtcttattttcatgaacaagtgaaaacgaacaatacctcagttttgagtatatgttcttccattattgttacgcttttactttttcatagaggaacacaaagaaatctgacttatatctcataatagactacgctgtcttcttaaaagtacatagaatactgttcgtcatttgtatattttgtctaaaatgaggctctcagttggattcagtttcttattgttatatagtacatgagaatcaaagatgctatttctagtcctatttctttttcatttctgaagtaatcaactatactatttttgttcagaaatgttattattacacattggatcccattttccattcttcagatgtttcaacttctcacatactctttattatttttaatcctggaattttcttaagtgtactttaactttgattgttttaaccttaagttcctgttaattatattttgtagttcatattttccaacctacttttatctttggtaagatattttaaccatattataattctatcttacacttcctggatatggtcaatttttggttttatcctaagaaattcactgctttctaccgttttgcagtacagaattttttctttgactttttttttattttccttgactattacttgataatctttgatatatgctacttgaagaatatttactgagtacttttcctaggataggtcttttacaacacaatctaccattatattaggaatctcaatttattttcaaacagattacattaaataatttatacttaaacagtagagcattataataaaacttaaaaattgcaataaatatttataacatgtatgacattatgctttgcataatatgtaaaggttctataattaaaagcaataatagtaatgaaaaatgaacaaccccagggaaaaaagacagagggcttaaactgatattacccccaaaaagccaagaagccaatagcaacctataaatttttcagccttacttgtgacgaaaaaaatacaacgtcaaatggcaaaagattatcctttttctaacaaattgagatggattaaaatcactatattttggagaaaatattgaaaactgggcatttataaataccatttattggggtattctaacttcctggacagcatatttgagtaatagcattttattttctagggctcttttggatgttttgaattttctataacaaagaacagaaagttgtgaaaaagaaaaggtagtgtgcatttaagcctaataaatgacaaacagacttaggggagagaaaactgtatctgggaaatggtaggaaaatattagaataaatagaatttaagcagagtctttaaaatttggtaagatttgtctgtaaagacaaaggagggcaaaaggaataagcgatcagggagaaagtagtagtgaagattccaatgatcacagtgtgtgggatgtttctacgaaaatttgttgtttgggaattctacttggctatttctagtagcaaactagaatacaaggagctactgctggaaggtagttaaccttttttcccttttgttgagaaatatgaatattggatctgctattaaaaaataatggggaatggcatataactattcataccaaaaaataaaagtggcatcataccctaagactaacttcttcagggctatattttctcaaggataaaagttactttatagtggttgctacttcctatttcaatcagatctgtggtaaaatatctctgaagcagatagagatagattcagtgtaaaaaatatacaattggaatataaataaaaatagacacaccccagtatagcccacgtgttctccgttctcagcagattagcttaaaaacacagctataattgtgatcagaactagaaacaagcctgattagttttaaatgacaccaactaaccacttcagtcaacccttgtgaggcgcatgattttacctagttggttggatgggcgtgaggccaggcatttggtagctgcttagtatggttttaactgccttgtttctgaactaccaccatggtgattccaaggcgagtccaacagaagttgagcctgtgggagtggttcacagcatatgccacagtgcttttccagatgtccaggggaatccggagaggtctctgtctacattcacttctcctctggagacaaaaccagtgtgcaaaaggagggaggaaagcaagcagaaagcctacttaattactctctgtatgcctccaaactccctgtctttggatcctcatctgtagagtgaggagtacagagttggctactttgcaagaatagagtgctgttttgcaagttacagcttttcaagtcccaaaaaaagaaaaacaaacaaacaaacaaacaaacaaacaaaaaatgcctagaagtaagaggaagcaagcctgtatggagtggaggcagactcaggttttctcctcctgaaatcagaggaatgtaggggatgtggcctcaccaccaatagtagctagaggatgtgctatacttcattgtgttagtcattaggtttaaagttctgagaatacattatttttgttgagtttcagtttctctcccatgattgtgtgtctgataactactccttttcaaggttttcagaaaaaagaagaaaaaaaaaacaccatttgctttgtccctgtggctataagtcctttttacttgtaatttttatttatttttatttattttttaaattttatttttatagagatggggttttactctgtcacccaggctgaagtgcagtggtgcaatgacagcccactgcagcctcaaactcctgggttcaagggatcgtccctcctctgcctcccaagtagctgagactacaggtgtgcaccaccatgcctggctaatttttaaattttttttttgtagaaatgcggtctcaccatcttgcccagggtggtttcaaactcctgggctcaagtgattctcctgcttcagcctctcagagagctcggattacaagggggagctccactatgcttttagtggaaggatttctcttcctcccccattggcctaccacttttcttttctctcatttccattttgttctctcacttaaattccagccacaccattctgatttgtgtggtatgtatgtcagtgtggcttgacatgccctttaataattctctcaggctgtattttctctgacagtatttctaatatactattaatcagctctattgtttctgatgagcatactgagtataatagtccagaaaaaaatctatgaactctaattctgattgtaatgttgtgatttggattctaggagtaagttggttccgagtaagtagaggaccacatagactgtataattttcaatctattttaggtcacaagaccctgctaggttcttcctatggtaaacaagccatcttacaaaatacggtatggaggagttagatgatgtttcagagctcatgttcgtctgcaatatgcacttccagcagtttcttagaagacatgccatcttcaggagctcagcagggctctccttatgtaagtcaaggctgagatgtttcaaattatatgtcaggcaaatgctatgctcttcacacaagagatgaactgttgcttctctatgtgttttacattaaaaaaaaaaaagaaaaaaaaagaaaatgcctaaggtagcacttaggaataatcggttgcaatctattaccactggcaacattataattttagctattgaatagctcaggaaaaccaccacagaatctaattgatatctttgggaaaggtttgattacttggctgttgaggagtgtagtagtctgcctgttacagagttgcatgttgaaagggcatctgtcagcgtgggtgaggagttccagaaacgtgttctctgctgtcatccccacaggacctgaggacctaaaggcctgactcatgccactgatggctgcaacatttatgggacaggctgcatgtcttttattgggagacaattactggggtagtgctgaggcatgactgagcctctgggcacagtagctgtcatccctactgccgaggtttgtgaattaatgatcagatggattcagcgggttgcacaacattaactttacattgtcagcacccctgtgagtgtccaacagtctcccctttacatcctttctttcattctcagtctgaatttagaagaataaacactttttagataacctgcttccttagttttaagctactgaaagagcctgagtagggatattaagagggagttcttgcttgcgctctggtaggctttggtgatgacatattcagaatggattattccttgcccccagcttcctcatgattgacacagtaagagaccctgttacttccctgaccatagtgtctcgttacttagtgttggcggaatgtcttccatgtcacttcagtgaacatttatatataaccatttctttaccgcatggttctaacacaactaacaacactgtcagcttttcctcggcatgtgcgtatgtatgtatgtctgtgtgtgtgtttgaaataattagcaaataagatatcatgcttatctacagtaacacaacaagaagtagaatatgttttttataattttatttattttaggttttaaatttttatttttaatttttatgggtacatagtaggtgtatgtatttatggagtacatgagatatttccatacaggcatgcaatgtgtaataagcacatcatgaagaatgcggtatccatctcctcaagcatttatctttggtgttagaaacaatccagttatactttcagttattttaaaatgtacaattgagttattgactataatcacccagttttgctatcaaacagtaggtcttattcatcttcctatgttttttgtgcccattaaccttcccccaacccctccaccaaccacccaccacccttcccagcctctggtaatcatcctttcactctctgtcttatttatttatttgttttaaagatggagtcttgctccatcacccatgctggagtgcagtgatgcaatcatagctcactgtaacctccaactcctaggctcaagtaatcctcctgctccagctttccaaagcactgggaccacagatgtgagccattgcacctggcctaggaatatggtttaatattctgggctgaaattaatttaaggagactgcacatgtggagactgagtatgtgatagaaggagcagagtgaaggggtagcaggcggcttggcaaccagggcttccttggaagccagcatgctctgttttatctttaatattcttgtgacaatttaaaccatattataaggtattttcaaactttctcctcttcccagtgaagattatttttggaggaaaagatagtttctccccagtttttacctaatatgtcaattaaactggagatatttatattagctccaaagagaggacattagtaacagttagaacctatattattctgaagtattccatctaatttagaatcttggcaatcagctaagccattttttattctcttttcctacttacaggtataatattgattcttaacacctactaattgtgagaccttccaaaatgcttgtatcccttcctctgtgttgcctttagaatgaaaacaacttacccagctaaaagagataaataattaatcgcttattcccagtacaagaaaatgacacatatggctgagtagcagggtgcattaggtaaagagctgtcaaagggtaccctttattccaaaatgttaaagaatgctattttcccctacacttagaatcagagtaccagtaagtattgataggagtaaaacccatcacagtgctaaataaaaggaagtctagagaggcatagaatagagccaattttttatttaaaaaaaaaaaactaaaatcgatggaactactgttctcataaacagaaacataattaattgcattcctatttagattctgttccctgatttaagttaatgttagtaacctttgaggccacccaaattggtctggaatccacttggctactacaaagcctgagcatgaatctagcacagtcccatgatacagatcttcgggaactcctgagttaatcccaaggggctgagttaaaattcataagtataccagtttctatagactggataaatattattttacacgtacatgtactaatttttaaatgtagacaggtacttttacaattgataaaatacagactcatatcattttattcttaaacatgtatagctttgttttcttttgtcattgtgcattgtgtcaatcaacagtttctaaacatatagcaagtgtgggtttccaaaatatttttgccatttgaagagatcctcatattccagaagattaggacccaccacaatgtagaagatctggaccttgccagcaggaaggtagtgcaagctaccctgacacacggagtgagattttccctggaggaagcatcctccttcagtgatggccgatggattttacaggaaatgctggaggccatggtggcccccactgcaaaaaaatccaccacttttgcctcctatagaagcagctctgagctacttctacttctgtgcaaaagagactaagtaaatacagattatgtggcaggaattttagagctctggaaaggccctattgtcatttgaaattcttctcactcactgaaattcactttagctcatggatttgatcccttttaagacagatgccctagggagaggttagcactttgcttttgtatcattgtttatttctttgtgtcaatagttggttttagaacgttgggcatttgaagtgtatgaatactatctgctaaaagggttaaaaagagattctaaaacctgtgaaggttcatttgctccacattttgtccacacattctgttcttccataagttgagccatcgtagtgaatagcattgcctttcaacattttgaaagaaagattcatttatacataaaaatagagtctatgacagacatacagtgttcatcattgtatgttatacattcaacaatatgctttaaagaacagaatttttttgaaatctagaagaatttcactttatagagtcagagcatttttgtgtaagagagatgtgctggaggaatcctctactgttatatcttttgttccaccaataactttatctcagaaattgatttcctctgtgatggagaaaaatagcttacatttttagtggaagaggtgtatattttgttggcattctatctctatttcttttttcattcccagtaagttttaaagagggtaaactgcagcagtgtccatgagaatcatcactgggattctacgtaggctccaccatggtgagaacagtgtgtcaatcaagatgttcttagcatttggagcaaggcagttattaattgtttaggattaaattgcacacttcagaatgtttggcaccctggtcaccatattccaggagtaacttgtggtcattgtgacaccaaataacacccccacccattttcttacactacagagaagagtaccaccctggttgaaatatcacagtgcagtctcttcccaaagacagaaatgtacttccggacatgctggtcagaggccatctacagagctgagctagctttcttgtggtgattacaaaatggccaccatataattcctgtcccaaaagccttgggactttattcaaggactacttttaattactctatttgtgtgcctgctggatactggggtgttatgtttgttctgtgatgagaattcaccaatgccaaggcagaagcatgagaatgctgcttaattttacacagatggggttaatctttgtagcgctttgtgtacagaactggcttttccctgctgttgggggcataagagatgaagccctaagaaatgaatcacttttcttttcctttattcaaacttcccaatcttttcagctatacttgggctttcaaagtgctactgataagctggcaattttgttttagaggcttgatagggagtgggagattaaatactgcaaactgtgagcagtaacactgtcccttaggcaaataaatgagaacacttccaaagagatgtaaaattggttttccagacttaagttccacaacccgtttaatagagcttgtgaaaatatactctaattgctctgtggcacattttacatcgcaaagattctacttcaaaccctttatgactcccttgttctacaggtatatgtttatgttatgacagatacctctaattagctaaacaagaaaaaccaaccaaataattccccacatggaaattaaggcttttggaccaagatcttaatgccagccctctgttttgttcctaagtctccctacaggcccatgtatgttcataaatacacataagcagtgattgtctgaaacctggttcatggagacgtcagagttccagagtctgtgaattcacagtgggaatgggagattggagcttctattgcacaggcccagcacagtctgtcagcagattgtaaagggggcatccgggcctttgagccttctctgagacacccacagaaggttgtagcttggagcagcacaatgaatcagtaacagagaactcaggtgttaggaggcattattgccagctgcctagagttttctgttactgagatctatgggagcagtgagaagcagtggacacttctattcttgttcagccacagaggattagagcaaaataacctccctttgtcagtgaacattgcttggttattcctatctgtgagtcctttcagagctcacatctctaactctccttgttcatctctttctaggggataataattccatgtcaaatgcttgagtcctacaagtcaactcctcaattcctagaccagtctatgaccagcagtagtaggaatgactccagcaaggattctgaaggaagagattttttgtctgaattcaggcactgtggattctgccatttaggccacctatgaatgcttcacatagggctggataagctgggttcagaaaggccaaatgtgcaccttatataggaaaagaaaacagaaatggataattagggtttctatttgtgttgctaatatcttcagggactgaaaaatctccaaggccccctccaggactaaagttgtgctattctaaattacatccagtcactgttcctgtaagcagtcatttcatattttcccattttttcctcacttctaggcactaattccctgatctcacataatgtcaaataacaggtttgtggatatggaagtgcaaccacattaactgaatttggtcctggaattgccaatctgctcacattgcattgttttagttcagtaggcagagcttcacatcagctaactttgaaatgactttgattttcagggctcaaaaataaacaaaaagaggcaacagggcagctgtctgaggtgcaacagttcacagtagagggagaggaagttagaaaagttccctgagaaggaagtgtcggcaagtgttatgactgaggtattgagggagaaagtctccaccaatgtatccaggtttatttctttctccaattcaacttcagatttgagtacagtctttcctctctctccctgtctctctgtctctgggatatctatgtatctatggagatacagatttgatttatatacatatcaatctataaaatatacatattgtcctgagtgttttgataataatctctgtagataatttatatagtttatgaatatatatataaacttttgttagtagaaaattcccacatcaataggtatatttatctacacatataggccttttttttttccttcttaagaatgccaagggttatgttttcttccttttctttttgagcatgaaagggtcaccctggatacctgccctttctcttcaaacaccatagaagttgaacactgaatcagctgtctctgcagtgctaatgttgacttcacttccttttgacctactggcatttcctaaatgtgtcatcattttctaatttcctgtgttcttgttcgcaggtttaatttttaatgtggggctctctatgatctatctgactcctgcatttcttttgaatcccagaccccacttcttttctcctgcctctgagccttaagttctaacctacagtttttccgttctctttttgcattttctttctcttttgtttctcctgtctagagtaaccactcctctgaatttaacaggcccccttccattaagctgcaagatacagcccaaggatctcctctggcagataagtctgtcttacctcccagagaggcaatgtcatccttttttgtgctaatgtggtctgttgtatatttgctgattataacacttctctggctacatcataatatgttttcaagcttgcctccctttccagacttaccatcctgaggacaatatactttattcagtagtgtccccatatgtatcccccacttgggttatgtgtggcacagagtagctgtgttttgaagcaaagtgactagagaagagaccagcacctcacactgattcctatgtcagcattgaaggatacattattttacctttatgggagacctcattaatggctgttactctcagtcgatatgacaagaatacctaaagtttacatcaggcattttgagctattctgtgggtttataaggaagattttatatacatgctacaaaatcaatatagcttcttgttttcctattgccataactcaccttacatcggatttcagatttagtaagtatggccttgatctttagtttcagtggtaggatctaagaagaaaatcctgatttgatgtgaacctaatattttcctaaatatcttattttcagaatttcctcctattaaactaagtgcttaaaaactatagtaatatcttaatttccaataatcagtgagacaagttcaaactaacccacccaaacaaactgtaaattccattgtggcagaaaggtaggctgttcttggggacacaggtctggaactccatgttttctgattccttgatcatggttccagtaatatatgttgactctatgatctagaatgtaccgtcaggtgtagaaggaaaatatgagaagtgctgcagtgtggtagataccctgtttaagtaatgctgtcccccttcagcttgacagaaagagaaaaggaaaaaaatgctgagaaaacaaaaaaaaaaatcgtgaataacaggggcattagttgaattattttatgtgccacacaatgtaataagtgtcatacaggtattaatgaaattgattttttacagaaagctaagaaataggtggtactgtgtatgattcccatttcattcatagaaaggctgaggcttagaaatattaagtaactaatagtccagtgcaagacagccagcaatggcaccaagccactgaatgcaaggccctttctcttgaccaccatgttaagccgcttctcaggattggagaatacccaaaaggcatcttagggattttaagagttaattacaccctgagcacacctagagacagcaagaggtcaatggacgttcctctcacacctggagtaagagaggatttgattttgccgggagctagaagagaaactatgtgaactcaccttctgggagcctggcttggtcctcaggcaacttcaagcttcagagctcggagggcatccagagcatggcctgcacaggatcagggtggactaatgggcaggaaatggccaagccttctcccttagacctgactatctaaaaatgccatgtcaattgtattctcaacaagggtccaggctgccaccccaaagactcaccactcaataaaatatgctgtatatatacatgccgaagtaaatcaatataccaacctttgatatgctttctcctgcattcacctaaaaattctagcaaatgattacatgttcatttccttactggatttgaaacttgcctttttgttcctctagttatgtatgcttttgaattgcaactgctcagcatcttttaaagtttgtaaagcaccatgaaaaatcattgaaatgaaaagcactaaaatatgtaaattgttgctattgttcttaagtgcttcttaacataggatatgatcatttctaagacaaagtatgatttctttcatgtccacagtgattatgtttacagcatgggatcagtcttcaatatatgagcagtattacttttgtaaagttaaagaaaagttgctttaaacttttgaaatttatattgcattttcattaacctttttttctcatgcctttatttttattctctatttttgaagaaaatgatcagtttgcagaaattgcaaaggcatgctgtagtaaaattgtcagtaaataactatgaattaggcactgcattataaactctgattttaaaaagcagtttaattttcttttagtgtgaaatataacaaatattgatttgggagggattgcactctgctatgtagtatatgagcaaagagtttcaaagttagttttttaatagagacagattagaaactagcacatggaggcacatcttcagtttgcaggaaatttatttttcagaagtctgtgtcatgcttaagacaattaagtcttctccctcctaccccacccctatctcctgctatacctgtgaaaaataatttgttaagctttgctttttagttttaaaatttttaaatagagacagggtcatcttgctctggtgcccaggctgcagtgcagtggtgcaatcatagctccctgcaacctagagctcctagactcaagtgatcctcctacctcagctaggactacaggcatgcaccaccacaccgggctaattttttaaaattattgtttgtagagacagggtattgctatgttgcacaggctgctattttttatttttaatgaaaaattattaattagatatatttatggggtacagtgtaattttcaatatatgtatgtactgtagaataatcaaataagcataattaacacattagtcatctgaaatactatcatttttttgtgatgagaacatttaaaatccactcttttagctttttggaaatatacattattattaaccatagttgccatctgtccaatagaacaccagaagtcattcctcccatctaactaaaacttcgtacattttcaccagtgtctttcctttctccattgactctccttttccccttcctcccgtcagcctctggtaatcactgttctactctcaatctctgaaagtttgattttttacaccccacacataagtgagattctgtgatatttgtctttctgtccctggcttatttcacttaatgtaaggttcatccatgttgtcacaaatgacagaatttcctttaaaaacagaatgctattatcatggtggccaaacaataagaaaattaatattcttcctctttgtctttagaaattagaaacagtctaatgcagttctgaaatcctacagcctccaaaaccaggaaatttcgttgatagtgtatttcctgatgtctgctattggaagcataatgatcattctctcaggaatccctcggtcagagttgcaactgattatatgaatcaataaatgcttcttgacctgtggtcagtgtaaaagcaaggttctagggatataaggttgtctgcccagaatggagctgtaagcatggatacagaagatcctggaacaacaggcaggtgaaggagaaagaagctactgagagttacaaagcatgcagtagagtgggatttatggactggcagggaactttaaaataaaaggttatgcttgacttggctgtcacctttaaggaaagaaaattaggtttttcaaaaaatattatgcaaattaaaaaatgacctaaccagcctttatggataaatctatactattgttctaagtcaggttctgatgtgctggtatacagataaaatacagatcaatttactcgttgaatgattggcgaccatactaattgggattcataactgtcacccaccatttatgctatttgagagcaattctgcacgtaggtaattatagtagattgcccctgtgccaagaagacattgcataaatccttcagctgagatacgactgacaagctgtgagtaatagagtgcaccttggaaaagatttatatttgaggcccagttagctggagtgctttatacttttcatttctcaataacttgactggaactaagacagtcagttatttcccaaattctccgttttcatgataggataatcaataaagagcaactattaattcagtgtcgctctgatatactagactagacagttttactatgttattgattacttctgtaatttaccactgggggtagacactctgaaggtcattagacataggttgcttcttagtgatgcaagttcacttgtggtaagcagaggttttgttgccatgatcagctggactctttgattccctatgatgcatggagcaaagaatagcacaatttcatcaatcatacatcacattgcatagcctacaatcaaagggcaaggtggtgaggtggctctttctgtgcagatggagttctcagaatgaagccccagaagggctacttgcccctatcctctcatatcataggactttgggtagcccccagctgtttccctgcacctactctctcggagaggttttccattaccatcaggcatcattcaaggagttctcaagaaataaagtaatctatgtgatacaagtttcaaatatagtcctcaaagacatcctggacaactgttctttccaaactcccatgatttatcataggatatttcagccaagacatcttctgatttctaaaaagaaatatctgtcagcagaatttgtgcactttgtaaattatctgctttcccccaataacatgttgctgtgttagcattaacttgctgaccctacgctttctccccaagatttgagatgttggaataattagcaaacccttcatctttattttttttttttatctaggccatgcttcaccctgcaagactctctcctttatcccattccataaatatctaccacacatattctatgtggctttccttgcatagaatgtcaggaaacactgtctatacccttgttttaataagttgttgtcctttcaaacctttgcacttatatcacagatcggatctactgattccttttgaattcctcaataggtacctccctgccaatcacctaagcacctaaagcccaactatcccactttcttagagatactcctcttaatttagatacctagtcctaagcttctaagcctctaatatatagtagaccttttgctatatgttagaccctttgctatgtattttgtaagattggaggggtctgatttgttgaggagaggggaataaacaaatcagactcctccaatcctacaaaatgctacctttcattatatgcaacaatagcatttttaggaagtgatgtgtttgtaatattttgttatatttgaccttgccatttttaacatgcctttataaaaataatttcttatgtggattggtttttcaaatggaccttgataactccaaacattttattttaaactttagtatagtgtttggttcatatctactaggaataaattaattagtgccacagatggaccaccaaaatttgagactttttgggatattttttgtaccttttttttaaagaatatgaaagttatttatgagaaaaaaataaagatgtaaacacacacacacacacacacacacacaccacacacactcacaaaggccacctataaccatattaatgacatatctatgttaacaaaaccattgtgtgaggttagaggcagaaggggtgcatggtcaaagccacagttaaaagagcaacagaaggagaaaatatagtcctggaagactagaattaagtcattcagaaaaaactaatacaatgtttttatttatttatttattttttagacagagtcttgctctcttgcccaggctggagtgtagtggcgtgatctcagctcactacaagctccgcctcctgggttcaagtgattctgctgcctcagcctcccgagtagctgggactacaggcgcgtgccaccacgtccagctaattttttgtatttttagtagagacagggtttcaccacgttaaccaggatggtctcaatctcctgacctcgcgatccaccctcctcagcctcccaaagtgctgggattacaggcgtgagccaccgggcatgcccacaagattttttaaacaattcataagcatatgtttttataggtccatttagatatacctagattctctatgtaattgaaataaacacatttttatagaccatagaccattatctttttatgaaaaaagataaattgtctggaaagacaactttccagataagctgtctggaaagacaactttccagataagctgtctggaaagacaacttatttggtttaagtattagaaatctttgtacttataaatatatgcaaccagatgttacagttgataaagatgcatgaaaaatggccaaacataatatttaaggattttactaaggaaggtttaagggatataaatttcatttctcttccattaatatatactatttatattataaacttttttaaaaaaaatgagatgagtttaacttacattttcacttctgtgccttctagaaaatagaatcatatggagaagtcaaaactttgtcacagaattaatgtatgccccaggttacctgcattattcatagtaaggttaatctttgggataattattgtcccacttaacaaacattcacagtggtaaattacatagcaccctaaagctacagaaatacaggacaattaatgaaatgcaaaggtatctgatctgattctagtgctgacctcttaaaagtaaaatcattgctattattcctgttaagagaattttcacttcatggaatgggcctgtgcctccaagaataacatggagctgttctcaagttgtttcactttttttgaaagttaaccttttgatatcatggataaaagttaacatttgtaaaactcaagctgttagcccaaatgcaaccttgcctcctatgttagtacattacgtcaatgacaaatgagccataagtttcaactttacagtagtagtagataccttgacctttgagacctcactcaagtcataccatgggtgttctgatattttggtggtgtttgcagtcatgtgcaaagaaaaggctatgttttaagttgtataggtcttaatcagtacagatttctgttcctattcaaatataaactttataaaaattttcagaagttattcagcaaaagaattaagaattcaaatgatgccgtttttaatgaaattataaaattgaaggagatctgcagatgtctcctgaatccttggaaatacgaccaagtcatagtgcagtcattaatggattttgcatgggtaagtttcaagtctgaaacttttcctttgttaagaagtccagttaatcaattgcattaaattaaaagatgaatgagctctagagatctgctgaatagcattgtgcccatcgttaacaatactatattgtgcatttaaaattttgttaggagggtagataatatgttaagtgttcttactataattttataaaaggtaaataaataaatgaaaataatatactgccaatggaatttgaaataaaaatttaaaaagagtattgatagattttatattatgtccaaggaaaactattttaagtggacttaaatttgggaaaggaaaggaagaatgatacaaagacatactgtaagtatttttatcattatttatcattaaatatattaagatattctccataagcattattaccaaaaaaattctctttttgggcatcttgttgaaacagtcccgtaaaatagtatttcatgtgactggcttcattctcatgaaactaaaccacatatatttaactatctccttaagcttagcttaaaaccaaatatatataattgttactggtggccaaagaaatcagttcattttgggtcactcattttagctgagtggacattcctaatggattaaaaaacaaaacacagtgctttaaaatgcacttaatttttttttttcccccgcggtggtggtgactctgggcttcttctgcagtgctttaagctaagctccccagaactagtgttgatattgtttctttaacattaatcttcagtgacataattatttctttttaaataatcagtatgctaagcattataggactgggaagctactgactgaaaagagatgtgccgtaatgaaggtactcctttttttagataatttcggctgcttatcagaacagaagcagctgtattttggacttacttagagttgctatttaatgcaccatgaaaaagcaacaagtgctccaccagaaaaatcatgttttgttgaaagaagtaaagcaaaatgagtttcagctctataccacggaaactcacaaaagtaggggaaagatcaacttgagagtatatttttcggtgttcgaagtcagttaaaaaagcaaatttgtactttgaacttagtgtctattgcctcagagtaaaaatatttttagaatccttatcagtcagaaaattctcttcttcaaacaaaatgaactggaatgtagagctaaaataaccccattttagtttgtggaatggctgttgagcctttatttttacaagcaaatggcaaacgcttgctccaatgtatagctgatgcaaattaagcacatactctgtttcataaatgaagggggaattattggaaacactcttgcactgatcagtaaaaaccgattaccatcaaagaagggcctgattactaaccaccatcttagtgtttagctgtaccgtctggccggctcagaggggaaaatttgctgagcttaaaaaatgtttattctgactttcaactcatgcatgtatagaacacagatgaggaaacatctgatgtcctttggattcttgttgttaaacaaacgttaactcatcttcaagcaaaaatttagtcgtttttcttttttccccctcactgatttggtttcttaagctattgagttacaagcactatggaaataagcactaaaaaaaaacctaagggtgattagagcccttaaaaatatctgaaggataatgctgacctcatgttttttcacatacactttgatctaggtggaattttattattgtaatttaactcatgtggcgtggaggccacattcaaggcacagacctgagtgcttactggagacagatgaactcaggacttgcctgtgcctggctgcagcacttttgctctaactcatgccttgtctatggatggcactgcttttcccaccgtttagtgttggttaattattgccaacctgtagagcaaatgactctgcttaacagtcattttccctgaaaacccttccttgattattcaagattaagtccttagtgtcacaagtttacccattccatagcacgtacagttgtcatcatgatttcttattcgattaccaatcttacctccccaagcctgtaaacataattcagtgactgcatttttattcaccactgtattccaggtcctaaaactaaccctgacacataccggccactcggtaaatatgggttgaatgaatgaatgaacaaatggacagagaaatgaatgagacaccttctctgtcctcatttcagtttaaatttaggaacaaggcatgagtaaaagtgtgaggagacaaagcagaggaaggcaagtgctgaaagttatgatcgcgtgcagtgatggccattaagatgatcttcgtacaggaattcatacaggaatttttttaaagataaatgctggcttatgcaggctctgaagacttattttttatatccattcttaattaaactaatgttgaaaatagtacacatttatggtaaaaagccttcagtcctctttgggggtcatttatttgcttgctctctgggaagcttctttcataaaaggatgcccttttactagatcccaactgggagctttatgggattatttttttcctacttaacaaaagtgggatttaaactctaatttccaaaaacatagtggctagctaaaattggtattgatttaatgttctgggtcaattttaagtgataaattaacattagcaaaaaaagaagtttctaaattctgtaaatcacatgggatttttcatcggctcattcccttacaatctttttctcagggataaggttttctaagtcaatattttcccaaatgcatgcccttttgtcttccattaaatatggtagtctttgtttcttcaatggccatgtgagaacagaaggaaaatttcttctcagagaagacagagcaaagtaatattcttgccaaaagttatcacagtttaatagcaagaaggaatgtacacgtctctaaacaaaatgtgcaatgctttctgatgctgacaccatttatttagtcttattaaatagctggtaaaatgatccaagtttcagagaaacacaagctgtgagtggctgctgcacgtgacaaaaaaaaaaaaaaagacagccccaaaaagcagcagggagaagatgtgcgcagagtctgggaggatcacctttctccacagctttcccttccaaacctccaaacccaggcactgctttcctcttgcactcctcttctcctgatatccattcattcaccttatttctacactcttaccccttccatatttttaattaacttttctctttgtgcttgcacacttgctttgctttgctttcaatctatagttattttatgggtggcttggcacctcaaccagatgggaattaagtggaaggcagaagttggcttgcacacacaacctctaaataaatgcaggcctgggaaggatgattcatgctttacctgtattctttcagctgcagtcagtgtttttccaatcttggtaggcaccagcatcacctggaaaattgttaaagcaaaacatgctttgacttgactccagacatactggggcttaaatctctgtatttatttgccaagtagttcaaaatttagtagttgggggaatgggatcaccaaccattatggtttgccaaggaacgaaggatttcctgagctgtgtgctaaagcctgaatacttctgagtaaattgagacatttagttaccctatttagggttgaagatgagggccaaaatagtgcatgcatctgtctgctttccatctttccatcctaattattctaaaaaaccatacaacccccacttttatgggtataaaatagttatgttacttatctatttttatttttgcatattttttagttattgcgtggtttattacatataatgagagcaacaatctcataacattggttttagaattaaatgagataaaatatgtaaagcacttaatgtaatgcctgatactaagtgttcaatgaatgttacatattatttctctttaggtccaaaggtatttattttcttcttggcttcctggaatactaatctttggtaaaggaagtttctcactggtctcctaagccggcagtggtctgaggcatgccaccatttctttgagctgtgatgtgttatatcatcttcttccaagacaggccctcttagctagtgtgctaactggactttctctctctgactcaaaggggctgtgcctcagaagctttgtggaggtagaaaggcttatccacacttcccatgataggagagggattctacccaccttctttctggattcttctatggactgtaatgatttcttcctcagtagtgtctattcccagacccagcaactgctttttgaaatttgcttgcagacatcaaccctgcaactctctatctagttctcagcacttcaacttaaggctaatattagaccaagacccacttcctctagaaataaatccttttctcccccatactttcttggtcaaataaggttacagacttatttggcacttacttaagtagttttttttttcatccttaggatggttctcaatttgttgactgatgaaatcataaaacgtaacgtaaccctctaggtagcagaggatgtgctttgtaacatcatccagcactccttgttgcattatcctacagtctcagtaatctgcattgtctcacagatcaagccatttgctcattcagtctgttctgtgccaaacatattgataacacatacactgaaggactgctggcattgcccctccccagaataagcaaacaagtcatctttaaaagcaagttgtttcagccactttgatagaaattaagttgcatacaaggtcacaaagtacatcagtgaactaactggaaacacaacccaacaaggcccactcccaagcctgagcactttactggatcacgcttccttcctcggtgaaaggcttcccacggcaggaagaaccggagagcaagcctctaaattatacatgactgtttgtctcattttcactccgtggctaattgaagacacaggggagtgctgcttttttggcttcatctctcatcgcatctcatttgtctcacacgtgtcggggagtgcactctgcaggttagctttatgaagggttgaatggaatttggtgagctttgaggagtcccaggattacaagttctttgtcttggttcacaacaagctgtgcagtccccttttgtttgtttcctcatttgccattttaaaataaagtaaatacctaatgctagatgacgagttagtgggtgcagtgcaccagcatggcacatgtatacatatgtaactaacctgcacaatgtgcacatgtaccctaaaacttaaagtataataataataaaaaaagtcaagcataggagatccacagttgataggaaaggaatgtgaatcactaaagagaaaccatcataatatttaaatgaccaaataaggaacatgaaaatgtttcttctcctataaattttaagcctgtggggaatcaaacttagattagttttaataacaaaagttcagagttcattgtaccttgttctgcctgctgaagattagcactgtggtgggagtgtatatccaggttgccaaaaccacagttctgcttggttcagtgactcacaaattataatttttgaagcgtttggaagaagaatttccatatcatatctgacaatatgcttttggcccatagcccttaatgcattaccttttatgtagtataggctcagtgcacttttgagaattaagcaacaaaaatagtaataaaatgtcactgatgataaagaaaagtaatggcatcaactaatattagataactgtaggatgatttattgcttctgtatgcattttttgttcatatctatgaagatatcggcattggttaggtttacagatgtctgtgagaaaacacatcaccctctgtcaggaagggtcattgactattaaattgaacaatagacctaagtgtgctcacttgggtttgcaacagctaaagccctgttgtctcctgcttggtcactcctaccttgtattaaatatggatttcatgcattacatggagttttcaaggatagaaagaaggatttcagtgggacaatctaactttggacatcttgtgatgagcagagaggcatcattgagaggaagagttttaaaaacaggtgtacttcagaaatattaaaaggcgatatatacacaaggaagagaaacaagaaaaaaagaagtttggttaggaaagtcctataattttttacgtggaaagaaatcaaaggcaaagcaaatggaaggatgctgtcctgatagaagctggggtgtggaggaagagtaatgaaattcagaatgttggtcctgcacagggtcttgccagacacatccttatcctcggtcctcagatgaagagccctgtctcctggagcctgagggccaagtgcccagatgcactatcattctaaggaattgttctggtcagaatctggagttttcaactcccttctgtggtccatttttattatggatgctgctttgaaggatggataaagtgctaggaaaagttgttatcatctaaaaaaccagaattctttctactcaaaggtcttgttctctaccatgttcccggtgggacattttctctgtagttttttccaatatatagtaggttatgacaggacactgcttatcctcacaaggaaggcacttctgttaagaattcagcaaaaagaaaaaagaaaaactaggagagaataagaaatggagattgtttaaagaaaaagcaaaatgccactctagttagtaatactgccacttaatgacagaattagtaaaagtcatgaataaagcctgcatgatggattcactttttcaggaactctctttaataatacaatgttatattctgagtaacaactttacgtataaattaaataagttaacatgaaggcatatatgtcataatcttagagatggttcatcaataagcatctcagagaccccattgagacatatcctattctgggctctggaaattgatgatgaaaaagacagggaatgtctattcagcttcagtatgcagctgattttttttttgatgtagcttacgtaccccaaaatctttccaagtagatttaaaatggtccattcctcatccttctgcctcactcagtcttatggtatgtgactgtaggggttcctgtgtagttttaagttgcttctctgcaaaattccttagctaatcagtacttgagcccatggttttctcacctacgtttcacgggttcagtctatgccctttgatttggcaactccttttcaaaatattatctgtgattttcatagccatcaaaccgttaccactcctgcctcacccactagggtctctgctgtttagactttaataacaagcattgagtcttacaagagattgccattggctatactggcatcagattcatcaaaaaggaatgggatgaaagtacaacttgccagcagagcaacttaaaatcttcttttaagggagagattttatagcagtacgtagtgcccaatagacatcattttgccatgcagcagacagttcaggtgtaagaagacatgttgagatcagacagtcagaagaactgctttggcttagatgcctcatgcctccaatggaaccaatacttctgacagatccgtgggcatagctgccattgtatatgacatggggcatgccagttagaaaagtcaccacattcagggacactcaaaactatgaagactgttccagatatgtatagaccaatttgccagccaggtgtcgtttttcctgtaggcactattcctaagtaacgcaggtggccaggagagtagaactggaacattcaatggaggttaggtcttcaagaagagggaatcattcactggagctcaagtcttcaagaagagtgtagtctttgcctacaatcctggattaatgaacacttccattctgtttcacttctccttagagctatttttaagaacactggaatattagggaccatatcacaaagtatcttatatttttaacttgatcaggagataagttatgctaatattatgcactttacttccagctctccttcgtgtattatttttaccaaaatcctagacactaatgacacacttaatgacagaattagtaaaagtcgtgtataaaggctgcatgatggattaactttctcaggaactctctttaataataccatgttatattctgagtaacatcttgatgtatgaattaaataagttaacacaaaggcatatgtgtcataatcttatttggagctggttcatcggtaagcatttcagagaccccagtgagacatatcctgttctgggctctggaaattgatgatgaaaaagacagggaaagtatcttctgtaaggggcctgtacttgattgggggagaccatcaattggtttaaaaagctagtaatctaatttcagatacagtcaagtattgaagcagacagggcatgaggagtggggcttcaggaaagtcttcttttaccagagagctcagccaaggcccctgggaggagatgccatctcagtggagaaacaaagggtgagaaaaggacatccatgcaaagccagagcattccaagagaaaaaggagcaaacacagatgcccagagatcttaaagtgctgcatatataatagaacagtgataacaacacgttctgtacttattgctaatgtttattctgcttactgcatgctaggcactgtgtgctaagtagttaatcctcattatctcattttgtttttctttttattgcttcaagagacagagtcttgctatgttgcccaggctgaacttgaactcctaggctcaagtgatcctcctgcctcagcctcccgagtagctgggaccataggcgcacactgcctcctggcattctcattcattttccaaactatgtaaaagactttacagatgaggaaactgaggccaaaagaagttcaattacaggcttagagtcatctaggttttaggtttcgtatctgagatttgagcccaggctcaaagcctagagtctaaagcattcccctcaagctaaacctggagttttctagaagaaaattgtcattgccaccttcaggcctggtgagcttctgaaaactaagtgaagctacaaaagagatgaggctgagagtgatcgtggagaaataataagcacgtatatttggtcaagcaaatattactttgcagtctgttagctacagttaaatatttaacacctttgaaagctcagggttgatgacattttcaaattgtcaatttctgtttacattcgggcagtctgcagcattactgtgttcaaaaacagttggactagtcttactttgccttaattgaaaggttcattcttaacacccaaagcagaagttggcgaatgtcgtctaaacaaaccaatttcaacagagttttaaagttacttagagatatagtgctgtcagaaaataattctctgaaaagtcacaaaattctgcagcatgactcattatttgcagaccgtttttgtaagaaaatgattggctttttaaaaatgtagtgctgtagccagcaacaataaaccccctttggaaaacacatgattcggtttcatttacttttaaagccttttttttccgtctttttttctttgtttctttctttttttggggggtgggggggtggtgtacatttttactaagcactagcctggagagaaacacccaagtatcctgttcactgaaaactacataaaaatagtacaatctaggtaatctctcaatgttgtactttacaaatatagggagtagaatttcattatgttaatagtgttattataatatagcagtagtaatgatagcttacatgtattcaacccttactatgtgctggcgcagttctaaacactttaacaacagctctgaaatagacactaagaacatcctcatcttacagatgaaactgctgagactgaaagtacttaaataacttccgccaaacagatggggacaaattgccaagtggcagagctgggatttgaacccacactctctttttccacctcactaaattatctccagaagagtgtccatagcatcttcttttgaaacccagtatcatactgggataatgaactgatatgatccggatccatcaatacgtttctcttaactatcttttcaaggtatgttcagaaaaaaaaagaaagaaagaaggaaagaaagaaagaatatattttcttttaaagccagcacaaatgtatgcttctgcccttggcttcactagaagaagtttggaaacctccatatactaggcaattactaaatcaattattatgcttgggtctgtatcaactttgtaaatgacataaaacatttcatcaggacataccttgtccctgttaaaccatcagatccatcccattccctgctgactggtttgcaggcttacagaaacatcagatggctgtggcaatgagtaggatttggaccatccttccaccaaataatgacaaactatacggaacagttgtgctaatgttatgattaagcacccttgcccatcgaccaacccctgtcagatttccttatccatagagatatctctaataataaaggatggaacttaaatccacatctggttgagttcaaatccagcaaattccaaaaaggacatacttcccattcctcaatcttctgacctcagtcctgttatgtaattgagtgtggcttcctggttgctaaccatgctgtcataattgcctagccataggtaaaaggatctcacacagcggttgaaacaggcgatcaagcaagttttaatttaatttcccaagccccgtctcctgttttcttacgttctccacttttctgtgttcttatctcttctattccttcacttccttgtttttcctaactcttgtgcttactagcaacattaactaaacccagctaagcctttccatttgcccagataactctcctaaacagagcaaatcacatctacccttttgctcaggcattccagtgtgctctgacactactacttttttgttgccaatgaggtttttattgtttgcttaacaaaattatttcattaagtgaatggctttagagattcatttggttttattttattactggcttggggaaaagatagcttttgttaggagaatatgccaaaaagtagaatcggtacctatgtagacattattgttatgatttatttccctgtatagtaataacattattttataggtttacgtgaatacatttaattgctgtcctgagaattccaaagctaatgtgtacaagggttattgctaatgcctggtgcatgctgaatcagtaaattccagtcatttgtgtatttgtacctacatatatctatacattatgtctacatctgtatctgtgtctatttgtatatgtatttctgagaccagctaagagttccctttcattaaatttctgttgccatattaaaagctactttctactaaaatatattaagggaaaagcaagttatcaagtccaccggaccttcatttataacaccagaagaacactcagtgtaagagagatcttgaaagaggagtcaaaggtgagctttttcaatgctggtaattaatccttgctttgcataggctaattgagggcaattattgaatacttgatgtcatttcatttcctagctgtcaatgggattacagcctgctttccctgctaaatctgttaacctctgtgctttcttttgctggtagagggatgttcaagatagaggggcaccaagagctttgttcttttttgtgaatgtcaatatttttcttcaaaagaatgttgttctcctttgacagattttttttctcttcctaatatctctgttaaggcacaaaaaaagaagcagcaactttctgttactgttggtaccaaaacgaagagagtgaattataagagagatttcctgggtggtctgccttactttatagactaactggtgctcaaatacatgcaaatacactcactaacttgttcagcaaatagttactgagtagctattaagtcatagcattgtgctaagtactggggagaggtgagaaaggagacattaattctgcctttaagcagctcagagactacttttgaggttgaggtgacatcaatgcacttgcttagatacggcctttggcaaaactggtaatattttaggtacccactttcaccattcttgcacctgttgttacaccaagcttctataccaggacaaattatttatttcaccatccttaatccatttagctaactctccaccctatctcacctctcagccctacccagataaatcccattccaagcaaatggcttatttggcagtagttgagcccatacagccaagtctttcccatgggaaaatatgtgggaatgtgtgccttaagtttctgggttggctggatacatttgccttgatggccaatgaggttatggccatgttttgcttccatccaataactcagagaactgtagccaatccaagtagaacaaatcatttttcttctaaaagatcattgagataaacatttctggattatttatttgtttgtttagttttgcttaaatacttgccaatctagattttgctgtatgtttataactatccttttatattttaaaaacattttatattaatctgccaaatataattttctgtcacacactgcttttctttccagtttattatttatatcactttctatgcctattcgtgtgtgtttctcgagagaaaggactgagactaatatctttacaagcctctcagaacttagtattgcggctaccagtggaggagctgaatacactggactgaattcactgggctttaatcaatgttaattactattttttgtataagaaaaataatttacatccaaaatagccttctaacatacttgatgacaatctaaatgaagtttgttccttcaactcattctggtgtctttgttaaaaattatggattacttatttataattccatattgagactacagacaacttggaaaaatgataaaagcctcaaagtatctatggaccattagagtatacagtgaagttatagtaatcctgcaactagttgctgggtggcgtgcccctccatttcactgttatccatcacaaaatcatgtgatccgggttctgtgattcaatttcaaagagatagtttgattatctcctgaaaacctaaatggcttatgttagcgtcgtatgtgctatatgctatatctgccccagttatcactgtctctttttcatatgggccagttctttgttcttttgttctttgttagaggccacctttgtccccaatttttttcagaggcaccacgcatgtaccttagagcttaatgtagggaaatgacaccccaggtcatctggtgaatggggagactcttccactctataaagaaagaccattctggatattccctcatttgtgtgcatataaaccccctgggactggaagatgctactcttttccactggtggagtttgtggtgaagagttgaggacattctttttttccttatggatccaaggaatgtgagttatcttacaaatagagaaccagacccaatacacatagagatgaatacctagatcaggagaagtgaggcaagaataaggccaaagtagtccaataatttttaattatacatgaaagtcattaagaagtaatgaggatgaaaacaaatatggattcaagacccgacaatttaaaaaaagcatttttttccgcaaactgtgaagaaaacacaccagtcaacctataattaaatatgtgtattagattcatttattgaaaaccaaaaaaaatttaaaagcaaaaaaaaacacattgttttccttaagagaatattgccataggctacacatatagtcaattatgtcccaccatattagatgctatttgctattgtaaacaattagcttagccatcattgtggatttattttttccaatctttacatcttcaaatgactcctggcttagtcagtttgttaaaaatggcatataaaacaacccctaaagctttctctaaactggtacacagcattcttcattattaaacagctggcactctaactatatgaaatttcattaaattaaccttaatgactttatggttcacgatcacaaaaatacacacacacacacacacacacacacacacacacacaaaataaaattttaagatgtaacttctatgcttatctaaggttactcctattaaaggtttgacaatgttaatgtttaaaacaagtcatagaatgattcaacaataatctgcattttatttttaactttgaacatctattttggtcattgcctttatgtttcttcatatttatgcttcctgtgatagtaaaaacttattcctataaaatgactgattttatttttaatttctttgagcttgtctttattgactgaaaatttatttttttgattacctacattgtgtaaagtactgttataggcatagaataaaatgtttaagcccctatttccaagggtcttacagactaaaagaaatatataattggccgggtgcggtggctcatgcctgtaatcccagcactttgggaggctgaggcgggtggatcacaaggtccagagatcgagaccatcctgaccaacatggtgaaaccccgcctctactaaaaatacaaaaattagctgggcattgtagcaagtgcctgtagtcccaactactcgagaggctgaggcaagagaatcacttgaacctgggaggcggaggttgcagtaagccgagatcgcgccactgcactccagcctggcaacagagtgagactccatctccgaaaaaaaaaaaaaagaaaaaagaaatacataattatactttgtctactctttactaacaaaagtctttttcgcaagcgccattttgatcctgtgaagactccaggaattatttctattttgtaaatgaaaagccaaggttcagaaacaagcaagatgcccaagttaagggatcgttacaggcagaaccaaaatatggattttgtacacatccaggatccttttcccagtatttctgtccctagagttggggtcctaaaaattccctgtcagaagcatttcaaattgttactatatgaaatatagagaagaggagcctttcaaaggccattagtgaaatcagaaatgattttatgggagagttccacagattaagataatgtgatcctctgaaaatgtctgagactgtctgagccatgatattagatgtagcacacaaaagtcagggctaatagataaagaaaatattttatatgtacttttctaactatgtatataggtaaaatacctattagggtcagcatcttttgaaaaattatatatgtataattttaattgacaaaaattatatgtttatgttgtacaatatgatgtttgatatatgtatacattggaggtggctaaatgaattttattagcatatgtattatcatatatttatttttgttggtaagaacatttaaaatctactttttttagctattttcaagtatacagtatattgttcttaattacagtcatcatgagatacaacagatctcttgaacttactctaactgaaattttctaccctttgatcaacatattcccaatccccacaccctctagcctctgataaccaccactgcactctctgcttgtgggttcagcatttttagattccatgtatgtgtgagatcacgtgatttttatcattctgtgcttggcctattttacttaacgtaatgtcttctaggttcatccatgttgacccataaatgacagcattttcttgtttttcaaggctgaataccatttcattttctatatatatcacattttccttatccattcatcgttactagacacttaagttgattccatatcttgcctgttgcaaatagtgctgaagtgaacatgggttgtgcgtacatctcttgtacttgcttatttcattttctttggatatttatccaatagtgggattgctgcatcatatagtagttcgatttttgagtttttgaaaaacctctattctgttttccataatggctgtattagtttacattcccacccaacatgtataagaattcctttttctccacatttttaccaacatttgttttcttttgatttgataacagtcatcgtaacaagtatgaagcgatatctcatggatttgatttgcatttacctgatgattagtgatgttgagcacttttacatatacctgttgaccatttgtatgtcttcttttaagaaatatttgtttaggtccttagttccattttaaaaatcaaattatatatatacatatatatatttgcagttgaattattatggcactaggattctgggtaatatttatttattattttctttaagttctgggtacatgaacagaatgtgcaggtttgttacataagtaaaggtatgccatggtggtttgctgcacctatcaatccatcacctaggtattaagccctgcatgcattagctatgctgcccttccccaacaggccccagtgtgtgtcgttcccactgtgtgtccatgtgttctcattgttaagctccctcttataagtgagaacatacagtgtttagttttctcttcctctgttagtttgctgaggttaatggcttccggcttcatccatgtctgcaaaggacatgatcttgttcctttttatggctgcatagtattccatggtgtatacacacatttttatttttatccaatctatcattgatgggcatttgggctgattccatgtctttgctattgtgcatagtgctgtaaggaagatatgtgtgcatctatcgttataatagaatgatttatattcctttgggtatatacccagtaatgagattgctgggtcagatggtatttctggttctagatcattgaggaatcaccacactgtccacactgtcttctacagtgattgaactaaatttaccctcccaccaacagtgtaaaagcgttcctgtttctctgcaacctcaccagcatctgttgtttcttgactttttaataatcgccattctgactggggtgagattattgtatctcactgtggttttgagatctatctatctgtctatctatctatctatctatctatctaaataagagagaaagtatacagagtaatataataaatttccatggagccaccacccatcactgttattctctgaagagtcacatgaaatattccaacctatactggaacccccatcttctcctaccatcatatcctatcatgcagcctacactgcagtctacgtacttctctcccaacctactgaacatatttatgcttctgtgctttactgattctgttccctctcctagaataatcttgctgtttatgtgaaagtcattcattcttcaaaattttttcaaatgcccatgtagaattgccttcacctctttgttcctatagaatttagttaataccaaaaaataaaaggtagagattataacgtcatgtaatatgtagttataaaatgttataaatgtttcagggtccttcattttactacacagtcctacagaagaaggagcatatctattcttcactgcagtgtccctatgcctaaggtactgctatgtacataaagcagtacctatacagtgaatatttaatgaaatcaagaagagataatcagaggcagggtgggggtatggattgaacttgattgacagataaaataataagctttattcatgaccaagacagacaggttgtctggggtttgagaactattagaaatagtatcttcctggagtccagctcacagagcaaggagacatgaatatttccctgtagttactggatcagaacaacctgcacagatttactggcaattgttttcttccttctatccaaacaattctacagtactagggcccctgagcaaacagagatgtagggaaatttctgtttatgtaatgtactccagctgagtaggtattttccaaaccccttcctcaaaaacatggattttacacccatggctctgctcacactaactccccactaaagcacctagccttcagcttatttctcagatgcagaagtacatttctaaggccgaggtttattggagtttcctgttatctattttagaatcccatcgctgaaacctcttgtctacttccaactgttgggtgtctttaaaagaagtggcctgtaattttatgtatgcttgaagagaaattctcaaagttgcttaaaatccatgtttgaacttccttgtaaattgaaattatagtccaatcaatgattatttttcccatgaaatgaatggctgattgtgatatggtgcctcaacacatgtacaaataaccacagctgagacacagattgtgtctaaatgctatggggtttcagaagaggcagtgcttcttggaggatgttaagtttaatttgaactttgtataatagataaattgaatttaaatggaagtagcaacacacctggaaaaacttcaaaagaagttgacaggaataaaaaggaatatatatttaagaaaaggaagtaatctcattccccaaggaaaagattttagaggcattaactaagtcccttaactaacaaggtggcattcatttcaagaagaaaaagggcacatttcactgggaagccagtgattaaactgctaaaattacgattctaggtgacaaatctggcagcatcagaaaactagaaaaaagggaattatttcaaaggtttttgattatccagacatgagagataagggcctatattaaagcagaaggaaagaaatatactatagagaatatgataaatgaggtagaaaagaagagtatagtctttcaaaaacttctgtaagttttgaaaatggatcacattggctctcaaaattggttatgtgtaattatcatctgggaaatttttgaaaagacctatagccatggtaatgtttctgaaggcctagggtggggcttatggttgatattttaagtaaatggctcaattgtttctgacacagatggtacgtagatcacgatttgagaagcatcaatttcgtagatagctggagaaggaaagaaaagcaaggtactggggaactatcaaacagctgttctgtgcagtttgctatggccattgttttctggttttaaactttattcactagacatttgttaatttaatattttagaaaacataagtcaggcaccatgattcatgcttgtaatcccagcactttggaaggctgaggtgggaggatcatctgagcccaggagttcaagaacagcctgggcaacatagcaagaccccatctctacaaaaaaattaaaaaattagccaggcagagtggggtttgcctgtgatcccagctacttgggaggctgaagtgaaaggattgcttgagcccaggaggtcaaggctgcagtaagtcatgattgtgcctctgcactccagggtgggcaacaggccctgtctcaaaaaagaaagagaagggactcatcaatatattttgaaaaggaatggtaatgagagtaaaacttgtctgttaacatacattaaaatgatagaagaattttaggaaagtctagagttctcaggtgacttaaggcctccttggtcagtgtggacgccaaacactcagatgttattttcaaaaccataagattagataaaagaagacagagaggaagactagaaaagagctaaagacaaaacagcaacaaccttcccaaccatggagacagcaggagaagtgtaatgaagcgaaaacactgtccactggaacttccagacagtttgcatcaggatattcccaggaagcaaagttagaggagtttcactactccctgtagcttgttttatttgtttcttgtacaaaacctctaggcttttggtagtcatgatatttcttactattatgactatcgttttattaaaatgctacattaagtataaaaataacatattgttcatataagtgtcttctctgagtggtcatgattacaatattctcttccactttgtgctaatgaaatgacctaagctattaggacatacacagctactatacatggccagccagtcagctgtaaaatttccagttgaaaaaaaaaaaaccatttttgtgaaccattaaaatgcaataaattgtttgacgactgaaaacttgtttcagtccaacataaaagttaataaaattatttaaatacacacagttgaaaaacagttttaaaatattttgcatcctgtgactaagcacctagagtatatttgaacaaaaaattatatatatatgcagaagaagaagaggttaataaagactatcagtgaaaccagaactcagcttagtaagtggcacaaaactagtctttgcatttagaaaaatgtgatattattttcaacccgctgagcctattatgtctgcatctcctcagatttttacatggccttgagcaatttgggctggagccagctataacagtattatttcagcaaatcacttcctattgttgtacattttaaggatgtactgaaaggtactttcaagtctgaaaacatcaactgatcacacagcaatgatatctcatttacaaggcctttatgtagccacaaactgttttctttaacagttccactatctcggaaatagttataaacatgaactactctattgccacatttttaaaaaagctgtgccatttacctaaaccatgaacaatgtcatgtgctttaaattctccctaaaataaacaaatactactttccgtatgacaggggttggcaaatttctctgtacagagcagagggtaaatattttctgctttgtgggaccatagggtctctgttatgactattcagctctgccattaaagcatgaaagcagccacagacaatgtgcacaggaatgtgtgaacctctgttccaataaaaccttatttataaaaacgggcaatgggccagatttggccttcagtccatagtttgctatcccctgttctataggattctttttctaccatgtcagtaatgtgaatatgcttgtgatctaacacactgaattatttttatgtttatttttattgatacgtattagatgtatatatgttcaggtacatgtgataatttgacatcttcattaataaaattagggtcattgggatatccatcaccttaaatatttatcttttcctttttgctaggaacagttgatttattctcttctagctacttttaaatatacactacattaatgttagctattatcacccttctgatctatcaaacaccagatcttatttcttctaaatgtatatttgtacctgttaaacaacctcttttatcccctcactatcttttagcatgttgaattatgtcccatactcttaattttgaaaccaggacagtcacttgtcccaactcaagttatgaacagtgcctaattttgagacattcattgcagaagtgaaatggatatgtagagctgccagagattaggaaatcactgagaaattttttaagatgtaggttatagattgatagattactcattctagtaagtaacaatggagtgtagtatatcacaactatctaagtttgtttatactgctataatagaacaccataaactaggtaatttacaaatatcacaaatatttaatcacagttctagagggtgggaagtccaagatcaaggagccggtaggtacgattgtctggtgaaggctgctctctgcttccaatatggtgcgttgatactgcatcttctggagggtaagaatgctatgtccttacacagcagaaggctcaagggcaggagagtccagtgctgtatgaagcctcttttataggggcctttatcttattcacaagaaaggagacctcatggcctaatcacctcttaaatgtcctgcctcttaatatttcacattggcaatacctgaattctggaggggacacattcaaaccacagcataccacaagtggcatttggaaagaaaaggttttctgaaatgccctattctgttcattgttcactctttacacacacacacacacacacacacaccttgtctgcttgacaaaatctcttttatccttcagattgctttttgtgtaaacctcccactcagacgaagtgaaatacctcccaagtgcattgatttctgtttgcagttacaacgccacattgtacttatttgattacatgtcagtgactaagacagagaggctgagggcatggtaagcaggtaggcagggccagagatccagaagggttttgtgtactgtgttagacaggctatattaagccaagagcagtggaaaccattgcagagaatcaagcataaaaaatatgcatcagatcaatgttttagaaaaacagcaagacaactgcatggagaatgaattatagggggattaagtaaaaaagggaaaattggtaggatattatttagtgatccagagaaagatgatggtggtttgaaccaggagagtagcaggcaagatagagagaagtattgagattcaggttttattttggaggttgcacccatagcatttctagtggattggatgtgagagaaggaaaagaaaaaaatcaaggatagcatcaaggtgtttgctttaaactgggatgataatgttaccatatgcaggggatgacactcatgtctgaaagagaaaataagagctctgcttcgtctcttttatttgaaatgactaattgctgaggatatcaagtagccagttggctctaagaatacaggttagaaaatgagtcagagcagaagatattagtgttctacactgtctggggttgtcaataatccgtgaggatttcctatgtatatacctgatcctacaccatcactgttaaggtagtaaaagaataatgatgtggctcctactctccaggaaggtcaagtgtacctatcattacagtagaggacttaaatatgtgagtgtacctatcattacagtaaaggacttaaatatgtgagtgaactctctctctctctctctctctctctctatatatatatatatatatatatatagtcagttaatatagggacttagttaataatatatatataaatactatatatatataatactacatatatatatatatatatatatatatatatatatatatatatatatagtattcggttaaatgttgatgtaggcagaaatgattagaggtgttcagagaaggctacatggaagccatgggcttcaaatgaagtggatggcacagaggacaatgagtttgattggcctcagtagaagcaagggcatcacaactctgctagttcaggggcagtcaggagagaagtaaaatcaagaacaagtgagagtttgggttgtgattttaggcataaggagaaacatatactcctttctttttatattcttatttgtttgcccacagcatcaaataaaaacaggtaaaactctttgaatatgcattttaaggaatttaaaaaataaaacattaaaagtacttgaatatgtaaatctgctttataaaatcggtcaattgaaaatgtggcaacatgtatgatgccatcttcaaatgtcagtagtaagaaccataacagaatgtcagttaatgaaggtggcgttaccatattgagtctatcactgggcatttgaacaaactcttagagatgacagttaatagtacacaaattatgcccagttagaagtcaaagcttggggctcttctaaggcctttcaaataaaacaataggtgagtgccattcaattcataatcttgaattgaggagttgtttcccaatgggaaatctacatttcattattatacaatagggcataaaattcttggttaatttttgtaaatgtggacactacagattcctgtatatttattttacagttacatgtatatttaaatagaaagacataactagtccaatttccaattccagtgaacagaaagcctagaaggaaactcttaggtttgaggatatcagatttattattggtaacatgaggaaaagctcttgcattcagaaccaattctctcttttgagttaggaataaaacacatacacactcctttactttaatagatgataccatacctccagttatctccctttaattcaattttgttaaataaaatttaccataggcctaatgtatcctcaagatactattctgggaaaaaaagaaaatatgaagacaagtaagacacagtcctaaaattcaaggagtggccaacctagtggaagagacagcatattcacatgttataattcatattcacatgagttatactgcagcttcttaggtacagaggatggagaagtggagaatgagaatgtctgcttagaggaaagcattagagctcggccttaaaagaggaaaggttttcacatggacagcgaagggcagaaaattaattccaggcacagggaacagcaaattggagaaaagaataaaatactttaactgaatcatgctatttcagaggactttatggaaatgcttagtttttgaaaagaggaaccatggaggagcctcaaccgttccccctaccccacctacccgcactccctgcatttctattccaaatgaaatgtaaaatgttggttctgtacatagtgattcattcatcgatgaatgtgtagcgatacctattgtgtgtgctctacagtgtcattggtacttctgatgtatgttccaggtacattaattcatccattcattcactcaaaaataccattgggttgctactgtatgccaggaagtttgcaagaccagggctgtagaaatagtccctgtcttgtaaaaaactgcagtgcaagaaataaccatttttttctttactttttaaaacttttgttcaaatcaggactatttaaagatgtaattttttcctactcaagtatattaattgaaatagtatgtaggccattttagctattaatgtttaaagtgaaaggcagttattatacatttatttccaaagaaattcaaaaggaaacaaggtttatcaccaatctttatatctaaaaatatgactagatagtattatatgtgagcttcacaaagagtagtcccaactatgcacaggcctcgttgtttttctttttctttttctttttttttcatggcacattaattaaaatgttaaaacatcttgagttatcttactttcctgtttgttttgttaaaaaataatataaaagccactgctgacacactgacagtctgttgacagctttagcttccagagtgtttggaagactattcctggggcattacgtttgaaaagagttcaaagtgattgtaaacttgtttagattgtgatattgaaaacaacactgggtgaaattgtgcttctaactgtctcaaatgaatctgttagcatcgctgtctcttcccaggggtacttagaaattaattttcgatctatagtcttattccctaaggatttacacagggaacgaagcaaaattgtgaatttttgaagattttttttctaaagaatgacctattaagtttaaagtagtaccaatgtgatgtatcaaatacagtctttttaaaaaataattcctttcattcttagccattagaaaaattaacaggaaatggaaatgctattgaacctgcttcctctttctagcagtgaggagcagagggcagaaagccccaccttgccttcatgcaggtgatattctcacctctcagcgtgtgtttgtgcctctatccttagttttctctaatttctaactctaaggtagtagagctcttaaatggttttcctgctttctctgcagctgaatggtcaggtctatagggtttttttcttttttgagatggagttttgctctgtcgcccaggcgggagtgcagtggcgtgatctcaggtcactgcagcctccgcctcccaggctcaagccattctcctgcctcagcctctggggtagctgggaatacaggtgtgtgccaacatgtccagctcatttttgtatttttcgtagagatggtttttcaccactttggccaggctggtcttgaactcctggcctcaagtgatccacacacctcagcctcccaaagtgctgggattacaggcatgagccacagcacccagcccaggtctataggattttaattgcttcccacatgctaagggagaatcaggtcgcataatgaggctttgtaggggaaaacgtggttttcacacttactttcaagggaagggagtactcaagctatgctgatgtgggaacctgcatcctaaggacctgataaccaagactaaactaaaatcagtaaaatccatgggtgtatggatcagtagaggtgagcttctcaggacaggctgaactattggggaatgaaaggacatatgccccacataagaaaaacaaccccatcatacagtcagagtttgagttgcttcttgctagccatgcgaccctgacaattcagtttctgaactttctgacccccatacctctcatccataaaacgaggagtagtactactgatttggcaagactgttgcaagaataatgccggcgaaatttgatttgaaatgaggacctattaaaatgcaaggcattctagtctatgatagacattttctaggtcacgttctgaacatcttgagatatctgttgtacatcatgtcttgtcccattgtggggagtatgggattgaatccttcagcctttctcaactgtgaaactaagtcattcatttaatgttatgaatgaattctagaatggtactagttaagtacattttggggagaattgagaaaatagtcactgaaatccggttttccactctctgcttcagttgagaaatcctgctgagaaagactgtgagatactaaactattcatgctctctgagtgaaaaagcttaagaaaacctaaaaaacaaacaaacaaacaaacagatttaaataaattttaaagccccttgccttgaaatatatttcagaatatcacttttgacttttttttggtgaattccatgctaagattatgaattaacttttgcattctctttccttgtgcactacattgtgctgagggctagtgcacaaagagaaacacaaatattaatatcttatgttaatgtaaatgtgaatatcttataataattatgagcatagaacccaaaactttttgtaattcctaataactacttttatgatggtgatgaagatgacggagaagtctgaaatactagtagttatcaaataaaaagatattaatatctaagctatagaattatttcatattgcaagatgattttcttagtaaactgagcaaataaactcactcctgtctttgtgatatgaatccacagttttatttttactctgctaggaaattttcaacatttgtcgtttattctcagtttaagtcagtatggtgtgaaatactgggtaatataaaaacaaatgtctttatctgtctattaatgtttttgtctctattaaacattttccatggatcatgcccgtgtttgtgctttgctttgacatagggattataatttcagtactgcaaatgaaaatcttgaaaagtcaggaggcaagagggatttagcccaagactatcaaaagctcttggcatttgttctctctcacctcctttccacattcatttccaacttcagatttatgatggattttatgatagtacatggttcaaagagaaatagcattttttttaaatgcccagggataaaccaaataaaacatttatgacaaattttcagaaaaaccacagactggaagatgttactatatagtggttctctaagcatcacctgggaacttggtagaaatgcaaattctcaggtcccaccacagatacactgaatctgaaactctgggagtggggcccagcaatctggtttcacacaccctgtgggtgattctgaccaagtttgagaatcacacttcctgaacagtgcctcactctctcacttaaatgactcagtttttctagtttaatacacaagcatcagcgctataaacaccacatttaaaagaaaatctggaaaagacaggaagagtttccacttcattctgggggggaaaaagaaagagttgttttagggccatcactttgagagaggagggaatgtacgtgagaccttgtatgcatttccaactgggattatgactggttgtgtgacccgtcaggggggatactaatatgttcacagctgcctattagagtcacttatagtagaaagctcacaatactcaaggatcaaaacagggcagataaaatctgttgtttaaagcaccaaatatggctgtagattcactcagtaaatgtgaataataggaagtttattttcaattttaagttctttaaaaattttacttaaaaatagattcaagttttcatgctcttcaagcgtgctttataaactatatcactcttttccatcagccccctgagattgggtagcatagcaaatggtagccactctatggcaaatgctctcagcatatagactgtgaaaaattctgttgtggaaatgattctagttgaaccaaactgttacaggaaaggaatcccaatccagaccccaagagaggatttttggatctcatgcatgaaagaattcagggtgagtccacagtgcaaagtgaaagcaagtttattacatctaccctaggtataatagttgtatatatgtagggtaaaaaaagatcgtggggagatgtgctgtgctacaagagtttgtgataaagaattaattttcttactatattttgcaagaatcaatattattatctttaaagcaaaattaggaatgcctttgttttcaagacatctggatatcaagacaatcccaagtctaggtctgttcaacaaacattatcaatttgttccctcaactgctaggaatagcttttggagaatgcagcccagttccagagtccctcgttttcctagccctcactcaacacctctgacaaaactgcaccaaaatgtgtcatatatgtagaaactcatcttctacaagctatacaaagcaatcccttatctgttagaaagtaaggactaaacaaattaacaaaaggactaggatgattgaaaagatattggtgccttattatgaatgtttgccaagacacttataaataagatagagatgttaaaagaaaaaacaatgtaaattctattgcctaatgtgtacttccatttcaaatatctagttcacatattagtaggtatcattcatcttaattgggttcaagaaggctcttcactgctaatggcaaatcaatcaccatctctgaacactgcagtatgtactcatgacctgtagattgtgttggaattttaatacatggggaagtattttgaaaagttaggaatttgagttggaaaggcatccagaaaattgattttgatttttcttaagggttaaggctgggtgtggtggcacacgcctgtagtccaggtcacttgagaccaggagttcaagaccagcctgggcaacgtagggagaccccgtctccgagaaaagaaaaaaaaaaaaagccaaaagcagctgagtatggtggcgtgtgcctgtagtcccagctaattgggaggctgaggtgggaggatcactttcctctgggaggtcaaggttgcagtatgccatgattgcaccactgcactccagcctgggtgacacagtgagaccctgttgaaaaaaaaaggtaaaaaatcaagggactttgttaaaaagattgtaatctcatattagcagtctagtaattggattttttcatttaacagaggaaaaagaactgtattttaatgagagtatatttttaaaaagcaatttcttctttttgccatgctattttcattcgtagtattttagagagtggacttttttttagcatggaattatgtgtatgatattcctttgacctagcaatcacagtactaataggcttcacatctgtttacttttaaagaaatgtgagcattttgatagaaaacactattaatgaagttttttgaaaaaaatgacattctgaacatattaaatgacgttaaattaaaaaaatcaaaagatagtaagactgagaaggcttttccaatcctagagggattcagaagtaatttcaaaacaaagatggggaggaaagcttctccttcctccagcaaccttttctctccttacatgaagctatgactttaacctcttcttggctgcaaagtgaaatctatttttttaagggtgaaagaggtatgagtacttaggagaggaataaaacaacacgtattggattctatggtgccaagcttgatttgcctctggcttggccattccaagaagagcttaagctttttcatcttaactctgatgcacaatcttaatttaaactgtatgagatttgccctgatgcacaccagtttcatccgtttctggtatcaacaaaatcaaagcgtctaactttttcaaacacaaagggatgaattgtgaatacctgctgaatttccacaagtcaacaacctaacaaaaccacaaaaaaagacgaggtaacttttttcttaagtgaaaagtagcctaacactagaaaagagaacatttatttctgttaatctgggcattaataaaaggtgctgggccataattatagttccctttgtcatttaatagagaggtagaaaaatgcagatttttattccctttgcctagggcggaacctgagattctgcatttctaacaggctccgggtgattagatgtcactgaacgttgtcacattgtgtaccaagggtaaatatgtataatttcttatgaatgataggctcctttccaccatcttcacagaggttagacaaagctaaggcaagaaaccaactgagaacagatattttatctagtacagctttcatatacgcacaacgttcagaaaatgaaaatgaacatttctcagcctcaatctcctcttctataatttgagaggcttggaagcttcttccagacctaagattttatgattctactgggcactaaataaatcctctatgaatatatgaatgagcaagggaattagtgaattttgagttgccagtttaactataaggaagtggctcttttgttctcccattattacttacagaggagcttggggtatatgtgagtcatttcataaacttcagacagaggagaacgtgtgaaataatggcctaagagagaaagtaaatggggaagaaagaaatataataggccagacagaccacattttaagtgttaacttcaggtgagagaccatgaatttaaactgagatcagtccacaaggctgtgttttttatctgtagtcacagcagagtgactgtttcgaacatgtgaaatgttctgggtctctatttccagtgggttttaacaaaggttacaattttgttagtttgcacaagagttggttttaacaagggtaataggccctggaattgggtcaggtaaggaggagagtgaggttctgagggacggaagcacaggaaaggcagtagaataatgaattgtactttatgttggtttgtacttccctgaaggattgttgagatgggagttacaaggggcaagctagagtgtggaaggcttgaaaatggggttatggaaggtaacttagtaatggcaaggtctagggtgtgactacctaagtcacataatgtcacatctctgctccaggtattatggcgatgatgaaggtgtgaaaaagagaaactgaactgacaactttaaagttgtattttctaattgggactagatttaatactggcataggtcttctgtgaaccaagttacttgacttgttgaacatgtataaatgacatgaagtatttgatgggaagtttcagccaaacaggtgataagaagttgaattttaaaccctgtaaaattaggtcagtctaccatataaaaacaagatttaataagcggcagatgatattttgtccaattcagttagattttgcagtgccaaataattataggcagtgcaaatcatgcatttgctgtgctatgaagggttatgtgaattctccgctacagacatgctataccttccctgaaaaaagcacatatggctatcagtaagaaggtcattttgaatgtgcacctacaatagtgacaacaggctgggcgcgttagctcacacctgtaatcccagcactttgggaggctgaggcaggcagatcacctgaggtcagaagttcgagatcagcctggctaacatggtgaaaacccatctctactaaaaatacaaaaattagcagggcatggtggtgtgtgcctgtaatcccaggtactcaggaggctgagacaggagaatcgcttgaacccaggaggcggaggttgcaatgagccaagatcgcaccactgcactccagcctgggtgacagagcaagactctgtctcaaaaaaaaaaaaaaaaaaatggtgacaacaatttagttagcacatagatgtcttagcaaaattatattttatatacaaaagttaaaaagctacatagtaatatgtcttaagataatattttatcacttcatgaccaagtgttgaacacctaatctgctactaaaatctgttttttctcagtgacgagttcacattcaccgtgtaatcaagcaaaagtaactgcaaatgttactgtctctggtaatctagacattttatgaagtctccagttcttgaagtttagtaggtttatagtcaggtacactaggtaaaggcataaatgtcatagttgtgttaggtatttgaaaacattggcttcatgaactcccccctaatttaataccctttcaaatctgagtgatttatgatatgtatcagtggttaaatttaatacatgcactgttttttaatatctaactttttctagttataaaaggttacataactacataaaacaatccacatactaatttttatctctcattttaggctagatacttctgttctgaggtatatgaaattatcagtttgtcagacacttaatcctttatcatttattggcaaggaatgtaattgaattggtctaaactaaaagtgaagatattgacagattgtagaggggtggattatctggcatagtagaaggcacatcggatctggggttagacaactggagttcttaacttgctctatgactcctttgtctctggttccttttcagtaaaagatggtataaatgcctatgattaagtgtttatgagtattactgatactgtatggaaagcatgttacatgggactggctctgtaaaccaaagtctgaccttatcaaaagctcttcacagccataactgcactgggcactggggcaggtagtggggcagggatccctagattcagtaggctgtcttaaagaagttactatctagtggaaaaaattccactttcatgtactctagtacatatttacagaacatttgcatgtggtggacagtagcctgggttgtgggtactcagtgaacaagacagacatcatccttcaactcatggagcttacatttctgataccttcatttctcatccattaacacgatttacattgaccgtgattgctgctacatcacgtaatattggctttatctttcaagtgtgcatttattgtattttaagaatgaagatactagaaaggcctctcttactcaagagtacataacaactatgacaaaataacttgaagtgagatttttctgagattatatatttacatgagttatatattagtttttaaactgcatcttatgtgtcattgctaccatttgatacatttactgtggagcttaaaccataaagaccagagcttattcataatgggcaaagctgaatatagagtgaatgtgctcgtcagcttgaattaaaatttagagggtcctaactgaggctttttcaagggtggaattgaagatttttgaggaaacagcatctctgggacacaggaattactcagacttcactatgatctctatgtcgtctcaaacagcatcccaaagagaaagggaaactgtctttagagcagagattagtgtcaggacaaacctctatgttgtatgaagtcagtgacctagcgcaaacataaacaggtttccatgtcatgttatgcttgccagaaaagcatttaatgtgaactggaattgtgtgattttctatgagaatgtggcctataaaactgattatgtttttgcaagttattccatctgtaagcaatgtgcataaaatgttttgttaaaataaagaaaattgaattcaaaatgtgcactaaaaattatcctatcagtgtgaacatcaacctagaaaattagatgcactcatctcccatatttcatattctaacatttcccaatattatggaacatttctcctattcatgaatctgcctgccagtgctataagtttgtattatttttaaacttcttgagttatttgttgtatagggtaggataaaaatagtttggatggatggtatgcattggcattaaatctgcttcaagtcagagcctagaaactctgaatggcacagttatttttaaaatggccaacagatcgatagagactgtggccaaaattctgaaaaagtctaataaaaagcattgatacctgtttggtaaaaatatggtttgcctgaatagacacttgcaatgtttgcttttctggattgagtatcacagcaggcagatattgttgttctatattgtctccaggctatctctgtcagagggttgtgtcactgggaacaagttatcttttccagggtcttttcaggctgtatgtatttaaacataaagactagaactaaagataacaaagaagacaaaagaatatacaaacagctctttgcttctcaaaaggtgtagaatggtcatatctgctttctgacagtggtgatagggagtgggtttgattcttcctcagtgcttttcaatgttgagcatcttttcattttctctttggtgagacactgtcgaaatgtctgacccctgaagcaggataggatatgctttgtcctgctcactcgcccaaatcctccagggacatttcagtgcctggctctagtagttgacactgctccccattcctggtaaatgtgctggtaccatttcctcagaagagagagttttctacctatccaagccaaaaagagagaaaaattgaaatgttgactgaaaaaagaaggtggagatttctagtccattttattgtttcatgttggtttattgaagggtccaattgggaattcttacacattttgtaaatgtaggaataggagaaacctgaaaaagtggtaaaacataaatgaacttccagcttcatttccctgacttccttgtaagtaccttccatgcttaaccaattcatcttagaattcccaaaccttgaaattccatacattgctaccttcaataatcttcattcttcctgttaatgttctgaatcttcttcatgctgcaaatgaatgaatgaactaataaataagatgtttctcttttaattgtttcaataggtagtatactaaatttccccctttgagtaggtatttaagagattaagtttaaaagttcccagtagttttatttttactttaatttttactattaattatgacagttgttttttcactgtaagtagataatataaaagagaaatcaaagggacatacttttatcattatacagtttatgccttgtcttttatcttctgtcatcttgttccaaaatatggcaatttttttcctgtattccctttctctgtattttgttttgctttgttctgtaataactggagatacttggatatggatactcaactgttatttttgctatcactcagacacttccccttcccgaataaaatcctacatctaattgtcaaaataaagcacacacaaaaaaagtactttttttttttttaagagacagagtttcagtgtgtcacccagaagtacagtggcacaatcataacacactgcaacctcaaattcctgagctgaagccattcttccacctcagcctcccaagtagctaggattaaaggtgtataaccaccaatcctggctaaggtgtttgtttgtttttttgtagagacaggggtctcactacattgcccaagttggtcttgaactcctgggctcaagtgatcttcctgcctcagcctctccagaattacagttgtgagccaccatgctggggctgaaaataaccttttacagaagaaagaaaagtgatggcatgaaaaatggtatgtctcttggacagagttcagtaatatgacctatgaaaaataaatatatttgaagcagactagagaaacacctgagagagaaataattcctaggataatagaagaaagcttattgttctgattttttaatataagtttgtcaattaagagttttctctactccagactaaacttttatcatcactttttagtattcatgtatccacagtctgaaaacatgttatttttcattaactgtgaaacaaaggctccagagcttgactattgtgtgagggaaggaaattatattttgagtttagtattcttgcattcatgctgacattgtttaacccgtcctagagcagcttcttactttttcatttcctaatctgttttataatctttaagccacagcaaaattatgagtcctaagggggaaatggaatggaagaaaatatttttaaattatgtctttgataagggaattatatacaaataataaagaactcttctaatgccacaacaatgaaaagacaactctattgaaaaatgggcaaatgacttgaatagacatttcttgaaagaagatatagaaatagggaatatgaaatatgttatcttatccagtaaaaaatgtatatcaaaaccagtataagataccttttcctacccattatgattgtgataataaaaaaagacatgacaacaagtattggtgggaaagtggaaaaattaaagcccttatacattgctggtgggaatgcaaaatgatacagctcctacaaaaaatagtttggcagttcctcacaagctaaacctagaattaccatattccccagcaatttcacaactaagtatatacctaaaagaaataaaggcatacatctatccaaaaacttctatatgaatgcacatagcaacattattcttaatagccaaattgtagaaataaccagaatatcaattaactggtgagtggctaaatatatgtggagtaaccgtacagtggaatattatttagtcataaaaaagtgaaatactgatacatgctgcaatatggatgaacttcaaaatcattatgctaagggcaaagagctatgcatcaatgaccacacactatattcttccatttagtaagtagcttaatgattgtctgtggctggggtggggaatggtagagggttgggagaaaatcagaacggctgctaatgtgtatggaattactttctggagtgatgaaaatgctctaaaattgattgttgtgatggttgcacatcctagagcagttatgaataggtgaatatattaaaaacattgaattttataatttaaatggatgaattgtatggaagtatatgaattatatcttaataaaactgtttttaaaaaggcatagcataaattgattgatagatagatataggttaatttctgggtttctgatggaattgaataaaaaaaatggatgaggctttcatataatgttataccaattaagcctaaaattttaaatgctaagtttaataattctctttaaaagtgtgttttcactctttctagaaaaggcatacattttcaattttctgatagcttgatgatttgtaattgtttacatataagtaaggagtagggtccaccattacatatgtacatgacctaaaatttattttattgatttgcttcaagaatgtgttcattacagcttcatttcaagatccagacaagtttgcgtacttctcacctgtcggttccaaatctcaagccacctccagaacattttaattttactattttaattctataatcctaaactaaataaatctacatgccataacttagtgttcccacttagattatatttcatagtaagttcttttgtactccaaggtagttacctcctgagtccctacccatcaataacagagcctgcctcccaaactccagtagaggggttagatatacaaattctgtctactcttcgcctatcccaaatcaaccaccaggaaccatagattctctcttgacaactatcctagtttcctactatgctgcaggcaatatctgaactccagtccagtttgggcttctccatgtaatagctgcatgacgttggcacatcacttaaaactccctgagtctccgtgaactagagaacagaaagggtcatttcttctctccatcctagcagagctgttatgaagaccaaagaacatagcagcagtttatgggccaccattttgaaaaattaaatgagtttttaacaaaagttattacatgtgacattcaatcattttacctagtaagtactttaaaaatttattctttctttaacaaaaaattatagccacatagattaatagagaaattgaaccaggataacaaatataagaaagcggtaatgaggtttaagaataatttacaataaaacccatatgaatagcaagggcacagttctcaaatgtgtcactattatgtcattgagaaaggtagaaagattttctaactaatctctattaaatctatacttatagttatcaatataataacatattacacttatatagtacatatcctatgccaccctgtattctaagtgctttgcatacattacatacctgtcaccctctatcaccaagtcatctttcagttaagtaaattaatcatgatgggtggagaataatgagctaagagtttgaaagaatatataaaaataatgtttgggggaatcatatacattttaaaagattattatatttttaaaatgtagcccaacttttcagagaatgtttcatttttagactatcatatactacattttaataagaggttactacttgaactatgtaatgcatgggtagttatatggcgtgcattatatgtataacatagttcatacatagtttttagccactgctaattctaagctatgcctttctccattaaatatatttgtttgcgtattctaaaaagaaggagcagaattgttgatcatcccctccaatcttgtttagtacttccactgaaatgtggcttatctatcaattaggtttggcccagtatttcagctgctggtttcaacttaattccctcatttgttccccttttattcaagcaaagtgccatttaatttatggctccttttctttccctgtagcctaagcttcttagaaaataaatgaggctataagtcctcatttagcccttcttagtcctgtggattctggctgaggatttgagtctcgtcagtcattcaccacgctatgccttaggtcactgtgctctccttctttggctctttcaattttctctttgtagaaacctgtaaagatgtttttatagaaatttcagtattaaatcagctacacatattttgaataagaatgcttttctttgaacaccatggaatgcatgcttactggcaaccttgagatcacttggaaaataaccgggaatggaggagaggttcttaagccacaccttggttgtcattagtctactcaatttggagagtatgttcatgggcctctgttccattgtgcattggctggatgcatatgttgagcaatggggacaacgtataatttttttttcacttgccacaattttattcatttttattttttatttgagatggagttttactcttgtcacccaggctggagggcaatggcgcagtcgcggctcactgcaacctctgcctcctgagttcaaacaattctcccgcctcagtctcccaagtagctgggattaaaggtgtacataccaccatggccagctaatttttgtatttttagtagagatggggtttcaccatgttggccaggctggtctcgaactcctgacctcaggtgatctgccctccttggcttcccaaaattctgggattacaggtgtgagtcaccacatccggcccacttggcacagttctagattgaggtaaatattaatctaggttttgcttaaattcctgtggacagacagataaaatatacaatgttaggattcttagctaacaagggatactgccaaatgataaaatattaattctattactttgtatgcagatatgtgagaactagaagcaattaccctgactctaattgcttcatagatgaatacaattatgatgttatactcatcctgtctgtattctcagtataaaataacatcaacataagacagtcagaaatttcatttaaaagtaaaccttaccaatgtgaaatatattaaggcaataaaccaagagattaaactttcataaacagtaagagcttattgttttgtaaatgagtgtataataatatctttgcagctcaaatgaaaccataaaactgactgggggcctcacttttttcagcaaacttttgatttatctttttaatctgttcttagcattgtatagcaattaaacactggaaatgggctttacacttcttgccacattgctcttctcccgtttcacttctgtcatttcttttataatgacaagcaatttagaggaacaagaaacaattaaaatgtaagtagctcctgctgttacaggtgttctccactaatgaataaaaatgactgggattatagaaaggtgagatttaaggaaagatctcttttgggtgttagaaaatttaaagatttgtggacaaattcagaaggtaagcacagattcccaagacgtaattcctcaggggaatttgataaagtcaattagttgttgaaagtaccacatacagaggctggccaaatgaaattgtcagtagttttagtgggcatgggaagtgtgtgatgtgcctgaactggagttactgattcagacaaaatggcatgaaggcaagaacttacattccaacaagtttccggttggttctgacaccactgatccagggaacacactttgagagccactggtctaacagaggccaatgacttttgcattctttctgtccacttcctcttgaaaaacactcaatgcttgatagaaatacttcaaggctgtgacggcttgacactggtgtatggtagactcccgtagggtagtagtagactcacttgcgataaataaattcacagataatcaaatgtcttacaaaaggttatatacttgaacatactggaaactcaagaccctttcccttctaattcagtgctatgctgtcttcagtaatctgtatccatgacaaagaggtttctgggacatcggtcactcccctaaaggcaacagtttaaggaattataattttgttttaaattatgagtctgacttaatgaagagtagatgggtgacttagacaacattgtacttatgaaattaagtaggccacttacacttcactttcctgagtcaccctagtgtctgtataatacaaaggaggccaaataatttcttggttataaaacctcagttctaaatgttaacattttattcagcaaagactagattaatttagattaatgggatagttattactatacactatatagctctatgtgtaagttgtaaaaacaattttaaaaattagaacattttcatcctattctgaatattacacaaaatatatttcttgtaaagatgacacatgtaaagatcacacatgctcttgtaaagagccttatctaaagactccaagtgctaatttaacaggtatacacaaaggaaaagggaaaaaatatcatgtaaattgtaagaattagcctgatctttaagtacataataactcctctctctatatgagatgctttcagccaaggtcttctatcctcaacatttgtcttccaaataatctgttggataactaagtttcctttaatgtgagctgaaatatttcattcaatttttaaagttttagttcctgtcaaaaaatacaaatgccagccactgtgacagactttgaacttacatattgttaatatgaactgtatgtaattaaacacagaactcctatggaaagcaagtttattccagaaagtatgagtgaggatgagttcactctacagatagttactgagtacctactgtgtttcagacactctttatggtgagcttgagctaaatcagaacagaaccaaccatccaaagatcatgacccttattttaagcttcctgtttggggagcatgtgtagagataaccagtaaacagcaaggtagttgtagggagctgagaatagaagcaaggagatagctaggaaacctagacgtaaggcaggtgagagatgatggcggctccatcagagaagtgcctgtggacttagtgaagggtggttgaattctacacacattttgaaagtataggagaaagaataggagagagaatgaagacaaaagaaagtagaaatatattcattttaagagaacaacagattgtattgatttactttagatcctgcgactctgaaaaactatcagtcttgtaactacctggcaaatacgcctctcccttctttccactcctcagatctaaacacattgcattctctgccaagtcagatggctaccttccttgccctgcaaataaaggatagagttcccaggatcagtgaccatacgcatttccatttctaatactgtgaatcaggaagaagagaagtttacaaaatgtgattagtgggttaattttcttcatttcagttaagactttctttaaattcaatttgcataatgaaaggctcttgtttcagatcttaggattttaagggccatggtatgaattgtggatgtctggctctgactctagggtataatttaaaatacagtgacattgatatctgtaattcataagcaagacacccttcctccctaaatgaggtacctttggcagccacttcttgtcccccatcagtttctctagttgtttctcgctgaacctggaacatttgcacatatgtgcccactaccacttctccatttctgccctgctcgttggcctctattgccagttacaagccccgtgcaggaggcaactgacagctgccaccactgtccactcactcttgagaatgctgcttggctgcctggattctgtttgctggtgttcccagtactctatactttctaggtagtaactggagttgcattcccttggtcattactgcactggggtctactgcgtgtgtttagttggaacgtatagcttagaagcccacttttgtacctggccccagagaagtttcaagtaaataagaactgctcaactttaatttacattccttgctcttccttgacctcagatctcttccatggggaaggactcggcatagacactaaactggtctctgagttccttgcttttctcagacacccatccaaaaaactttgttcttaaagaaagctcccccaacccctccttccctacgcatattgtctcaggctggtggcccaccagtgttttaatcaggcacaatttaattctgaatctctgtttaggctcagctgacactcacaggacatgtctaattttgtcttaagaaagaaaaagaactttgttgtagaaacagcttcagacgatttggaaagcattcaagattcaatagctacattgagtccgtttcactatattctcatctggccacctttctatcacttttctaaatgaaatggagctgtccccattgttgtgttgtaggtcgtcttagatttctgcacaaacccaaatgagataatagaggttcaagcatgtgatgactggaaatagacttgaaatggtttcagtcctggctttaaagttgcttttgttcgaaggtgactattgtttgttttttaggaggcccattgaccatatggctgctttgaaattcagatgaaagggatgacattttcttgtgggagagctaaactagttgataaattgtcattgtgctacctttcaggctatggcccgtaattaaatgaatgacaaaaaaagggcattaaagaattctgatagatctgattcacctcttaaaagtaaagaaattcaaaattaatgcccaaagtctaaagccaagtgtgcaatattaagtattgtggaatattttgctcttggggaaaacattagctgatgcctggatctgcaaaatatcacagcaggatatgtaacaaaagccaggatttgctttaagtttttattcatcttatgtagatacatatgtatattttctttcttacttacatagttttgataagaaactgataaccagtttgcttaatgttgttttatcttcacatatctgaacctgactgcatggtcgtattcaaaccatttcagaagaaatgtttcctctttccatgagcagtgatttatgtatttgactttgaagtcaacaattgtgtagcacttaatgccacatcaaatgcaacatcaaattaccttgtattcatttaagtgaatttgcagatttatggtggatgggcacagattcaggaaactggggaaaggacagtcaccccagatgatggtacagaaggaaaatgaagtaaatatctggcaattaattacttaaaaggttaaggcctgttcttgaaaagagtcaggagcaatttattccacaatcaatttgcaagcacccagagtgtgacaaagtgacagggaacatggactgctcaaaaacaagccatgcccaacaaaactaatttccctctttgacagagtgattgatcttatagactgaaagatccactggttacagcccagtttgatatctgcatcattgtcaatgctatttcacatggactggtcattgacaagcttgcagaaaatggcttgggtagtatcataatcaggtagctattgaactggttaagaaaatgttcttagatttggtcagtaaatagtgtgaggacaaggcttggcttacgtagacattccccacaagcttgactgtggatcggatttttttttttccccctaacaaatggtttcatgagagaatgcaaagcgtattcatggggattgaggcagagtcagctttgttagagcctctttgccagaatttctgaaaagaagattgagaatgcaaagtgaatttgactaattaaaattatgatctaaattaattgggaaggaattgctgtgtgattaatgctaaaaaatatgtgtaaggaaacaaaaagaaacttattaaatcccatacatgcaaaatgtgaaaataaagctgctctgtgcacatcagtatcaactactttccctgcctcatattgcatccctaccctgcagccacacttactgttataagagaaagacatgaggcatatctcagctgaccttggcaccaacgtatatcaacaatgtcatttgattactgagaagggaaagccattttatatattcagtgaagtggtgttatatttaggtctcagtcactgaaagaccataaagagggagatctgggctgggtacgttggctcacgcctgtaatcccagcactttgggagtgcaaggcggtgggggggggggcggggggtgggtggatcacgaggtcgggagttcaagaccagactggccaacatggtgaaaccctgtctctactaaaaatacaaaaattagctcggtgtggtggcaggtgcccatagtcccagctacttgggaggctgaggcagatttgcttgaaactgggaggcggaggttgcagtgagccgaggtcgtgccactgcactccagcctgggtgacagagcaagactctgtctcggaaaaaaaaaaaagaaggagatctgataattacacactagcccacatataggggaaggtggttgatcaactcaaaattgagtgaaggatatacaggttttacaagaatatgtttaatttcccttaaattatttttctaatcaaggatatcacataactaacacattccacctgcttttgttgccaaatgcaattttttcacttctcttaataaagataccttcagaagaccccatttgactgatatcctgagaaaagtagtgttcattttttatatgccaagataaattttaaatggataataatgaccaagggtgtttgttattagcaagtgtttcgttcttgagaaactaataataattggtaattatatagtgcttactatgtgctgtgccacacactctcctaattgcttcatgtatatcatgtcattctcataacactctatcaggaagggactattattatttgcattttagagatgagaaaacttaggtcaagagtactggtatatgcctgtctctcaacttttgataaagccaagagaataaggattgtcactaattgtcaataatgcatcattccacttatgttgtgatatgtaaataatcgtattcagaggctgtgtttgggcatccatctctcctcttctacaggactgctttagatatttagaactactgtgagctgacatttcccctgcacagggaaagtagtatatagtttggtagtttctgtatctcagtaaaatataataattttaacctcataaaatgtatattaccagataaatgaaaaaaatggaatgattcataaggtcaggagttcgagaccagcctgatcaacttggtgaaacccccgtctctactaaaaatacaaaaattagcagagcatggtggcaggtggatgtaatcccacagctactcaggagcctgaggcaggagaatcgcttgaacttggaggtggaggttgcagtgagccgagatcatgccactgtactccagcctgggtgagagaactttgcataacttctggggataatgtaatctcatatttatttataataagaatttgctttagatgtttttccagctgcgatattgaaatgaaatagcaaaagaaccctgctaaacattttatcttaaagatacaattgattataattgttttattttaaaagccttatttaattagtaaaaaatagtaaggataattaattgttattgatttaagaatatcttgaggaaaatgggatgaccatgatatttaaaataaataaagtattggtaaccacaaagttatcttttaatgaaggatttttcagatgttaaataactttttacaatttatatatgtatcatatataaatttaattttctcactttataagataatatagtttatcaagtgtatttttttttaaaaaatgagcaaaacttttatactaccttgcaaaaagagccttaatcatttaagaaacaaaattaaatataaagatcatatatgtatcatcaatattgtgtgcagtggtatataattattaatgttctttagattttaatgttttatctcttactcttacaatagttttgccagtggtatcttattggtgactaacacattctaggtgtcttcttaacatgtaactgcttttggtttttcttttccattttcttattaggaggtatctgcaggctcatatgtggcagaaggtaattttaaataatgagaagatagtggacaggagaaatacatggaaacttttgttgaggattactcattgctatttgaggaattgcttttattcctggtccttcacttcttatttatacagcgcttattctagatttatgccattaacaaatattacttgacatatttctagaaaaatgttaagcagatatccacaaagtgtttttaaaagcatgttttaattattgatttttattttcattagatatttatttgtaataaaatctctaatcttttgaaatttatatttaaggatcacaataccagcagttatgctaaatcattggtattttcaacatggtcagccttgatttgtctcttgagtacattaggtatgacttaagcaaaattaaaattattggccaatagagttttttcacatgaaataaaatagtgttattcccaacttttcctgtttgtactttggaactgtaggctttggggctttggggacccacttaatttgacatctttggcacactgaaccagaacctggcttggaaagatacaaaaactactttggcaaatgatctgtcaagtgacccatgaacaaaagcgagattgggttgccctttgaaataaacctatttgaattttattatctccacagcaccttgtgtctctaatcttgtgaaaggttagtattctatccatcagagcaagattagagtgctggttgatgtctgctcttgatgataactgaatgcagcagttggcgctggaagagggagattcattaccatcagcagttcaaaaacagaggggagagatgggcacagagggagtcacgtttacaacagaagctacctattcccaggtcaaggtatttaaaagagaacaaaacaaaaccaaaaaacaaaagactgctgtttgggcaaagctttgctgagatttttaaataagttccctccctgaaagcagagctgtattaaggctatattttgcagaaattaccaatttttaatattcagataccttcttgtaaacaatgctgattgctgatgggtggcttttatgacacacatcagaggaaaaaaataagaatgatattatatcactatataacatacaactaataacaacaaaaaatataaaacatccactaaagtgtgaaataataagcctgtggcatgaataattatttttgaaaattactgaattctgaactgaatgtccttttggggagacttttgtgaatgatccatataattcaaaaattgaaatataaacaatttgaaatttgtaaaatatgtaactgtatcaaagtaagcatattcttatctagaatttaatataattttaacatgatgaaaaatgacctgcatacattcaaccctgtacaatttcaaataggtactggcagtcactaattgatactttatcaaatgattaaagatgattgttttttgtttcttgcattccaaatgacaatgttatgaaagtaaaatagccttccaagaacatgagattaatgaatttgacatttttctttgagaagtatcctgtgaataactgacaaaataaatttaatcaatgttaagcaaattaggttgacattaaatttattcattttcatttagttcttacacaataatactttgtctcattatgtaactacatcaggatatctattgtttgtttattcatcaaaagtatattcattacctttgaatgaagacatctgtgatgccacatgagcctgatattttttcctgttgatagatttaaagactaaaatgatttctaagacatggcttggggagctgagccatctctaactcctgacatcaataagaaccaagtgtatggtaaggagcaaaggtggtaaaaggtgtcttaacttcctttactttggttattgttttcaaattgtttgtagaaacatttatagaattacacagtttatcatcttattcatcaaatccccaccaaaggctctgtagagaaaatgagcaatgactttcaattcatacagtcatttaaatctaagattgattttttttctttagtttggtctgatatctataataatgaacaatgaaattttattgtctcctgattacatcaatttgggaaatcctttctctgccaagaaatagatggaaattatctatattttaaaaagcattcattacaataccaaaactgcagatgatcatattatcaattaataattacctaaccatcctggggactattattttatagacagcacgctgtgctttagagactactactttcttcttttgtttattaaaccctttttactaatcagcattaattcactatatttagagtgaagagacccaaattctattccatgctacgttgttgttacattctgtgattttgagtaaattacttgtttaccttctgccctctttatgcttttttttttttcagcttgattcttggattctccatggtagaattattagacaaaatacttcctatacttttaggtcttttaagttaaaataatatttgtttttttttcaactatgaaaataatttatagccatctacttaaattttccatgcctcggtttcctcaaatgttaattttggaaaattagacaatgtacagaggaaaaaaaaacacaaactatattcttcaaccaattgtaaatcgttattatatattttgatttttcttaataggcatattcacaaattatttacaaaactgagattgtactggatatatactttcatgtcttttgtttctatcttagcatactattacggtattatattttgtattaaaagtggatttcatttgaatctggtgaagcttatgtttcaggtaccttcccattaatagaccctttcgaagcctctgtacctaattgtgcctactcacaattgtgtagaatatttgttaaagggagtcctgtaaattgcatcagcatcaatcctcatagaatctgggtctatcactgtaggcactaaacctggaggaaggctgcctggatttggaatcccagctccatcaccttggaagttacttaaatttgctgtgcctctgtttccctaaatgtaagacgttgatgataataataactacctcataggactgttgacaacatgaaatcagttaatataagaatcccttggaatagtagctgactgatagtatttggtgttagcttttaaatattctttaaaaataattataaacgtaacagtattttgcagtgtagatttatccttcttgtgagattttcaaatcctttttcattttagctcatataaataataatgggatggatatctttgtacacaaatctttgaccttacctttgtaattgaactatttccttttattagtgttattttctactgaagcatctttcatgtcactatttatttaaaaaagactttgctaataaatatcaaagaagttaaaacttatattttaaaaaatataagtagtttagactgggtgcagtggctcacgcctgtaatcctagcactctgagagaccgaggtaggtagatggcttgagctcaggagttccagatcagcctgggcaacatggcaaaacaccatctctgcaaaaaatacaaaaattagcccagtgtggtggcgtgcacctgtagtcccagctacccaggaggctgaagtgggaggatcctgggagcccctggaggggaaggttgcagagccgagatggtgccgctgcacttcagcctgggtgacagagtgagaccctgtttcaaaaaataatgtatagatagatagatagatagatagatataaatttataaaaattatacctataatatctattatagatataatttattagttatacctatatatataatacataaatatataagtatatataaaataaaaacataaattatatacttatatattatagatgtatttaattatacagtatatataattttatatgttaatataaatcatatatatttattatatgtatatattatatataataatttatatatacacacacacatagtttaaaacaactcagaaatgaaggtaggatatagtagaatatacaaaaatattacttttcaatttctttttttaaactctcataatgttctacttacatttgctcttatttagacatctgtggaacaaggtaaatttttttattctgtgaattttcacatttttcagtattgccagtttttgatggaccagaaagatataacctaaaaacttagctttcaattaagatgtaatattttcacaaaatttttatatataattatgcttttacaactcagcatttctcaataccttcagtttttgttgtctatgttatgtgcttaaatgcaccctaggtgggccgtgactggcattccttttcccctggtcattaattagctggaggagtatcaagccctgttctttcctcttcccatggtatacccatccttcccgcatcgtgggacaagcccattgtcctgtaattgatgtaagcagagggagagttgagagagagtgctgggtgctgataaatgggaaagaaatggaggagaaaggaaaagataccagcacagtcttgtcctcagaagcactgctagtgttcctcacatactgttgatactctttcatcaatgaaactctctcttctcaagatgcgaatactggctgtctacagggagtaaagagaagggaaaggaaatgaaggaaagaatagaattgggagttttcatgatgtataatatggctccatccccatttctccttccactgcccatggaaccacaatcatacatcaactaaaatgaaagtgttggagaacgaagagctgcagtgattctcaatcttggctgcacactgggatcacctggggagatcagtatacaagatatacaagtatacaagatatactggtacctggatcccactcccagagaaaatgaatgcagcctgggcataaagatttttaaaagtgattttaatgggcaccctgggttgaaaaccactgaactgtgtgaagaagaaggaaaaagtacactccatttgactgttcctctttagtctccttagagcctacacaatcttttgttccaatagccccaggtccttatcactggcttttagcaaaaaactagctttgggtccacatcccagatttgatccttggtggtttgttcttggagtttttccatctgctagtccaacaaatgtttaggtgaagaaggaacgggagctggggaaagaactgggtttgtgaacaggttaatatatattgttaatactaccatcatgatttggaaacctaattgcctcttacagttgagaaaaaaaaagctgggaatgattttaagttactgttaatacagttatatactttaggtgcataaagggttaaacaggcatcccacactctggttaatgtcatttctgaaagaaaaatggaagcagatttgcgggccaggcccagaggccattttctttaggccagtgctaggaaactgcaatgatgaaagtcaactgcgaaagcatctcagcttttaattttatattcagagcttagggtgagatagaaatgcagtccataggctcaaagcagttgtttgcttttagcagcaaccatcagcacatttcagacttaattcatgattctgggaattaatagtttatctataccaccatgagaacataaatggcctaatcagtctttcttactttaaaagatatctttgggagaaataacctaccaagaaataaaacatttatcaatctaatgtgtaaaggatcactaagaatagaaaaagtttaaccttgtgaaatgtggattcaagtcagcatttctacaaactgctttattgcttcaaatctccctatatcaaccaattacatagtgctgcttttcaggaaactttcatttttgcaactgaattacacacttgattctgaaaaatccagcatttagtctcttcagctgactgtagtggaattaaattgaagtactttggtgcaaggtattgattatttttaatgaacattcatggttgtatactgatgacttttcattaaaaatttcttcatggaaaagtttattaaattagacacattggaaaaacataaactggtgatgtacaattgtcctgaataatgcattaaaatacattattatattcttgatttacttgacttactgaataggagtattgccctagaactcttgtttctacttatatataatttaagtaaatttaatttataatgtttaagagtttccaatacacattgagagtaatataatacaaagtgatccttggattaaatattgtgaacatttttgaattatgtgttacagtatttttaacagccaatatacttatgattttctgaaaataattctccttgttttgtgatgaacattatattttgttgcagggcctttgatagtttttgtaagatgttaaaagatagtttaaatttctatttttattaattgtcatgaatggaaagttaaaaaaaaaaggaaattgtaataacaatagtttttcttaacccagtatcaaagtagggttttttttttttattcttctttttcatctctatactcttttaaatgtcagagttactgtgagatttttttaagtctcctgggactcattagactacagccttagaaaaatttaggagtgtctcactttaaaatcactaaattcacctgaatcctccaaatcatttacatgattgagggagttacttttagattttagctaccgtgcaaaggaatataaagagatgagtgcattgtggagttttcagagcacattttaacatatgaaaatactgaaagaaaaggaacttttattctactgtttatgagagagttggcagactaataattaaactgtcttcctgactacaagaatttaaaggcatgatatgttttgttgaattaatttatctttgaatgtctcacttaagattttgacctgccatgctaaggattggcaaaattttttggtaaaggactagatattaaatacttttgtcattttataccacataaagtctctgtgatatatcatcttttgttgttggtttttttctttgtattcaaacagaaaaatgtgaaaaccattcttagctcacaggacttaaaataggttgctgactagaagcaaccccttcttgaaactgttacggtatttcgtaaagtatgttctctgaaacacttgttttcaagctatttaataatgttatagggatgagggtcctgaagaggaaataggcctggaaaatactcatataggaaaggtaagcagattgtctgctggggacgttcagtactagaagcattgtcctgggtgctgaacctctccaggggcctgggatgcacagttcaggcgcacagtctcttcctgggctggtcaaatgtacctcgagaagtacaaatttaggacattgggatttttaagtgttgcaattataatcatttgcaaccacagtactcaactgtaaataacatcctttattagaactccattttggaagtggaaacatatcttttctgtattatatttggacagtcacatctcacagtagatgtactatgtgatcagctttttttgttcttcctcagtttctctaacttgtctttccattgagattgctgaacaaagtcagggcccccctgtctgtgagtctccttggttgaaacaaataacattaatagctcttattttaaggacactcatttccttaaaggataactattatagagaattttaacaaaatgttaagacttacaactgaattatatatttaagcatattatctaacatgaaaatatgatttctatgtaatttgtcagggatatgtgaatgtagtcacgtatatgtataattgttatatgtatatacatatatacataatatgtatacacatgatatacataaagtacataatattttgcataaaatacataatatgatatacataaaatgatttacacaatattgtctgtatatataaatatacacatttcatatatacatgtatgtatatacatattgtgaattaattatgatttacacaatattttctatgtgtacaaatatcataaaatgaggcaccattttggccaaacattttaactatccttttgtaagccagtcactgttctatacactgtagtgataatcccaggttctgtgtttgattttcttctagcagaagcccccgcttttaggaaaatataccaatcccagaggtttgagcatgctctccaggctcggttatctgcattaactacttaatattaaggggacaataatcacacatgaaaattattattattattttattacactttacattctgaggtacatgtgcagaatatgcacgtttgttacataggtatacatgtaccatggtggtttcctgcacccatcaacccatcacctacattaggtatttctcctaatgctatccctcccctagacccccaccccccaacaagccccagtgtgtgatgttcctctccctgtgtccatgtgttctcattgtacaactcccacttatgagtgtgaacatgcagtgtttggttttctgctcttgtgttagtttgctgagaatgatggtttccagcttcattcatgtcctgcaaagaacatgaactcatccttttttatggatccatagtattccatggtgtataagtgccacattttctttattattattattattattattattttattattattattattattttctttgagatggagtctcgctctgtcacccaggctggagtgcagtggcacgaccttggctgcctgcaacctctgcctcctgggttcaagcaattctcttgcttcagcctcctgaggagccaggactatgggtgcctgccactatgcctggctaattttttgtatttttagtagagacagggtttcaccgtgttagccaggacggtctcgatctcctggcctcatgatccgcctgccatggcctttcaaagtgctgggattacaggcatgagccaccatgcctggccgaaaattacttttataaataatttaggtatgactttagaatgcattttgcaatttatattatataaatatgaatttatccactgtcctaagagtttataatgcttcccattaattattcatatcatggtctgaaaatttgacttaggatagactacaaagccatcctgctgtcttgttctttcctagaactgtttcttgtctatcatcgttttggatctctgggttgcattctggttctattgatctagggcaactcacttaacattttgagcctcagctttcctatctgcaaactagataaactaataactgattgccttgcaagtaagtaaagcctgtaataaaatatctgatgcccgttagaagtcaggcaacatcttaggtactatctttacttttacttgaaattagcatcattcactgtttcaaatccacttttgtctccagttaaagtttggtatctttacttttctcctaaaatatgacgaagacaaatggaaatgatgaagatgttctattgccatattactggcatttttaattagtttgtgtatatggaggggagggacatttacttgagggttaaaaatttggttctaataacctctcaaacaggaaagatgtggattcctactatgagatcactttgaaattacataagcttttgttaagtcctaggaataattagttgagtaaataataatacttataataaacttaatttataaaaacatacacctacacacattcagagcaaaggaaagtgtgaattatgagatgcagaagtggcaaatcccaaaggaattattgcttaaagcaatattgtcttttaataatcatagatttttatttctcccttttaaaataaactgtaatttaaaaaaatctttatataatttcaacctcaaaatctaaaaaatacattcaaagaatctgctttttacaccaaaaaatgcaagtgatgtttaagaaaaaaatactgagacaatgtaatatctattggaaatagttcttttcctttttcccttatataattgctttttaaaaaaactgtatgagtgaggaaataaaggatgccatagtcttgcatattaaaaacaatacttgagcaaagcctcaatgtgagtttattcaatacagcagatgacttattgagtggaagaaggctttatgtgtgagactgcaatgtgtgagactcaaaagtggtttgggaattaactctaatgtagcatgctgggcattgcttaaatgtagtatgtgagtgaatgtgagtgcaatcagcttggtgagataatgcactatgaagtcatgtcccagcagggacagaacagcagaagcaatcattaagccacgcaaagaatggctcaggacaggcagagtttggagagaaagtcaagctctggcagagcgatattgatagccaacttttttttttttaaacaaaggcacaatattatatgcgtaggtacacatgaacttggagcatggggggttatacatgaatatttatatgtgtataaatgtataagaatttgcaagatgacaagagggcaaatcagttatgtcctgttctaagatgtggtttgtgggatctttctttctctgaggcgggcccacaaaatcatcactatcaaagagaagtccagaaccaaaggagtcaggatgtatttcactggatggtcatgttcatccatcgatctattcattcattcactattcaccactttttaaggcactatcatgtaacaggcaccatacatggaaatgggagtattgactaccgagaatcttactgtgaatacaatctgtatttcaattccttccatttaagacacagcacctcaaatttgtattacaaacaaatcatggggttgatgagatgtggtttagaaataggctggcgttttctctgaatatttttaatgttctattagtagaccttggaatctatcagtagaagggtggctctcagcaggtgggggtaaggaagggagtgagagtggtcttgtccccaagaggacatttgataatgtttgatgacattttggttgtgactactcagagaaggatgtgccactggcatctaaaaggtagaggccaggcatactacttaataatttacaatatacagcacagtgctccccaaacccctgcccaaagaaagaattatccagctcaaaatgagcacagtgctgaagttgacacctgagatagactagggtcatctactgctcaatagcacacaagctgcagcttgcaaaggacaccgcctcatgtggcaaggacagacgtcctgagcaatgtccatctttactctacttactttcaaggtcccagcctctgggaagtgggaagagataggccatttgggaccatgttttccctccctcacagtctaatgcagaagaggataaatggcactgtgggtctcccttcattaacgctcctcattaactcagcattttcctgcagattatatcaggctgttacataagcaagatgccttttgaaaggagaaatgatctcaaagatatatctgaaagctgacacatgtgtgtggaatgagaaagactactcctcatttcaccttgagaaaggcaggagggaagacaggctggtaagtttattgagtgtctatggatcataacccttataggatgtcagctttcatcttttattttttattttattattttctttttttttttttttttttgagatggatcttgctctgtcccccaggctgaagtgcagcagtaggatctcagctcattgcaacctccgcttcctgggttcaagtgattctcctgcctcagcctcctgagtagctgggactacaggtgcccaccaccatgcctggctaattttgtatttttagtagagacggggtttcaccagtttgtccaggctggtctcgaactcctgacctcaggtgatctgcccacctcggcctcccaaagtgctgagattacaggcatgagccactgcacccggccggatgtcagctttcagaaccagtttatcctccatgtcagcccctcctatggagcattccttacccacagcttggctgggctgaccaaactgatttatcatactgttgttgagggagagtagaaacaaagagattagcagataactacacaaacatacacaattgcatacacatgtgtgtatttctgggtttaaggaaggaaacagcatacctgcttcccacagtaggacaagtgctataatctcgactgactaatgaccaaagcttttcactccttgggttccgaaaggatatagattcacaccaccatgctgtaacattcattttaagcaagtttttaataggaaatgtctctgagagcatgaaaaaaaataggaaaaggatgttatatagtacttaatccaatcctgtacctaatccagcacagaacatgtttatctatgtagtgttaacaagacatttctgagttgaatgggaaaagcttttgctgtgtgatgtagactgtagagagcctcttgtctgcctttttcctttttctgtgcttccccttgtcccggtgtgccatcttacctttcagtccacttatttggaggcttcatttggagcctttctcagttatccttagggcacctcttggctccttggggttggtttctgccccttaagaggtctctccaagtgatcaggccacatcacacagaccttctttttgcttttgcaacagtggtggtttttatctacaagactgttctcccacttgagacaatctgccctgaagcaaacagatgtttgcattgagatctcccctctagatgaataaaatcttcccagaggctaatgctggctaggaaaggttttttgtgcacctatgaagcgtaactgagccctgagcaaccaactttgatgtatattttgtgattgaggaagaagaaaaaatcaaatagcatttctttctgccaaactgttttttgcagataaaaatttttgttgactgaagactttatccaatgtgtgctttgtcctcttccattaaaaagagttcagttgagattgctttttcttatattgtccttgaattttgttctctctgatgttgcttgcacatgatacttcatcagtaaaatggatcacataactgtcttctaaatctccatcttgtttggtttgctgagaaacaattttcatccaagcataaagtaattagttcaaagagtcagatttcaaaaggtggatgtctacagtcatggtgaaaatgaaatgagtacccttattttgggaggacattagctttgcctcagtaccttggatctccattattcataagatcttagatcaatgtgccttgaggtagcaacatttgtcataattggctgatacattagcgtctttcaataccaaatattaactttgactatgagatcagtaaaccatgtaatgatttttaacaagaaataataataacttgactttgaggatcagtgaagttaatagaaaacttttgagacaatggcatactcttagacaacaatgtaagcttggaatctaagaaaatgttatttgagccgtatttattgaaatgtgataacttggtttctatactcaatcacaaatactaatttaaacttgggaaaaacaaaccacaagacatagtgagtgggcagtcttgtttgaaccattcactttcaaagtgggcatagctcaatattcagagtcctcatatcagcagaagaaaaaataaaaaaaaactgaaggaggtgttaccctcagtaaaagagaaaatgatatttttattcctaagacaaacatttatttctcaagactttggaaagcaatgagtatcagagaatttttttttttctctttctcttttttttaaagctctttgcaaatccagaccacactattgattactattcattgctgaaggcagtattctgtattcaataaattaagctttaattcctaagtccaacaaaataattgacctcaaaaagaagataaatgaataggctgcagagctcatgattagaatccactttccagtctcattgtattagtatttttcaattcagtgattttcccattcttttttatcttctttcacaatctgttacgccttccaccctgttcctgtatcagcaaggccaagctactttcattcttggtttccagatcggaaggtttaacttatgatattctcatacttttatattaataatttaatatagtttccattttaggacaaactagataactagcatttttgaaaaaagtatgaaattctcttgatttcctaaaatgataagcaatatcagcatacagcatatataaatattttgataaatttatgcttctcaattttgcaaatttcgccctatctgcttcaatagtcattttctttaccgaatccctaaagattcagagagatttaataatattcaactttattttacatttagtaaaaataaaaaccatttggtgacctggacaaaattacacagtatttgtaatcccacagtttttgctgccactgtagcaacagaatgtctatttaaaaatatatatatatttcatagaaaggaggtaaacaaatgaaaagtactttcattgctgctttggtctgatttgaaaacaaatataaaacatttatcattattatagacaccatttaattatcaagacaatggtttgattgtatattaatcagaactgaagtggctaaaccaagcacttcttcagccaacttctaagaatgcacaagtagcttccatggaattaatggagaggtgttcgtcactatttcctttctgtatcttagcagagaatacccagaaccccagaaaggagaagagtccttttaaaaaattcctggagcttttgaaatatgcaggacttgatttgtccctgcatttctgagaaggggcatagtttcaggcaataaacggggactatgaagaggtaaagcagaatcattttactcttgggaacttagattgataacctcagaagcattatctttccttagctctttccctaccccaatttataatctctaaatgagataaaacttgaacttgctctacccaagcttatttgtgcaaaaggataggtgccctacacacacaaagtgtgtcttgagggagactagcatgagggccagtgaggctaatgatacccaatggctttaatttttgtcttatttttttgcatcctataagggatcccagtaacactcaagcgctgttgcaaagtggaagatttgaattattggtgtgcactttttcatttagaacctcataaccagaaagtccaattgtcaatattttattcaagttctataacatgatggtttatatttgtaatgataatccaagatactttaaggctttctgactcattatggccacctaaattatgctcattatagctttattatgaagtgaatttaattgcattatgaatatctgaacattgctaattgattgctatatatagaaactagaaagagtctaaaatatgacattaatttgaacatctcatttatggactatttcaaataaaagcaatttaatggaatttagtgttaggacaaatttataaataaactgaagcaaatgtgtttatcattatgtaaacaacaatactctgcacgttatatttgcaatatattttgatttgagtttgtatcaaaccataggattatttaaaatttaacaagaaatgattaaagaattgagctattttggaggaggattacatggtagactcctaatgttaatggaaatcatggggtattctgttttgagttgtacaaggtcatagatgtaggtcaaatcccatttaaaatatgttttttatctgtccattaacaccttaatcacaggatatgtttttccatgaaaatgtcaattaaaagcagttgtacttaaggtaagtgggtgccttgggctttctagatttcattaatttatgacttctttctgttttatctgcagaatttttccgagagctcctggagaatgcagaaaagtcactaaatgatatgtttgtacggacctatggcatgctgtacatgcagaattcagaagtcttccaggacctcttcacagagctgaaaaggtactacactgggggtaatgtgaatctggaggaaatgctcaatgacttttgggctcggctcctggaacggatgtttcagctgataaaccctcagtatcacttcagtgaagactacctggaatgtgtgagcaaatacactgaccagctcaagccatttggagacgtgccccggaaactgaagattcaggttacccgcgccttcattgctgccaggacctttgtccaggggctgactgtgggcagagaagttgcaaaccgagtttccaaggtaattgaaaacgtgctttctttctcattggtgttccttgtttattctgtttttaaaaccaatgtttaaaaaaaaaaaaaaaaaaaaaaaaaaccaaggtaaaaattcttaattggtggtccttgctcttaatcagttaaatatcaaagcataattctggctttcttttccttgcattgtgtgagagagaacaggattttaagccattctatgtggtttgaaaattaatgttaatacttatcagcagtatagcagagaagcttttagtaccaatggtgcaaaagcaggcacgttgcaactatgatcatttgatatttctgatcagggttttaaggatgataaatactcatgaaagaatccattcagaggttataatcctctagggagtcaagatgacagtcttcatggacctgcgaatggagacaagttattgttcaggacatcagcacctggcatttcttctttttcaacacatgtcaatgtggccaaattccttcatggtaaaagaagagccctttgctgacacctgtattactggattaggaaggactaatgagtaccaagtatagattctcctagagaatttcttttgttaccccttatctttgtaatttcataccatgcattgccttgggcttatgaataagatcaatcattaatctacttttgggcctttcttgaagataacatctctataccttggatataagggataattctacattccactacttaaacattgaatatttcctgtgtagaggatatctgcttttgtttaagttctttcttgacatttaaggcacttgtgaggtcagtcctccaaataaaatgaaagacaattacttaaagaagtaaagttaaaaataatacgtaacaggaatctggtattatgtcactccaagaaggtgtatttgtataaggattattcccaaacactacttttctattggagggctgtgccaaagagccacagtatttttcataactattggtactgtcctacaatgcttctttttttttttttgacactttggtctcctcaatatttacatcctagcataaagatggtgtgtacccttacaaatgtttctctattgcactgtcagtaaaatccgtaatagcccattttaaattgttaatttcctaaacgtttatttgagcatacagaaagattatttctaggaaggcgctgaaggaaataattacaagggcttatttatcaatataaagggcatatgattctaatgtttaaaataatatctttgccgggcgcggtggctcacatctgtaatcccagcactttgggaggttgaggcgggcagatctcgagggcaggagatcgagaccatcctggctaacatggtgaaaccccatctctactaaaaatacaaaaaaatagccaggcgtggtggtgggcgcctgtagtcccagctactctggaggctgaggcaggagaatggcatgaacctgggaggcggggcttgcagtgagctgagatcgagcctctgcactccagcctgggtgacagagcaagactccaactcaaaaaaaaaaaaaaaaaaaaaaaaaaaaaaaaaatatatatatatatatatatataatgtccttacattgaatctcaacaatgttttagataccaaagaaactagagccccagaaatgcatttataaggaattagctaggtagaatagcaagaggaaatatcatcacctgaggactgtcagtaaaatatgaataagtgtagaaaataaatatgcattccatattttcttgagtagatgcattttgttgtaaaataagtgtaaattaatttaataagttaaactcaataataggattagtcacagaggctgcaagctgaagcttttgattttgttgaaggataaacatgtagccagcctttgagaaatatgaattaagaaattcaaagtatggatggatatatgcctgattatgtgtatttattctaattgagtgttaataatgtttagatgtgtgtattatgatctggcaagtttccggtgagataacagaatattttctagcaaagtgtctacaaagccatgagggaggctgctgctggctatccctcctgtttttcagtgagtgtcattcacaactgcctagagatggtgtctccccttggtcactctctgactgcctcaactgaggtctttgttgaccaaagtctaacacgctattccttctggcgaaggatgacctcatgagccaaccatcagtagagtatgacctttttctctagaagtggtgagaaatgtattttccaacactgtattctctctcccactgatcccttcaagaccaccattcttttgcagaacaattgctgtgggcatggaatatagtccgtaggtcatttaaccttggaaagttaactgttccttgcagatattggcttgtttgacctgagtttcatcatcatccctaatcagttaaaattataagccccatcctgacatttgggcactgccttttggagatgggtagagagatagatggatggatggatggatggatggatgggtagataggtagatgatagagagagagagagagagagagagagagagagagagagagagagagagagatggtatatatatatatagccttggtttgaaagaagctgagcaatgcttttgtgaataatttgtctcaggaatttaagtattttaccaatgaacttcctcacctaatgattacaagatggtctagagccgactaaactagcaatttgtgatctactggtactatgatgattttcaacacccaaggtatttttgtaataagaataaaatatcacaaagactaaatacattaagaagagaagcaagaattgtgtttgaggtttaagcccttcataaacctgaagcctctttatggtctattaattgagtgatttagagttggagaaatgatgacagaagagttagaaaactcaaagcaaaattcccaaatggagatgaacaaactagcttatctcctgcatcctgatttgagtgatttttttttttctcttcagtttctctctacatttatggtgactttttaatcttgaaagacatcatgaatatcttctaattaattgctttgactggaaaatttacctctttggcagaacacagcagtttgacacaaatgttttgacataatgttcagaacattattgggaaatttcttaccagaaaaatggaggtctaaattgtaagcatcaacagaattatttttaaaacttctgcttgccatcttatggatacaaacagtctttttctagccttcagatggggccagtttattttaagtaactataactctaggtctgactcttagaagcaccatgtgactcttagaagcactatgtgattcttagtgaatatctatggtcagccagccaggattcattttctgtgtgaatgaccattttgagcatgtcaagtgttgatgagaggtggaatatcaggaacctccatgcattgctggtggaattatcaatttatatgctcactttagataataatctgaaaatacctgtattgttgaagatgtacctattctaaaacttcaatttcatccggataaactgttacatgtgcatacaattagacgtgtagaagagtgtttgtagcaggatcttttacaatgacatagaaagtagaaacgtcacaaatggcccatctgcctaaatggttatctcttcacatcatgaaattttccagagcatagaaagtgctcatgaatgagttacagaaacctcattgtgagagataaacatcaagtcatctaaaatacatacatttttatgaagttcaaaaatgtaaaactaagcaatacattgtttaggaataaaatatatgtagtaaaactccaaagaaatttcaaagaatgataaaaagaatcagatggtggttacctctggagatgcagtttggaggtaagatgaaggagggatacatagagatatctaaagttatcaataacatactatttcttaagccaggtgcttgaggagtgtgtgtgtgtgtgtgcatgcatgtatgtgcaagcatgtatacatgaatgtattgtgtaaagcttttttaatgaaataaattaagatgtagaaagattttaccattttccatctctgtttctacctgtgtaactacaattgagtccctgagctaccctcagttgtttgtagtactaactactgttcatggacctgctagcaagtcagtttccatgttccatattgtgctaagtgatgtcagaaaggcatggaaggaagagctctaaaatgaagaaaaaaataaattttgataatgtgggcaccttgacagaatggattcagactattttttagcactgtccctttattaaaataccaccgtcattcccttatcttccaccactagtgagtggaaacatggataccagccgtcactctgaaggcttgtcagacattgtgaggaagagagagggcttcataaagagatattaacagattgtctgcttaaaccagtctttattaattataaaggcaaatgtggaaatgactatagtgtcttcactagtccatcttgatgccatttacactaagaagacatgactttaaagtgacttctggcatggcatggtgtctcatacttgtaattctagcacttgaggaggccgaggcaggtagacagcttgagctcaagagttcaagacccagcctaggcaacatggtaaaatcctatctctacaaaaaatacaaaaattagccagtcatggtggcatgcacctgtagttccagctatttgagaggctgcagtgggagagtggcttgagcccaggaggtggaggtcgtagtgagccgagatcgtgccactgcacttcagcctgggcaacagagccagaccctgtctcaaaaaaacgtgacttctggccaggcgcagggctcacacctgtaatttgagcactttgggaggccgagacaggcagattacctgaggtcaggagtttgagaccagcctgaccaacatggagaaaccctgtctctactaaaaatacaaaattagccgggtgtggtggcacatgcctgtaatcccagctacttgggaggctgaagcaggagaatcgcttgaacccgggaggcagaggttgcagtgagccaagatcacgccattgcactccaacctggccaacaagagcaaaactccttctaaataaataaataaataaataaatttaaaaatttttaagaagtgacctctatgagtaaacgctgtaaattgtgtcaagagcaatcatttcaactttgcaagtcatctcattgatttattacagacaaatgggggaggtagtagagctgggatccatataacttgaactattgacaaatactgtcaactatctctctatccatctctctatcaaaaatctttcttcctgtggctcatgactttgaaaagaaagtctgacttttagtctttagtaaaaccggaatattttcatcaacagacacccacctacgtctgctacatagactgatgtttttgctcgaagagcctcttaagtggttcattcccaactaaacagctttgcattaatgtgtgcctagaaagcaacagacaaagtcaactttcaataaatgtggttgatgcactataaggaaaaatgttattaccaaatttaatgaaatagaggttatcaaatgcctctgtttaaagtattctctgatcacaatggaaaaccattctgaagaatttaccatggattcaatttacaagagaaattgtattctatttagcgtttgcttttgagaaagaattgagaatacaaagatcacctgttgtcattatcacctgagttacttgttttgtccttctgtggtggtttttggattggagttaatttttgggagggcattccagaaatgaacacaatcacaaaaaggccttaggtgaatgaaagtttttttatagttcatttgtgattagtgtattcatttctgtaactgataatttttctatgtagattacttcaataatatacagtgttatgaataattggcaagccttttgaaattatcaatgatgtttctatgcttacaacttttaaatcagcataatctgtgactgctgtcttatgatggtatttcgagtattatattatatttagaaagtactttgcacttgataaataatttcataataaaaatagtaagaaattgatattgggactaggaaccataataacaaaaatagattattaagataaatcattaaaaatgcaagaatcttaccatggttcagatactgtgctaagcactagaaattacaagagtataagaaagtccaggtgtcagtagaagaaaagaacattttcccctctagaacagcatatggaatgtatcacagttgagtctccagcagtaagaaagtttcactttgattaaaacaatttgattatattgattgaaacaatttaagtttttctcattaattttaagtaatcttgcaaaatgtatagcctaggtatgtaaatatggaagattgttaagaagagagtataaaccaaggaaaatgaagctatctatttccaatgaattaaaggctatttgtgtaatcttgttcttttgtagcttgtgtatgtttccagtaacctatgtctgagttatattacttcatggtaaaattatactatgtataggaagtcagttaaaacaaccacctgtctctccactgaatctgattttgaagttttattcatattgaaagaagttagggattccataaccctatctaaatgtaccatggctagaaaaacttgtttggaaccacagtcctaataactgtattgtacctatcgaatataaacttctgtcttctacaatctgagataggtggttatgataatccaaccttcatctgacccaaatgttaactcttgtaaaaacagagccactatagagatttagctcagtcctgatcagtaaacatttgttctttgtattttgtatgtcaagtactgtcggttaacttcctgagacatgaagactaagcaggttacagcatttacaagtaataattaggaagagtgaaacagaagcaaataatgtcaatatataatgaatacatattcatttatgtatatgaacattatttatgtaatgaacatttattatgcaataaatgctttgggaactgagaggagaggcacctagcttaatttggtaggaggagtcacaagtaaactttccttgaaccatgtgttaaaggttgcataggtgttgggcaggtgatgagggcacctagcacagtgaaggacattttaggcagaggcagtaacagagcagaagtgcagaggtgtgaaactgaatgatgtgtgcagggagctacaagcatgttatccttgagccataaagtacaaagcaatgatttgcaggagacaaggatagagaccttaactgaacccttgaatgaaaaccatctatttcactaatggttttgtttgtctattctgcctgcataatttaaaacagtttctgtggatagaagcattccagtactttcaagagacagacatgggctgagcacctactatgtgccaggcacttctctataagaaacagagggaaaaacaatgaatggcattgtccttgagggattcacagtctatcacgaagagagacattatgaaaagtccaagtgtagtgtaattaatcagggtgacagacgtatggataaaatactatatgaaccaatggaaatacatgtttccctttaccttgggaaacgggagcagacatcttagagtagggaatcatcagatgtggacttaaagaatgaatagcatctcacagagggaaaaaagaggtatggctttcttgccaagggcccagcatgtgcaaaggcataaatcatgaaatgttatggttgtttggaaatgaggccgggaagtagatttgaaccatatcatttgggcatattatttttaagttaaggaatttgaagagcatcacgtgagctgtggaccaccagctaagattttttaaaagacaaatatataattggttattttttcacttaagaaagatgggcagggagctgataaactggctgaaaggagacacactgatggcaggtgctgggatgggaagctgttgcaattaaccagacaaggggtgatgagacctgagtcaaagcagcatggagcagattggggagcacatctggaaagaccgcagagaccctccagctcaacagccacgatgcatagtttagggccctgtccccagagtcagggatggaactgtttgggaacagttgtctgcctgctgactgatttgaatatcaccaacatataaatgtttgttggcaaaggatagcaacatttatctagagaaagaagaatcaggatcagatgaaatgtcagagactgtgcacatttaaagagagttctgaaaacaaagacaaatgatgagaaccagcaaagcacgccctcctgaaagtaaagagagagagaattcaagaaatagactaatcaatagcatcaactgtggcagatagttaagtggaaagggcagagaaaacagaccttaggatgtggccattaggatgttaatgactttagcaagcgcaggttgacttgagtggtttaattggttgggaagttaacttatcttcccctacacattctagaacaaggtgtgcaaagcttggttcgtggactgctgcatgttcataaataggctgttactgttttgccacaagatacacaccaaaattgaaagttaaaaaaaaatctttacatcaatttcacattgctctgacaccatcaatgggacttttcctgggatgttgaatttgcatggtgaggctcctatgtgtgagcggcatattagttgtactcaataggatcaggtatcaggtcatgatatattggtttttaattctgtttatgtggcgtatcacatttattctgtttatgtggtgtatcacatttattctgaatgtaaactgtggcttatcaccgtttacactgctgtgtaaactttgcacagcagtcacatcgtcatcacttacacatgtacaagtgaggagggtaggcaaggtatgtgataccatgggcccaacttgaaagtttggaggatttctcttttattgtcccgtcttcagagattcaatgttatgaggatgttccctggtgcaatatcagcgcactatagaggtttctgagccaagatcttgcatatgttaaaccatccctgcatccttgatatgaaacccacttgagcatggtgggttatttttttgatatgttgttggattcggttagctagtatttagttaaggattttagcatctatattcatcgaggatatcagtccgtagttttctttttgggttgtgtcctttcctggttttggtattagggtgatgctggcttcatagaatgaattagggagggttccttctttctctatcttgtggaatagtgtcaaaaggattggtgccaattcttctttgatatctggtagaattctgctatgaatctgtctggtcctgtactttttttgtgggtaattttaaaattaccatttcaatctcactgcttgttattgaagctggttctttgaaaagataaataaaattgatagagtattagcaagattgaccaagcaaagaagaaagaaaatccaaataaccacactaagaaatgaaacaggagatgttacaactgacaccactgaaacacaaaagatcattcgaggctactgtgaacacatttacgcacataaactagaaaacctagaagagatggataaattcctggaaaatacaaccctgttagcttaaatcaggaagaattagataccctgaacaggttgtgatatattgggaaaaatcaatcaaccaaagattgttcagataatttgaaccccaaacagataatttgaaatgtactattctagaataatgctaaaaacaggaaaataatgaacatattttgattgattttgttgatatgttgggtttacctttcctgtgttcagctcctctttacctatttttgtaccttcctaccctagcagtttttcccaggggtatattctgggtatgtacaaccatgatgagctttcagaaaactcattatgattggcatgtctactgtttgcctatccccctcaaatacaagaacttccctgggaccgtggaaaatgtgtgcaacaaacagatgagacgtctttgttactaatagggaacatccacgggtgaaatatgccaattaaagtacagcacaaataaaaaagacccaaggataaaacactagtgctataactcagagaatgctgcttgtaaaacagctttatgaagaaaaatgaacctgacgtttatcccagtctcaatgctgcccatttttggacatttatttctgaatgcaattatgctcttcctatgagagggttctgtgaaacaaggtttgcacagcaggcacactgtaatcacttacacatgtacgagtgaggagggtaggcaaggtgtgtgataccatgggcccaacttgaaagtttggaggatttctattttattgtcccatcttcagagattcaatgttacaaggacattccctggtgcaatatcagcgcactatagaggtttatgagccaagatacacatcaaaaataattttaataaagcttgacagatatattgccttaatagtgctgacatagtgaagcgggacttatatagggaatacgacatcctaacatttttaaaaatgagatattaggtcacacagatatttgtaagaaagaggggggtatgttattacattttgtagatttcctccattgttatctttgtcattgcaagcaagggttattcctttgcatctatttgcattatacctcttcatcctgatgagtgatattcagcacaaacacaatgggtcaatctcagatacttagaatatagtaatcataccaaacaatgttgaaactctacattttttgtgtctaaatcaaataaccaagagtgaaaatggacagttcagagtgtcagtaataggataacggtgactctaacattcagacgtaagtaaaactatagccgaaatcagtagatactgccaagttaacatcaaatgacccttaagtggcttgcatacacagaattttttaattcatttttgcccttgcaggaacatgctgcatgtcagaaatgccactgtcatatttaatactgaacagagagcagtggattttatatggaaattttaaccttttcagattgtagtgtctgaagaagtgaggaagatcaacttttctatgttaattttgtatagaattttggcaatcaaaaagtacattcactgaatattttaaactttcataaatacattaattacggaaacattatgcatactatttttatagtaggtacaaatacaagtcttttcatagagaaatatattcatttataaataatgggttttaaaattttcatttgctctcagctttctaaaaacacgttctgttactaaaaatgtatcaagacataaggaaatacttatttcattgtttttaatgaaaatggacaacatttagtaagaagtacacaattttataacgctttaaaaattagcagagaaccaagcactttgcagaagtctttgttcttttcatcttagaattttgttgcacaaatcagaggctcagccaaggagaattcaactgtgcttgcaataaagcattttattggaaagacaaaccttacgatattctgctgcatcggtagagagaagataactatataaaatatttatgccccattttccataaaatatcaaaaatatctattttggaatggagaaaaaagtaccctgacatttttggctaggatggaagatagaatccagattgaaagtcttttttatttgtgcagattttttttcagtgttagtgtgatagtactttcccaacaatggtctgttatcctaaatgtttaacaaattgtaaaacctttcactcccaactgtccaagacttccctcttgattgcttgtgtttgtcacttgggttgtgattttgcagtagagaactggagaaatgaaataatattatgaatcaccctagccaaatagacatttatatccttcaaattactgaggaaatttaagttgttgctccagcttaaatcaccaggatatttattttttgttggtggtaagaaaaataagtcaccaggatatttattttttgttggtggtaagaaaaataattttaagtatcttcatatatttttttctgatcctaaaatcaatatgtgtgttcatctgaatttttttgaagaagcagaaaagtacaaagaagaaaataaaatattctaaattctccatacccagagataattaaatgtcaaaagttttatttctagtatatctctaatatgattttatattgcaaaattatgtgtgctgtttgatattaaattctacttttattattttaacatcacatgcatttccccacctcggtggcacttctttttttttttttttaagtactcctatatcttaaaaattttcttttacaacctaagagatttgtttgctgccgatatatctgggtatctcttacaaaaaaataattccctaaacagccttacctagaaaataaaacagttggctcacatcgtttgtttgcatgtgtgggtgtacatgtgtgtgcatgtttagcctgactcacttttcactctgaattccaaggtacatgggagctccgtagctctcttatcatgtatttaactgctggaatttactgatcactttatacctactccacatagttccataacttagaaacagttttcattcaaaagggaaaagaaaggatgggtatataaaggggagataaggaatgaggctgacaaaaaaatgtgtggtagaaatccatgaacaataccttccattgggccccaaatctgaatctatgtcagattaaaaactggtggaccttggtccaaactggcccagttgtataaaaaaacataatttatttggcatgagctctttaggatttcaagcaatgtttttaaattgggcggattgacataaaatatggatttctacagtttcttggaagataaaacaaccctgagccggcaattgcatagcaaagatcagctggagttaattagtctttagactgagcttttttttgccttagcatccatgttcagtttaacgcaggtctgaacactcctggagttggcctgatcctgaattcagtgctagttgccatttagctcagtgcttagctcctttgttcataataaataaatatttttctgtacctattttttaaccaaaagtgaaaaagtgtaatccaaataagccatgtgtcaagaaaaataatgcttcaaaaataatgcttttttttgttttgttttggaagtacacaatatgttaaatatttaatatacaaatagcatctgtggttaaagaacacattcagtgaacttcactcacagttattgttcatctccctagcctgtgaacttgcaaagtctcctttaagctttatattggccatcatttggtgtaaacactgtttcttttttttaagacagagtctcgctctgtcaccaggctggagtgcaatgccacgatctcagctcactgcaaacttcacttcctgcgttcaagtgattctcctgccttagcctcctgagtagctgggactacaggcatgcaccaccatgcccagctaatttttgtatttttagtagagacggggtttcaccatgttggccaggatggtctcgatctcttgacctcatggtccgcccacctcagcctcccaaagtgttggaattacaggcatgagccatcacgcctggccggtaaacactatttcttaattaaatgaaagtaaaccccactttttgatggggttgtttgtttttttcttgtaaatttgtttgagttcattgtagattctggatattagccctttttcagatgagtaggttgcgaaaattttctcccatgttgtaggttgcctgttcactctgatggtagtttcttttgctgtgcagaagctctttagtttaattagatcccatttgtcaattttggcttttgttgccattgcttttggtgttttggacatgaagtccttgcccacgcctatgtcctgaatggtaatgcctaggttttcttctagggtttttatggttttaggtctaacgtttaaatctttaatccatcttgaattgatttttgtataaggtgtaaggaagggatccagtttcagctttctacatatggctagccaattttcccagcaccatttattaaatagggaatcctttccccattgcttgtttttctgaggtttgtcaaagatcagatagttgtaggtatgcggcgttatttctaagggctctgttctgttccattgatctatatctctgttttggtaccagtaccatgctgttttggttactgtagccttgtagtatagtttgaagtcaggtagcgtgatgcctccagctttgttcttttggcttaggattgacttggcgatgcgggctcttttttgcttccatatgaactttaaagtagttttttccaactctgtgaacagacacttctcaaaagaagacatttatgcagccaaaaaacacatgaaaaaatgctcatcatcactggccatcagagaaatgcaaatcaaaaccactatgagatatcatctcacaccagttagaatggcaatcattaaaatgtcaggaaacaacaggtgctggagaggatgtggagaaataggaacacttttacactgttggtgggactgtaaactagttcaaccattgtggaagtcagtgtggcgattcctcagggatctagaactagaaataccatttgacccagccatcccattactgggtatatacccaaaggactataaatcatgctgctataaagagacatgcacatgtatgtttattgcggcattattcacaatagcaaagacttggaaccaacccaaatgtccaataatgatagactggattaagaaaatgtggcacatatacaccatggaatactatgcagccataaaaaatgatgagttcatgtcctttgtagggacatggatgaaattggaaatcatcattctcagtaaactatcgcaagaacaaaaaaccaaacaccgtatattctcactcataggtgggaattgaacaatgagatcacgtggacacatgaaggggaataccacactctggggactgttgtggggtggggggaggggggagggatagcattgggagatatatctaatgctagatgacgagttagtgggtgcagcgcaccagcatggcacatgtatacatatgcaactaacctgcacaatgtgcacatgtaccctaaaacttaaagtataataaaaaataaataaataaataaataaatgaaagtaaaccaaaagctaagaagaaaactctactatttctgatgttaggaccagggaagaatcctcccttccattaatgccctcaaaaacatcctcgtaatatatacaactagacattgaagccaaaatgtaccaaaatgtatagcaagcacaggcttagaattgttcctattttatgtcattataatatcatcaccattatgaaaattctcttcctgttcaatgtaatgcaagctaacaaatgattacttgccagccactatgctaagtactttttacaccttgccatttagcccttacattaaacctatgagataggtatggttatcattccacttattatataagaaacctaaagcagaatgacacagagcctatgctgtaatattccacactgcttcacccacagttgaatttttggtctctaaatacagcaacctaatgcaaaactcaatggtctatggtagtgctattcgacaggaatatgatgtgagccacatatataatttgaaattttcaggctgggcacggtggctcacgcctgtaatcccagcaatttgggaggccgaggcaggtggatcacgtgatgtcaggagtttgagaccagtctggccaacatggtgaaacctgtctctacttaaagtacaaaaaaattagccaggcatgatggtgagcacctgtaatcccagctactcgggagactgaggcagaagaatcacttgaaccggggagacggaggttgcagtgagctgagattgcgccattgcactccagcctcaaattttggtgtgtattttgtgcttatagcacatttggggttggactagccacatttcacatactgaagaagagcttgtggctatagctaaggaattagtatggagataatgttttaatacattattctcatatttaagataagaaaatttaaaatatctccctaggaagcctaaactcttgtggatgattattcatacactttctgtttatttcacgattattcatacacaaggaaaatggagaaatattctgtcttttcataatgcatttttgtctgtaattggaactctaacataagtaacatagacactttattgagggatttgttcttgccattgcctcaaaggccctacaaggagtgctacttctgtcccttaagtgtaatggccatgaggaaggttgcaagtcatcatggatgaactactctgtgattttcattcggctctggggaagtggaggagacgcattaatacaggaggtggcacgtgtctgtggatgttagtatcagcagtaaacgaaataaataaatgcccaattatgatcatgagaaggggccgtctgagatgtttagctctttaaaaatagccataatactcataaagctggcccgtcactgggttaaatgactcaaaaccacatgactcatttgtgttcacgtagatttgagggtgtttcacaatctttgggtaaagaaggttcttttcaggtaacagccatgaagcattggttctatttgatttgtcattaaacattttagaatataactttttaaaaaatatgaaattacaattttagtgaattattacttgggtgcatacggtgttacactaagtaagttaaccaaattgacattcattgtcccaaaatgcttatctccatgaggaaggatcttctcattaggtgggtcatatttaataattcctattaatttttaagtatgcattatggaattgatactttcaccgccatgctgcaaattgtgatgtgtaattcattttccttttgtaatatagagagtcagatcaacctggcagaagtatatgcctctgtggctgcaaccatgttctgaatacacacaactttctcctgggctcaaagtatcatggtgctgaagagctgactttgggcttattttataattctcttcgttaaattaatttagaatatgtacatggatttattgtgagatttaaagtcctttccctcaagagagcccagaatattggtctagcagttttttgaacacaacattgactcaatttctggggccagtcaatttaatgtcagcatcccataatcttagctacacagtcattttctctctacttttcacttctgagtcaaaaatctttttgagagattacaagtatgtcagagtatttccaacagagagaaagtttgtacataacttctatctgcatcctcaaattcttactttttctttattccagcatctacggtttgtgctttctcttgggtactcagaaaccctcaaactattgaaaattgagtttagaaatttcaagcaacacaatcattttgtaactttcgttttgtgttgctttctttctgtgttgcttcctctctatatttctccctttcccgtgccttggtttctgctgaaatctacatctcaatcaccccaagaataggctgttgccaccttaaggcaaccctcccagtcattaggctctgtaccttcttttgggcatcctacgaatatcttcatcaaataccactttgatgaggttactgtcctgtttacaagtcctggcagtatattacttatcaattactttttaaaaatctggggtatttactaagtccttgattctctgctaggcatggactttaaatgtcatattcctaccctcaagaggttgacaagtctgaagtccgcagccttgcctttaagtcttccatctctcacttaccttgcggcctggtatctttagtcccaactcaacagccaatttctcaagcaaatttgtcttgcccactgccccccgcaaccaatgtaatttttatcagagtttctttgccactttccttactcattgtgccttcctctcccctttctttcaaacccagctcgcttgcctcactcaaaacttgctaaaatccactgaccaccatatctcatgtatccaggaagctccttagagctgaaccagttttttactcaccctcttttcagaacccctgtactaagatttcagcatgtttgttgattcaaagttttcacattgtaccatacagtgggccttcccaacctgaaattgtaaactagtactcagggaaggaacatgccttccatccttatcattcctcagagcaagaactattgcaatttggatatggtagacgttgaataaatattattacttctattatattactttttttctttctttcagtcttaccatggttgggatgaaggagagtaatattcatatgcgttataacatctcccactttattgtaaatagtgccctgcctgaatacctgatggttttggaaaaggatgtactatagttctttctaaaaccctactttctcacaaaagagataaaattaaatactcatggcatgttgttacccaacagagtggtagcttctttttaggttttttggaatatccagctcgaaagacattgtagatgaatgaaagatgaatgactgaatataagctgagaaggcccatctccctctagctctcacctagatgcagttgcagctcaagatctgctgaagagtggtgaatctttgtactcagacttccaaaacacctatatctatactgtccacctatacatagataaagatatctatactgtttccatagttaatggagcaactcttctttccctcagattttcccttcttgccttagaattcagctcatctttccagaggcttgttgacttacttattacaattgagtttggtaaatgattagtggaaggaagggtataccagtagtttcatagtcttcacacgtgaacattgtacatttccctaggtgtgggtaaacagaagagaaagatgtaccaaaatgctaaaatgatgggaacatttttaccgtgaattattagaattattaaggagaaaggaaagaaataaagggagaagcaactaataatctcttttgtaaagtgctcacattgcacatttacaattaagctgttctgacttctgtaattaaaataatttcctctgagaggtcttaatcattcatgcccatgagtaaaaaaaggctgttgtcatgaatgagcgattaaaaggaagatcttattcagatgcattagttcctatgagaaatctttgaaaacaaaccacgcatgaaaaagacaatcagtaggtttggccagggtaattttggcaatctgtagaaaacaccagtgcatatgtttattcaccccttcattcagcagcatttattgaacaccaactctttggcaggtgcagtgggtgcgatggtaaataacacctagcccagccttagaattcccattctaaagtggatcccagacaaatgaatagtagaggccaatgagggctaagataggtattcatgagtcataataactcgggagaccattggtacaagctcaacctatggggaccctttgaccttagaccattttattttgccagtcacagattttatatcaacagaagcataaattctaatgaagatatgaaaattcactgtttattgagaaaataaaactccataaacaactagttaatatttattgactagtcacaaggtatatgcaactgctgctgggaacagtgaattttaattatatatatatgtacattttctcttttacattatatgctatatcatgaccgtaatatgaaaataacataggagaaaatgtaaagagaggagaaacttgatgtaatccagagctcgttagaccagaaataggagatacctggaagggaattcttagtttgaccctaattagttgtctgaataacttaatttcttttctctttgatgaagtgaggagattagaccacatgaaatgcttattgggaatgaaattcccaatgtgatggttattgaggtcttagacatatgactgagaaactgaagtatagtttcaggactgcacctctgagcatttagatctgccttggaaggggttggccaattaatgcactagcagttattttgaaagttgtaggctgtacttcattgtatgtgtctttgaatatggcttgagaatctaactacttctgattgtcatccttgtaattgggcttaattctaattttggtgtaacacagcttacttttataataacaggactttttaaaaaatcacttcaaattccaaagacagtgttgagcagctggatacctgtatgcctaatggatttccatgggcctctagaattcaacctgttttgctggcagagccagacatctaaatctactatactatgtttttgtatatgattcataattttaattttggcactcatgatctatttggtgttaaatacacgttactgccagagataatggatgtcctcctaaggaaatggtgtttgcagtgttctctattgaatctcacatttgattggcatgtgtatcctaaaaaaattggcatagcactttgttagagggcacagtgccatctaacagtcagggaagaatataggctgaaaagtgatcacaaatgaagtcagctaggagtgttcaggaatcaagatttggctcactgcagtagagggaaataagtacttttatgaaagtcttcttttatgctaaagtttccactgactgtaacctttaaatatatctcgggaagatttgaaggcacttttgctagcttggaagaattatgtttaaaatttaattgtataatgatgttgaaaaacagcattatgtttgtatttactctacagtttgttaaatcaatatgcaggtgaatctagtatatcaaatcgcacagtcaacaggattttgtgtaccaagtaaaataagtagaggattatatccttctgccacttgttacctagtgaaattctaggtcactgagcttctgttatctcatcttcaaagtggggataataggaagtggggatgatgtacttacctgaagtttttatgatagttatatgagacaaaaatatgataaacgtgtttggtaagcaatagcagattcctaagactaagaatagtctataatatcacagttttacatagaggtgaaaaaagcaaaatgtattccaaagtagttgacaacaaaaacctatgacagcaatatcaaatttaaacactgtaatattctgtattataaacatgatgatactaattatggaatactataccggttctgaggaataggctctctttatatctactctagtctcattacactgctaggcattggcaaacaaaggaacacacatggaagtcatctcagtttttgttcttgtctaaagtttacaggtatatgcacaatgccttttggaaacgcatactttgtaaactgcatataagatacacatggggctgaatcaataaagttcagcagacaccacattcctattctgttctctgtattctctccaaagtatctttaaggctacagtcaacaataagatttttgttgtagacaactaattaaagccgaaataagcactccaaataatttcatgatttctactggaaattttcaggacttagcaatttgtggtacaatatgtctaaaataaatactaccagcttttcctaaagtagagcctacagtataaagttaaaagtaaaaactttctgattaatgatttctctctctctctccaattaatagcagaaaaccactgaaaagagactttttccccacaaactctcaattcttgtacacatggttttattattgattgtacatgggaactgactgtgattctgttacttgaaattttattgttccctgagtgttgacttcaaaattacatctcttctctgttggatcttctgaatggctatgatccagtttccaatctagagggatatttcaccctctctcttattggctagtatcattcccagaagggatctgtcttttgtgcttattaaagtttattttgtacaaaaatttatgttcctcatcttagtatttaatcagtattttaatcttatgcaggcaacatatgtaccaatttcaaggggataaaatggtaattaaaaatccagttaaaaaataattacaaatatttctggggaaatacagaagaaatgtgatgaacattgttctatgtttactatttcctcttctgacattgtcactaataatgaaaagttttatttaaaaaccaaaacacggtcaagcaatactctaattaaatggtggggataattttaaaaattcagccaggctccaggagtataattcaaggttaagtaacatctatttgtctttccctgcttcttgcctatatgtaatcttttcttcttggtacaatgcatcggtgtgaacaacgccttaccaccactatggcaaaggaaccattggatttataaataaggcagaaaaatcagtttattatcatattaccattctccacaacaatttctttgtctttcaaaaaccaagtagaggttaaagtgtagaactgagtaaagcttgtaaaatcatttgcaagtctttaatcaaatttttacattcaggataaattgttctaatagaccgttctatataatgccttaattactatattttcactcctaaaaccttcaatcgagacagaaataaaaaaaatatgaattttaaaattttactctatttaacacctgtagacaatttgtctcttatccttgtgttagtcaatccctttaaactcacatggtggcaataattgtatctttatgaagtagtatagttgatcaaattcaaactgccttccccagataatgatacacgttaatgtgttttctgaatttctttactgatgctccagaaaggaagacaagttcatttttataattttatttttaatatttgtgttattgttgtcctcacgggaattaaatactatatatgaacactattaaaattcacaaaactactcaagtcaatgaaacacagtaacatgttcacagggacaagataaaatgactgtaactattgtcaggtgtcggaattgctttagccttttccataaatcatggtggaagtatcattatcatacatgattaatgacacttcacgtcgtggatctgattacaaccacaaaacaaagaaaataaagaggaaatcattcatgaacaccctctatgcaaaggttggggtgtttctttcaaattaccataatctgcctactcagccagtcaaacacaattcactgaatccaacagagacctaacagagattttcctgatgatattcaggtctctttcataaacactgagtgagcagtttggggaacagcaataatcttttttccttcatcccatttctcgtttggaaatctctgaatccgtatttattgatccaagctaccttatattgaaaaactatttttttcacgatagtagtatttgatttatttaaagataaccttaaacctcatgattctgcaaaatgctagggtatttttccccaaaactgtgctctttagttatctgttctcaaatcacacttgtttcttaatagaatgagcttacatgttatattttcatttggattatattgttaaattttcactggtaatccactgaaatcacacgtgaagattttctttgaaatacatgttaaaattattttaatacaaaagacattttatatagttgagatattttctgatttttaagaagcatctacatacatggaataacgttttaattattgactacagagtattcttatccattaatcaactaactaatccattaatatagtctgcttgataacacattatttgtatcactttttgttatttttagaaatttacaacaatgaactttcttttattgaatagtctatccttaagatacctaatttactttcccacctaaaagaatctaagtacatttttttaaaagaatagacattctttttcagagcagttttaggtccacagcaaaattggaaggtacagagatttcccacataacctttcccctcctgcccctcacctcatgtacagcctcccctggtatcaatgtccccaccagagtggcacatgtgttatgactgatgaacctcattgacacatcattatcaaaaaggaccatagtttacattaggttcactcttgtgttgtacattttgtaggtttggacaaacatctaataacatgtgttcacttttacagtatcctacagaataatgctgccctgaaaactctctatgtcccacctgtttatctctccatccttactaatccctggcaataactgatatttgtattgtctctatagtttttgcttttccagaatggcatgtagttgggaattctacagtatgtagccttttcagattggcttctttgacttagtcatatgtttgtgaggtttctccgtgtctcttcatggcctggtagctcatttccttttaagattcaataatattccattatctgggtgtaacacaattttatttatccattcatctacggaaggatatcttggttgcttccaagttttggcaattatgaataaagctttcataaatatctgcatggaggtttttgtgtggatatgttttcagttcctttgggaaaataccaaggagcaagaatgcaggatagtatttatagttttgggagaaactgacaaactgtcttccaaagtggctataccatttttcattcccaccagcaatgagtgagagtttctgttgctctacattctcaccagcatttggtgttgtcagtgttctggattttggtcattctaataagtgtgtagtgtatctcattgttgttttcttttgcatttccctgatgacatatgatgtggagcatcttttcgtatgcttatttgccatttgtttgcttatttgccatttgtatgccatttgtatgtcagtgaggtgtcgaagtctttagatcattttttgattgacttgttttcttattgttgattttaatcattctttctatattttggataacagtattttatcagatatgcctactgcaaatattttctcccagcctgtggcttctcctttcattctcttgacagtgtctttcacagagcagtttttaattttaatgaagtccagtgtattgattctttcatggatcatgccttttgtgtttgttcctcagatgcatatgaattggtgagagagtatatatcagcattcttgcactgccatctcagttctctccttcaggctcaagaggctacaacacagcctcctataaactatgcttcccaaaataatcttatttgggtgaaaattgccttccctataggtctactcaacagcagctgaaagttgagagttaagcagaatatcgtgactcctaagtgatgtcaagtgggttgaggataaggcaggatgtccaaagaatgtttaagtcatccaaacattaacaatcagcaagtattaatggagcacttaccttgtttcaggtgctgtggtaggcagagtgtactgagaggtccagaaggcatggatcctcactacaaaaatatcagaataagagacaaaggaacataggcaaatgagaaatttgtagggagctgtgtgtagcaaaaatatttgcacagtttactccaaagagtaagtaagaaactatgtctcaatgatgcagtgggtagttagttggtgcacaggcttgggaagaacctagatatcctgatgcctgaactaattttgcaaagatacagatattttcaaggtggacatgtgtagaacatcattctatgcagatggaactgtggtggacatgtttgaggtggctatagcttcaattaaaagaaataagcactttggagaaacaaaccaggaatggattgtgagtcttgactttgataatggatcctcttgctacatcattagctgacctccagacctggttcattgtgcctccatttaagagaacgtggttaaataggcaaagccaaatttcttgtggatttaataaaataagaagtcaaagaaaaatagcagtaactaccttttctcattgccactgtctggtgcctatttcttgttgtagattcttattcaacatttcctatattaaaatggcaatacaatacaatatttacagccacatatcacttatttagtaccaaagggatgcaatgcattttgtcactaacatcacctgaagacatttttcccattggtcactattagaagggggtataaaattcatccttattggaaaaaggaaaatagatcacaataaattgcaaacacatcagggagtttactcctaagcagcaggagagaatcaaagaaagttttcatgtagaaggaaggcagcagaatgaaagaatcactctgtgggagatgacaaaccataaaaatatcagaggtgttgcataagatttggaaatggtcagctatgtcaacccattgtgaattctatagatagctcaagttttgtgcagatgttatccagaataatttgatcaggtcctgtcttgtttagagaataataaaatggtgcctttgtcagcatgtgcaagtgatataacaacagtttatttttattccttgagaattggaaattgtctttatctctgaataaaaagaagcccagagattcagcccactttcaggtctttggaatatatacaaagtaaggtagaaaaaaagaagctttaaattgaaatctatttaaaatattgggaatatcatatgttatttataggactgttggtaactgttactttgctttctgaacacattgttttcagcaaatgcgttaaagcaaagggctactactactaagggctagagaaagtggaatgggagaactggcctttaagttgctaataatttttccaaatagagaaaatgtatatatacaccccgaataaagaacaacacagaaatataagtgccaaactatgtaatacagactataaataatatatagggtcaaagagaggaatgatctttgtgggccatagataatggggaagaggaaagaactgaattgaaccattagtatttattttcttttttcactttgagagtggataaattgctgctaacatacattaattacatattacaattcaaattctaccctataacaaaaaatctacaactaccctttaaaacaatttattttaaataatattaattataatgtaaatgcattggttgtctaccacttaacagtttgactgattagttgctattgatatttttcagtgctgaaagtgcttcttattcacaaatctttattcgtacaattaaatcttttttgaggtggtcaaattaatcccaattactatctgttgttttgttaataacataatatttctacactgtcattatattattaattgagcttgtataaataaataatggccaatggattatggttatatgtggggtctattagttatgaaattttagtttgccattttaggtcccatacataatttggcatcaacactttattaatgcaaacaagtagaaaatttgaaacttatctccaatggaagatggaagactggatgagatcaccaaggaaatgagtgcatgtagggaagagtagagatccaagaactccagcttcagaaatctcaaagaaatggacaaatcagcaaagacgattgaggaaaagaaccaatgagacagaaagaacaccatgaaaacatgatgttctagaattcaagtttaaaaacctgtagcacggaggagggaaggaggagaagcaagtaacagtttgcaaaagagtatgagaatgagaatggcctgtcaaattagccatgcagagctcattggtggtatcgactagcagttttattggagtagtgggggtgaaagtctaagtggttttagggaagaataggaggagagtcactgtgggcagcaaatgtaaacaagacttttgaggaattttgttataaaaagggaagggagacattgaagctaacttcaaagtagaataaagggaaagaggattattatctaatactattaatagtaatgattattattatgttaagatgaaagaaatgagaatttgtattgtgctaatgggagtcaacgcagagaaaaatttctaatgaacacttcattaacttaggtcatctctttaacatctctgtggggtctatactattatatcttcaatttaatagaagcagtaacattacccagctagcatgtgggcaatctggtattttattcttggcattattgtccagtcttaggtcttaagcactttctcttaaacagtatctatcttttaaaaatgcacaaacatgtacttataccagctaaattataatgtatccacgtaccattttctttagggaatttcttagtgatgtgtctaattgttctttcattttcatgtattttactgaaaaataaactattcagtgttatattggttaatataagttctcatcaatttctgaaatgaatataactgctttattaccaagaaatgattttataatctgtaaatattcatttgacaggtttttaccttcaattggcttaaagtaaaagaaaggaatatttgggtttaaactgagaaaaaagttgggtgatttttgtcctaatttacagataaagatttctcttgtagtagttctatcttgtagtagttaccattgtctatcattttgaccaagagaaagatagcacgtataattacgcatcagtagttttccctttgtacatatcttttttggggagagcggggagcacaattcaagtcttaacaaccatgtaagcattttatgtgcattttgatttctgtgagctacattgggaactgtagaaggcatctatagagttcagtagcctcatgactgactgactcatgccctcccactcagtctcttgaccaccctggaaatatatgaacttgaagaaaatgctacaacagctaatgaatcagtgggttcccactcatcttagaataaacaaaagtccccttaacatggccacaaggatctcaacggtcccatctcagccacaatactgggaccttctgtgccagcacatctggctgtattttatttctttacattctcggccttcctacttcctctcaccttatggtgttagcttgtgtcatttgtcctccttcttccttcccatcaactcttagcagacatttactcattctttagacactagtaccagcattgtcttctcatggagtcatcttgggccaccctaaatcaaattctttcttcagaggttcttaagcaaaaattcacctctttgtcttaattatatcacattgcagttttgtgcttggtgtgtgtggctatttggttgacatatacttctcatagacccttaaaatagggaccatgtatgtccaaggccttattagcgccaggctcacagtagacattaaatactttcatgcatttttttaaacaaggaggtacattaaattgttggattctttatttccactctcttgaatgtgagaaataaaaggctcattttcatcttttctttgaaatagggtagttttttctggatataatttcagttaactcatagacctaaatttggtgtttagcaatcttttacacaaatatatgtgggtgataatgtgtcagaatgaagaactttgaaatttctgtgcagaatgtctcagcatcatccttggatgtgatgatggacttgggggcttgttctgtatgatattcttatgtttgccttacaatttttttctgggacttcaaggtggaagtgggataggcattccacattaacttgtgtatgtgttacatgaaaaaagataaattagaataatgaagactcttgatccttaactatctttatagctggccaaatctgtcacaattaattctattgcacaaaataactattatataacagcaattttgaatctcatcttttcttagttgctctcactatagcaaaatgaaaatataataactcactaagtcatttttatcattaaaagggtgggctcagggaacaggcattctgggtttgcatgcaggacttggaacttctaccttctagttggggactgtgttgcagttacataacagctctgtgtcttggagggtttttatgtataaaatgggaatactaatactaccttacaggatcgttttgaggattaacagagtagatccgtgtaaaccccttagaacattgtctggccacaatatacattaaaaatactagctgttattcataataatattattattacaacttggtgagaagatgagaacattttctatttcacagtagtaaaaaaaaaaagaactcttttgtataaatttcatgaagatttgttgagcacctattttatgccagacactgcatgttttgtgaatataaatgaataagacattcatttcaaaatgcagacaaaagtatgtataattttggacagtgtgaatttagtgaaatcttcaagtacctggagttgtatatgtaaaaaaaaaaaaaagaaaatattcatatctaattgttaactacagaaaatattataaaccctgattttatccaaatgagaagacagccactgaatgtagataggacgggcaaataacaggaagctcagaacctaattctctcccaacaaaatgtttaaagctcttattttaagcccatttctggcacctggtgtcatttacccttgaaaggttttgcttttattgcagctggtttactctgcgctgtcttttgatgaatttcattatctcatgttgtctctttaatttcacattggtatatgagcacaaagtagagaactattggaaaacagtgaaaagaactctggtctaaaaatcagccccttcctgactgtggcagcaccctctgacctctttactggtcgagttacttcatccttctggacgttattttacatcttctgtaaaacaaaaaggttgtattaggtgatctaaagtgtcggaaggttatgcttgcctctctgcgcatcactgtgccccttcagtaagataaggagacatgcctgccctgagctgctgctaggatttcatgagtcaccatgtctggaagtgcctgggacatcacaaaccctctctctatcagtgttattattcatggaatgacgctaaacccacttaggagttctcttgggtgattatagaagtttttgtgcaatttggttttcagaaatgacagcacagtaaaagcaatgtgctctagtgcctaggaagctcaccaagattgaatgaagagcaaatgtaattctatcagtgctgaatttttcttaagttctctcccacagtaacagctaaatgccatttctaaggtatttaggaaggcagtgtcatggagttttcagcattcacatgaaagtttagctgacttctggggaaaataagccagcctaagaatggactttgctccatgcaggggagatattgccacttctctactgctccgtgagttcatatttaggggggttacatcgggggctactggagtggaaaggcttttaagtattgcatctgattcagccagcaagttgagtcacaaagtggattacataaaaggaggaggaggagattgtggtgcatgtgtcccagaaaatatttaattcaattcaaaatctcaactctgaagataaatactgccctaatctgcatccctgggaaccatatatatacaacccccaccacatataagaaagtagctctaaagaaaatagtgcaagcctaaatatattggacaagtgggattagttgccactgtatataaaggagcaaatcccatcaggaaacttccagagtaatatccccgttgacagttattattccctatgttgccactgtagtatattctgtttgtttctctgctttctttccctgtgaagtgtatggccttccaaagtatgtgccatttgttttatcattttttttctctctctggttagacccactcttttcataacatcttttaagatacagaaaagagtgatggctttttcaactctgtattctcactcataacactgtatctggcccaaagaatgaatcctcgcatgttgtgtgacccatagtgaagaaaatataggaacaaggatatgtcccttccagttttggcctctccttgtttattttaatcaaggtgatatgatatgtgctatgaaaacaaatacccaatgctacaaggctgactagagacaaccaaacagtaagcttttcttttcaaattaatttattgtagactctgggtcatcaaactacagcctgaagaccaaagccatcttgcagtctgtttttgtaaatgacattttatttgaacacagtcacacttatttattttcatatgagccatggtttctctctccctacagaattgggtagattcaacagagaccatatggcctacaaagtaaaaaatatttactatcaagttctttacaattcatgttcaccaatttctgttgtagactatttagaagtagaaaatgaaataattatcatttctcttagtaatttgttaaatccaaagaaaacatgtttttatgttacagttagccaaaggccttatgttttttcagacttttaatattctctaagcatattcttcacacattatctgttaatgaaaacagtaaactgattaggctcgatttatggtaaatgaaaatcttcccttatagctaaatcgcatccatcactggaccttcataaatatacaactccagttcatggtgacatcataaacttctcctctgtagtttaccctgatgtaaattgtcctccccctggtatttatgacctacagtttcccaataccagagtacagtttatgagacaaatgagtctagtcctccactgtcattcttagattgacaaagtcctatattaaattgggatcaactatatatgatgtgcatttgtgttgcaaaaagatacagcagtctgctggatttatcaggaacgttttgggaaataaacatccatgccctggctaaataaaagatgaaatcagtactagtcaaaaaagtcttaaaatatgactgctctgtttctaaaatgttttcccatcttgcctttgtagggaacactcttaaaatgcattgctctgtgataatgggctcaatttaatgagtaaaatttccttaattttctcttgtattttggatataccataatcctacctaatttcaaattagctacaatggcagatagttaggcattgtgaataaaaatgcccaccttataataaccaaattaatatttgaatacttcattgtatgtagtcatgtactagttaagtataagatgataactgcctttctctttcttcccgatctgtgaaagctatgctcaaatcctctgtctactgagcaatcctcccagacaaacccagtgctgctgcaactgctgttgcattaaatgattgttctacactattaacaccacatcttatacttctcatgagtatgtgacacatcatttaaacctgacttccaccagtgcaaaatgctgatagtatacatcactgcctggtacccgccttgtgtcatttctctgtagacctcagcatgccacctctcagccatatgaaatgattctgatggaaggagatctaaccctctgcttatttcttttgcactccagaggatgtaacagggcagtaataaaagctaatatttattgaccacttgctctgtgccaggtatttgttatctcattttatcttcacaatgaccttataagatagctactgtctttatagtatcattctagttttacagatggtaaacctgaggcacaatcaggctaagctagttgcataaggtcacaaagctagcaagaggtaaagctagaatttggcctctatgggctgacccaaatgtagaactctaaccactgtaccacagtgtagttgtccaggcggtaaatcctttgttgactgggtcacaaatgatgcatatagatggtttttacagtgtaaaatctcatgacttaagttattcaaattttgtgtaaagataatcaaaatataaatttcaaaatacactcagaaataggttcatttgtttatgtaaaatatactaaaaagagcttaggacattaagtgcctccatgaatgggcatttcatcacaattggattgcagtgggtgacaccataaaaaaactaaaatcagtcagggagatgttttagaagatatggtttgtaaaagttcctttgaggcccttagactaggcagtaaatgtactgcccccaaatcctcctcctctccagttggaagataaaattgctattataatcatgggtcacttcaagttcaatggaacttactctctggggaaaaaaatggccaaataaaaagcaagttttctatctattttcaatgataaatgtctggcctacttcaagagccttttgccagggttcaactaatttccatgcagccaggcccaacatgccaataatgatggacagcgtgagacaccaaaggattctgcggattatgacttctgctctgcagacagacagcacttcgtttaagtggctttccagatatctcactgtggatctgatggaaggatttagcttaaagccagaggttgtaaccttttgtctgtgagatgaagcctttgaccagaggtgtagcacagaaactgctaccctgtgtcatccttattatgcagccagctttgcaagactgcactgtctttcatatatttaccttctctcatcaaggcacatgataataaagatattgattctcatgccctgcaactttctttttaactaattcaacatgttttcattgcctatgggaaagagagctaattcaaaggcaggagtccattaattttagaaatttaaggcaaaagaagaactgatggataattttggaaaattgtcctgtcctctgcttactgttaccataataccttcaactcctggtgactggattgagatattattttaggtcaatttagatgggtgggattctctgaggtcacatgatttgaatcaaaccaaaagtcatagaccaaaattggttaagtgccatgcagaaatagagggcatgagtcaaagcttaagggtaccgatgagcagaggcggagtccttgaagccagaatcaatggcctgatgtgtccaaaaccaaagagtggtggactctgcaagttttgaaaagcaggtaagtggtgggatgattcactgtagcattcttctgaaaagcaagtgcctatatgcctttttgaaagtaatgttatttacagccaacaactagagacaacccaactatccctcagtaggagactgtgtaaacaattgtagtgtagccatacaaaggaatactactgaacaggaaaaaggaacacaaaaccgattcatgaattgacatggatgaatctcagagatatacagagctgtagggtccagaaacatgtatctttataatagaatgttttatattccttttagtatatacccagtaatgggcgtatgttcaccacaacgccgttcgcaatagcaaagacatggaatcaacctaaattcccatcagtgatagactgaaaaaagaaaacatggtacatatataccatggaatactgtgcagccataaaaaagaacaagatcatttcatttgcagggacatggatggagctggaggccattgtctttagcaaactaacacaggaacagaaaaccaaatagtgcatgttctcacttataagtggaagctaaatgatgagaacacatggacacacagaagggaacaacacacaatggggacttttggagtgtgaagagtgggagtagggagaaaatcaggaaaaataattaatgggtaccaggctaaatacctgggtgatgcaataatctgtatcacaaacccccattacgtatgtttactatgtaacaaacctgcacatgtacccctgaacctaaaagtttttctaaaaattgttagtcaaaaaataaacatttctaaaaatatataatgtaaataatttttagcaaaaattaaagttcagaaacaaaggaacatcttctgtcttattcctttacttgaaatgcaaaaccaaagtttagcctagcagaaaacacctcagtgcttgtccagggttagtggttggggtaggagatgactgaaatgtatatctcagtatgttgatttttttttaagtgaggctatttccaaaaatttcatttacatggaatagttccaggatatccccaattcatgaaacaaggttgcttatattatggtgaaatgtctttggacaacagtgttatgtgttacagtttgttctagaaaactctttgtagaaaacttggaacattttacagttggtttaataaactctgtttgttcctttgacgtctctctaacattgaggtagggcatgacagcctgtgtgtgaactgagaagtctgcagactggagttggacgttggactttgccattctttagctatgggatgttggacaagctactgaacatcttcaaaccttactttccttatctctaaaatagggttattaataaagccttctgcataattcattgaaaagagtaaattagaatgattataaagccctcagaaccatgtgtgtcctgtaataagctctcaagaaaggctagtcattccatttgtataaactcttctcggaaacccttgtcaacatgccccaaatggatggaatcaacactccatctattacagccttgaccgctgacatcactggtaacctatttgcttctcctgctccactgtgagcttttcaagatgattaactctgagtccttttcatctctctattcctggtacctagcaccacaacttttagtgtacactcaccatcagtgcaggaacttcattcttgaagcttaaatcatcaacatttctttcagtctcacgcttttcttcagaatgagctgcaagagaatccatgtcttgttgtgggacccaggtccaaagcctgtatggacctgaagaattacacaagggcagcaggagttacacagagacgaggtaacatatttttacatctctcctcttcacattagaaacatgaaaaccagagtgaagtccctgaggttactcgggagaatgccttggtaaaccttccatggattttctgcagagtaggatcaagtgaagaatgtttccacacttgagggagacttcacacatgctaaaagtttgatgcataatatttttgggttagaccacaatgcttcttcccatggtgcccgcttgtcatattcataaacatggacttcatttactagcttttgttctctgccaaacctcatctcatgctttttcagtaatgttagctaggttgtctgcacacttgaatatttaggataagaccctcaatcctaatagcctatattataagtgttaacatttctgtctatatagttatatctccttatgcttcttttattaagttaataataattcaattaatgattgtaatgatagatacagaataaaattataaaataataagttaataattttgcttacagcattgcttaacttaagtgtacaatttcacacagaaatttttgatagcatgttcctctcctcacgagtgatattttaactttggatatttatggagaaaaggaaggagttaactgggatacaggatttatgtaaaggtctctctttccctctctttcactgccaaaaggacaaagaaatccctaggcaaatatctggtactacatagaagtatttgtctcaccaagttgttgctgaagggcacttttcatactattaatattatttgagagacgagcagacacaccaaaccaaacataatccaagacaaagaaaatggattgatgtcagattttaacctgactgaaccctctttcgagtatatctaagtgatatctcctctggccaacaacaacattaaatgcaaatatttctctctattccctttcccttttccacaacccacaaatactgttggctgcaagtaggaggagagaagttcggaactgcttctattctttatgtagtgctcaattgagtaaggcagtcttcctgcaccattttaaaacttaatttttggttggggtacaagacctttaacaattcagctccttttaatatacccgtgctactaagtaatgtagcaaaatacattgaaagtgattagccctttaatactgcacaccatctgcttcaagtccctttctttttacagcccacggttggaaaatgtttcacacatccctacacattgccagtcgatggtctgattctccagtttaacttcaaaagggaaaaacaggttcaaatcagtatagaacattgatgacctttgagaaaatgatttccctcagttggagcttagatagagcacagagatgtggcatgtgtttgcagttcaactaacctgtccagttttgtcagtagtggtagacttctatctggcatggtccatctgccaccccatgaggctgtcatagctaagaaggagagatttgaaacacaaaaatcctctgctaacatgatagtatcagcaatcagtcatttgatgtagaacaaagatccagtgatttctttccttggtgctattgtcaactgttacttctaaaatacaaatgcttcataaggagttcacctaaaatggcattgcagtcacttcagaatccatgcctggcctcacatccctatgatttcttagaaacttaacatattaatacattcatggatgtccatgcatctgaatatttcaaatacagggcaattttaaatggtgaaccaataattttcctagcatgtttcttaactgaggggtattttctacagacctagggctgcattctctctaaatatgttctttccagtgagtggcatggttttgtaatttttgaatacaacggaggaatgaaagagataaggaaatgaacacatttttcctggtatactccacagctggttttaaaagaatgtttttcaaaagaggaccactgcaatggaaggaacacagtaacctgaggtgggagatggcaattttgatctcagctcagcctcacctgagccttacttgactttaggcaagtcacttatatgatgtttctcaagataaaagtgtttggaagattcaggatttgaatccttaactgcctcccaagtgaagcaccctgactttcttaaggttttgggacaccactttcttcattatctcttcttccttctattttcacatagcctcaagttgtcttgactataacccaaagatgatactaccttattgttacattgttgtaagaattaaatgagatcttgtctgccaagtacttagcaagtggtgtggctcatagacatgtcttgctacatgaaggtgctcatcattcttcttgctgttattttttatgaggatgcatgccactattacgaagaaaaagtattactactatttttccaaccacaattgccttgtgcactgctgacatcagtatatttcctacataaatatgctggagaatataaatttggctagtttttattatagaatagtccaattgtttttctagttatatattgctgcataaccaggtaccccaaaaacttactgttatgggctgaattgtgtaacccctaaattcatatgttgaagccctaactctagtatctcaggatgtgactatatctggagagagggccttcaaagaggtaactaaaatggagatgttagggttagtccaaatccaatatgattggtatctttataagaagagataaggacacacacacacacggaaaactgcgtgaacctacatggagaagacgacaatctacaagtcaaactgagaggcctcaaaataaaacaaggttttgcctcaaaatgagacggggttttgccatgttgcccaggctggtcttgaactcctgggctcaattgatcctcctgcctctgcctcccaaattgctgggattacagatgtgagtcaccacacatggcctctatggtaacttatttgaatttactttgatattttaaaatctttatttcagctattcatttttttttcctaagtgaaagcaggacagttaaaaattttttcaccgctactttgagtttaggttttgtatgacatcactaatcctttgagcagtggtgcatgatgtctctaaaatgaggaagaggcagggaataacgggagacacaaagtatagccgacaacacatgctctagcatgagacagactctgtctgcacgtttctgaattctgactttgtcacttacaatttgtctgaactttggcaagttatttaaatactcagagctccaagtttttcaactacagagtggggtgactaacacctgtctcaagagggtgttgtgaggattaaataagaaattatttgtaaagttcctagctttgatcttagcctattaattatactccccttagctctttaaggtaatacaacacagatcaaaatatcacagttcgagtttattcaactgtaatgacttcatagaggataatcagttgtccttaaaataacctgtttgatctgtgctcatcgtcttttccaaaaatatttgcatgacaccagactaaacgtcgcactgggatttcacaataacacttcactatagagtaaattttgatgtcagacacattttgtcttttttccaacgtctctcatgtatcaaaacagattggaagtcaggtgttaaagcacatcttcagtgagttccactttttagtccaagaagaatttacaagtttatagtatttttcccttgtagagactactggttttacttattgtaagtcaccattaccagtacaaggaagtgaaatatcctcttaatttctgaatgagaatcagtttgagtgaaggaaagcaaaagcacaaaattatggtgatggagattcaaatgttagactttttttttacttatatacttgaaattttacccccagtgtattaatgaagattttgcatttcattttcactgcatttattttttgattaatgtagtttctatttttctagataagaggcacaaaagaaataaataaaacaagttttcagactgattgctaatttatatgaattcatgtattcaaatttatgatctttgaatcaaatagaagtgctcaatgctgtttttcaaatctctgacattatttacataaaagcctttttgaaatatcaaaagagattatttgtcactgaggaaatttcaatagtaccctgatgcttcctgaagatgttttgaggtatgtgataacagaatgccatttggaacttaaaatttgccagtaaaaaacacttatgaacagaaacacccaaatggatttttcatagctttttagtatttatcaaactgtgatacaatggttaatccaaagatctgtttttataattaagaatagcaacagttgtaacctgtattctcataaagcaatgcatccatttcttataactgctgtaagaaattactgcaaatatggcttaaaacaacacagatttatcctattacagttgtggaagtcaaaagtccaaaatgggccttactgggctaaaatcaaggtgttctcagtgctgcgattcttcttggaggctctagggaacaatccattccttggccctgtccagctgctggaggacatcagcagcccttggctcgtgcctttttctcccatctttgcctccagcttccatcatttaagcattcttctgattactctgggcccacccatgtgatcccagataatgtcctcatctcaggatccttaattttttcacctctgcaaaatccttttggccatgcaacataacctattaacagattcccatgactaagaaatatgggggtctgttattctgcctaccgcagcagccacttagaaatgatttgtgtttgtttccagaatgtcttcttaattactttttaaaatacagaaaaattatgccatcgaatttcagatttatttttcaaaatctgaaacctaactttgtgctaaaaattctccactgcttctcaaaacactaaaggctggcatggattcaacaaaagctacaaaattgtagcttcatgtaaaacaataatacaacaaaatgtagaaaaaaatccaaccatttgctaaacatacaccctttaactacttttttttttagagaaaaggacattttgtgatttttttttttaattaatgagggaggtcatatggtcacacacttatgtaaacagtcactgaactgtttactgttcacattgctatttgccacaggattttctgttagaaagcttaaacattggaaaattctgcctaattctaatttacaaaatactgacagttaatgcactacattttaattctgtttaacattgcctctttctttttaatttttggtgggaggagtgactagcagctcatctctgttatagtcagagaaacgattttccttagactagagaagaggtctgtcctgactttggtattctgctcttgttccatacatatagagcaatggttctcaactggggagattttatatttgacaatatctggaagcctttttatatgttacaacctgaagggtgctattggtatcatttgggtagaggccacagggatgctacaaagcattctgtgcacaagacagcccctatgacaaataatcatctggccccacctgtcaatagtgcacacttgggagaccttgatgcagaccgatctggagcttgagatgaaaaaaatctgtcagtatttcactagcataatgaatacaacgtattattataaaccagagtctatctgaagacttttcagatttcaacccttcatgaaaccagttcctacctcaatcatccctaattctagtaaggcctcactatccatgaagtgttaatacaaaagaacacagaggcatccttgaatcctctttctctcactgtgcacactctgacacgtctgccttcagaatctatccccaatgtgagcattaccatctccactgctccaccttactctcagccaccatcatgtcttgcctggattctgcagtagcctcctatctggtctccctgcagcctttcttacacttggcaatgcattgtctggcagccagattttaaaaagcttttattatagcttcaggggtacatgttcaggttagctatataaggtaaactcatgtcacaggggcttgttatacagattattttatcaccaggtactaagcctagtacccaatagttatttttcctgatcctctccctcctcccatctgctaccctcaagcaggttccatcattgttccttctttgtgttcatgtgttttatcatttagctcccacttataagtgagaacatgcactatttggttttatgttcctcattaatttgctaaagacaacggcctccagctccatccatgttcctgcaaaggacatgaccttgttcttttttatggctgcatagcattccgtggtgtatatgtaccatattttctttatgcaatctgccactgatggatgtttaggttgattccatgtctttgctactgtgaatagtgtagcagtcatgttttaaagttagcatcaggtcatgacactgtatcccagggcttctcattgcaaatagaaagggatccacacttcttaccagggcataccagatcctacctcatggagccctaccgtaactctatattcttaccagtcatgaccgtgtctgtccaactagatagactctgattctgtaggtctcatggacacactaaacttgctcctgacacaagctcttgtccttgttgttattcccacctggaacagttcacatctccttcttcatatctcctagtacctggtgttctcagatcatctcagtggcatcctctgacatgaccttatcctagttacatctcctctaccattttattttctccttaaaatttgccattatctaaaatcatcacatataattttgtgcttatcttaacgtacttcactccctctatcctgacacacacgtctaggagggaagagatttagttctatgttgccactgcatctcttgcataatattagagactataataagttctcaaaagagagagagagaataaatgagttagctgataaattgattcaattaatagtgttgggctttcttccatgctaaggattccagagcgcatcagaataaagcagagttttcaagtttggtgaaggcccctcaagtattcagagatacttgcatatggggcctcaatttccattttgtttcccaagactactctgcaaaactatcctgacctgccatttctcctttttctcttttcaacacctaattctacttctatttacccgcaaaatatggctttgtttaagatgactcttctcggaaggatctcaacagttttcacttcgctgttgcaattaggtttgatgataaccaccacaatctccttaataacttttttaaaagaaacttatcttgtctcagttacaaaagcaatatatcatgtgatcaattcaaatgatccagaggtgtgtaaaattgtaatcaatagtctctaccagcccacctgctttaattaccatccataccatgcacaaaggtaagatgcgtcaggtccctgaggaaagggaatgtgtctttcttgtttgatactgtgtttttgttctgagagaagtgcctggtcttttagtaaatatctgtagcatgaatgagataatatagaaagaaagcatttagcttagtatgtgacacctggcaggtgcccaataaatgattcatatggcatgggagagatattcaagctaatcatctgcctcctgccagtaatgaggccatttggggaacccactagaggaactatcatggagaaagaaacaagcttcagggaacagagggccagttccttccccagacagagattccatggcagtactgaatgggtcttgtgaggaaggctggtgtcaaaattaataacatctttctaacaaggctcaggcatttaattaaaatgaatttaacagcaaagctagtctgcagcattaaggttccagaggcaaaagctgaccagtagttggacccagccagtgataagagtcagcatgcaagtgctgcttacagggaccttagaaatcaaacaaatagcttgtgtcagctggaattagtaagaattatactagacataggtatgatatttgtaagtttctaaaaagcacctatttgcactctttttgtgcattgcttcatataataaatgcttcatataataaatgcttcatataataaatgaagcatttattatattgttaatttctagggaagccatgattttgcacacaaaaaatgactataaacttgatatctgaacttagggaaaaaaaaacctaacttttgtcttgagcaactctaaatcaaataatactcttgcttattttaaataataaagctacagataagagcctactaaataaactaacatttgaaggtaacttctttgtgataagcacacacgtcactgttctatgacctggtttctctgtatgaaagacgtatggtctagattatagagggcacggaatactttttgttgcctaaaaatgagagtttcagaatgagttaatacttatttctcttacctatctaaaaatttctttttaatattcttacattgctgttagaatctgatagttgcccaaaggtaattttaaaacacttctctcactttagtccaacccatttatttcctttcttgtcttaaaagaaaagagattctttcttctagaattatccaggaagaatttttttcttttttctttttaagagatttttaaaagtgaaatctagcaaccattttgctcttacattaaatgcaaaatgacgggctcatttaatattgcacatggttttcacaagttgatcctgggtatgttgcacaggcatgtaagcctccggtactcaggttatacatccccaaacactcaccatacgttcctcttgattggagatcatttccaacaaagtctaaactgttggtatatttggacattgccagaaactctgtagttaaggtgaaggtaacatcatcctatcttcaatatgacaaattgtaggaatgggtatatcttcctgagggaaatataacactttataaatttgattccctaagcagtagaaatatatcagctaagtaaaatggctatggatcgaatatgttattagcactaaaatttaagtataaatttctgactgacacatttaattagaggaagaagaatttattatactactacatatggatacggcctattttacagttaacccttataacatgatctgatgaattcctataactagtgaattgaatcccaaagtaaaagtcatgtacctagaacataggttgttatccatgggtatgttgggaggcattatttataaacccactgcaaatatttttaattacccctttaaaaatttttagacatttaaaaataaacattttaattaaaaaatataacacacaacacaaatgaggaataatgtcacataaatttcaaatgtgttcctctttcccattcctatttcaaaggtgttgtgaattttacacagatattatattgtcttgtagcttcataagttagtgtatgatagacttgtcaatccctaagtctatgttaaggaatccaacccgttagtctgtataaatcaacaaatgcttgctttatcaagtttgtctttaatggttcataacaatcagtatttcaaagataaagatgtattttatgtaatcactaggagttctagctttgttagaagagttgtaaatttagagtttgtgatagtggagataataaacgccctttcttttacttagtcttatgtgataaaatccttttcgttgattacattggtggagacagaatagcatggggtgttgatactcataaatgactatgggagacttgaggaactgtgatagcattaacaaatagaaaagtcagagggtggagctggtgtcagagggaacattgtaaatttggtttgaaaagcagtacattttaaagttatctggtaggcagaagaaaatgtgagagtttatcttcaggacactattgatgctgaaaaaataagttgttatttgtctttttaaaaaagtgttgattgtgagaattttaggttgaatgagtttacagggagagcgatggggagatagaagaaaagaggagcagtactatggtttgaatgtttatgttccctctaaaattaatattgaaacttaaccccaagtacaatagtactaaaaggtggggcatttaggaggtaattaggccatgagggttccaccctcatggatgagattataaaggttgagggaatgaattcagtccctgtaggtcttctgctcttccaccaagtgaggacacagtgttcattccctcttacctttcagactcttttagacggagtctcgcactgtcatccaggctggagtgcagtggcaccatcttggctcactacaacaaccaccatctcctgggtcaagtgattctcctgcctcagcctcccgagtaactgggattacagccatgcatcaccacacctggctaattttgtatttttagtagagatggggtttcaccatgttggccaggctggtctcaaactcctgacctccagtgatccatgcacctcagcctcccaaagtgctaggattaaaggcatgagccaccgctcctggcctacccttcagactcttgtgccatgtgaagacagagccttcaaggcatcatcttggaagcagagactggggccctcaccagacactgaacctgctggtattttgaacttggactacccagcccttagaactgtgagaaataaatttccattgtttataaattaccctgttggcagtattttgttatatcagcacaaatcgaccaagagaggcagggatacagttttgggtaaagatatatttagaagagcaagaattaggaaaagcaaaaacagtgttcaaaggagagaaggaagaaacaagaaagcaactgcagagcagacaagtgataagcgtttctcaaaagtgggagccagaagagtagtcaaaaaagcaagaaacttcccttctcacttcatttcattcatttcatcttccattgctgataccctttcttccagttgatcgcatcggctcctgaggcttctgcattcttcacgtagttctcgagccttggttttcagctccatcagctcctttaagcacttctctgtattggtgattttagttataaattcttctaaaattttttcaaagttttcaacttctttgcctttggtttgaaagctggaggcatcacactacctgacttcaaactatactacaaggctacagtaaccaaaacagcatggtactggtaccaaaacagagatatagatcaatggaacagaacagagccctcagaaataatgccccatatctacaactatctgatctttgacaaacctgagaaaaacaagcaatggggaaaggattccctatttaataaatggtgctgggaaaattggctagccatatgtagaaagctgaaactggatcccttccttacaccttatacaaaaatcaattcaagatggattaaagacttaaacgttagacctaaaaccataaaaaccctagaagaaaacctaggcattaccattcaggacataggcatgggcaaggacttcatgtctaaaacaccaaaagcaatggcaacaaaagccaaaattgacaaatgggatctaaataaactaaagagcttctgcacagcaaaagaaactaccatcagagtgaacaggtaacctacaaaatgggagaaaattttcgcatcctactcatctgaaaaagggctaatatccagaatctacaatgaactcaaacaaatttacaagaaaaaaacaaacaaccccatcaaaaagtgggcgaaggacatgaacagacatttctcaaaagaagacatttatgcagccaaaaaacacatgaaaaaatgctcatcatcactggccatcagagaaatgcaaatcaaaaccacaatgagataccatctcacagcagttagaatggcaatcgttaaaaagtcaggaaacaacaggtgctggagaggatgtggagaaataggaacacctttaccctgttggtgggactgtaaactagttcaaccattgtggaagtcagtgtggcgattcctcagggatctagaactagaaataccatttgacccagccatcccattactgggtatatacccaaaggactataaatcatgctgctataaagacacatgcacacgtatgtttattgcggcattattcacaatagcaaagacttggaaccaactcaaatgtccaataatgatagactggattaagaaaatgtggcacatatacaccatggaatactatgcagccataaaaaatgatgagttcatgtcctttgtggggacatggatgaaattggaaatcatcattctcagcaaactatcgcaagaacaaaaaaccaaacaccgcatattctcactcataggtgggaattgaacatgagatcacatggacacaggaaggggaacatcacgctctggggactgttgtggggttgggggaggaggtagggatagtattgggagatatacccaatgctagatgacgagttaatgggtgcagtgcaccagcatggcacatgtatacatatgtaactaacctgcacaatgtgcacatgtaccctaaaacttaaagtataataataaaataaaataaaaaatcatcgaaccattattgcctcacagtaaggctgactaataagagaaaaggtgtacaaatttatttaaccgtgtgcatggggagaatcacagagtgattacccaatttaaaaaataaataaataaaaataaaaataaaatagcctttgcaactaaaaaaaaaagcaagaaagataagaattatgtgtattcttcaaccataaaaaggaaagaatttcaaaaaggaagaggtcaacagtataaaaatccacggctctctaaccccgtattcttttcaattcttggtataacaagcccagcatccttcctgctattttgctgctctttgcttattagccacgaccttgagaatcctggaacaatcttttggatttaatctaatggtgatgcaatttcgtttcttaccttgatggtggaaatagaatgtgagtagagctggtgtggggtgcactggtgagaagtcctgtctctttttccctttgggttttcatttccccaggttttatttaagtcattgccaggaccctagaaagcaatttaaatgtaattatttatttgcagtgataggtgtttgcaattaatagtggacaaaagaattgtggtgaaaaagacttgcagacgtaatgagtagccttctttccctgcttcttaacatatgctatctaggcacattggtaacaaacacctaaattatattggaagctaattttccacatttaaatggcataatataatttagggccaatgtaggcctaaaaacgttaggcttgacatttttccaagcagccttggtttgttttactggacaatgattacttggagtcaagatctgtactctgggtatattcattgctaatggggtgtcactgctgctaggccctctcagtggacagagctaggaaatgtatgagtgtttagtcacccatgcatatgtaatacttgcaattatctctgtatccatccgtgtttgtataaacatatggttcaatatatatatattaaactaaacatgaattcatactgtctgaagctaatccaatatcctagtgttcattctagcctcaatgccttgcttatttgtaactttgtaacgttctctgacagggagaaacctggcttccatgatctgccatttattctcttatttgttcaaccctaggacacatacaatgtaatttcagaattgttaacttgtgactctgtaaggaaaaaattaaccgaggagagtatgatccttaggtacagttcttttgtctttagccttatagttttcaatcaaaacatggttttcccaagtattttttttccttactttctcctccctccctcctttcttttcttttctcttcttttttttctttctttcttttctttcgcggattttaattttttatttatatttttgtttttgttttatttttgttttttgtttgtttgttttttgacagggtctcactctttcgccaaagctggagtgcagtggcatgatctcaactcactgcagccttgaccttccagactcaagggacctcagcctccagagttgctgggactacaggcacgtgccactacacccagctaatttttgaattttgtgtagagacagggtttctccatgttgcccaggctggtctcaaactcctgggctcaaacgacccacccctcaggctcccaaagtgctgggattaaaggagtgagccaccgtgcctgggcagttttccaaagtttaagtcacctcccaatcccttcagattgtttatatcatacattagtaacactgttagatttgtatgttagactctgttctagtctggaattccttggtatcctggttgatttttttttaatttgtatacattagagatcattttgtgtgatgtaaagttctatgggttttgacaaatgcttagagttatgtaaataccaccccagtttcaaatagaacattttttaaaagatctgtatctgaaatttatataaagagatttagattgtaaaaaatatgaaatagaaatgaaagccctgttctgtcttaaaccaaactcagtgtttggctaaactggcatgtaaaccagttctttctgacacctgcagtgaattaccataaacctcatggaggaggtagccttgaacagactcactgagagtggaactttagtctgtaatttttattttcagtcatctgtcgcaagataggcaaacttctaagaaacgtcccttgtattattacgtcaatcttaccagaggtttttaatttttttccagggccttgaatctctcgtattttctttttttctcctgcttccttaaataaaatccaaattccccagagaattttgtaaaattcccaatcttactgcagcttcctcttctgtctttctggtcctctctgttcaatatgcactgctcagtttccagacctgacaactttttgtctggtagcaaaaataatgcatgatcaatagtaaaattgtagaaagagtggatcaaggaaaccaggcacccagagataaatggctggatgtctagaaggaagcttgctggatcaaagggtatccaagttttcacagcctttacatcaccaaattgccctgcagaatggctctattaatttgcactctgccaacatagttaatgggctgtagtgtaattgtccatataccagcagtgtagaagtattccttttttactgcatccatgccaacatctattttttttatttttgataatggccattcttgataatatttgccataattcagtattgtcaagactaaggtggtatcacactgtagttttaatttgcatttctctaatcattagtgatgttgagcattttttcatatgcttgttggccatttgtgtatcttcttttgagaattgtctattcatgtccttagcccactttttgaggagattctttgtttttttctttaactatttcttaaccattttaatccttcatgtcattttgtccctcttctaattttgacccaactatggttttgccaaatactttttgactgccaggtgactgtggcttagattcattgttttgtaaataatataacttggctctctatgaataactgaatatctaaattcattacgcatcaattatttattaattcaaaatatatttactaagcacagtgtaaaacaaaaacaatccatcttttcaatgttattgatgaacacataaaatatatgtaaacattgataaagcataggctaaacttaaattgttacatataaaatctgtaacaaaagacaccgaagttttttgtcagcttgaagtatttgtccacagctatgtattcgacatatggcacatactcaataaatgtttttcatgtaagaaaaggtgcagctaaattactcatgtagttatgagcatcattcccagtagggatcgttagaaaaatgtttgaaatggaaatgacatctcaactggaccttgacacatgaaatcattctaaggcgaactgtttcctcttttccccatagaattttatttttaatctctatcatggccgttgtcttactatattttagcttatctcttcatatgcctatcgtttctgtagaatatgtagaatgcaagtttatcaattgttgttcatcttattaaatctttgtatccttaccataatgcattccttcaaatcatagatatttgttctagtcatgtttaagtaagctattatggattttttttatctttataaactctcgttcttcacaaaaaaagcattgcaatatttacatcataactttactgaagattttgcattcaaagtagatccattccttgaggatttttagagatttatttatttttgtcccagaaacaaaactataatcttacataatatttttcagtgattgtcttagtaacatgctctcaaaattttcaccctgaaggaagttactgaaatatcatttacaaatatagctggattttggaagatatttattttaaacgtccctccatacatacccatgcatttatggtacttcagtgttcaatgctaaattaacttgaacaacactttccatagggttatctaaagcaaccttcaaaaacggctgcattttgtatgttagacttaaaagaaagatgtgaaacgttacaagagcttatgtgtgtgttatcttttagtgaaaaattctagaatattttgctgctttccataccttatcactcatgcatatattctatgatcttacttcacttgtttggggcttcaaagaatttagaggtgggaaagggaagtgggttaatgaatgcctattctatcaggctaaatgttagatgctgggtgggcattgagagattaaaaagtccttgaagagtatataccctaatgaggaaaatagatagataaacagacaattacactacagcccattaactatgttggcagagtgcaaattaatagagccattctgcagggcaatttggtgatgtaaaggctgtgaaaacttggataccctttgatccagcaagcttccttctagacatccagccatttatctctgggtgcctggtttccttgatccactctttctacaattttactattgatcatgcattatttttgctaccagacaaaaagttgtcaggtctggaaactgagcagtgcatattgaacagagaggaccagaaagacagaagaggaagctgcagtaagattgggaattttacaaaattctctggggaatttggattttatttaaggaagcaggagaaaaaaagaaaatacgagagattcaaggccctggaaaaaaattaaaaaccactggtaagattgacataataatacaagggacgtttcttagaagtttgcctatcttgcgacagatgactgaaaataaaaattacaggctaaagttccactctcagtgagtctgttcaaggctacctcctccatgaggtttatggtaattcactgtaggtgtcagaaagaactggtttacatgccaatttagccaaacactgagtttggtttaagacagaacagggctttcatttctatttcatattttttacaatctaaatctctttatataaatttcagatacagatcttttaacagtaagtaaaatagaggaaaccaaaccaaaacaaaacaaaatgtgacccacataatgtgcttgaagagagatgagatttatgccggtgatgcaggtggttggtatattcagtaaatttgcttttagtcgtgagaaaatgtagagaaggcactgtgttttatttcatttaggagaacatatagaaggctctgcacagttattttaatttgaatgttattgaaatagttctgtgtgcatctcacaaaatgaataaaatattgaatttaagtataaaaattatggctatgccaaagttttggggttttaaattggcaaaagtattcacaactgtcattatcaacacattttattatgaaagtttctctggattttagaatatggtcttgttttggactttaaaatgtgtggttggaataattggaagactagaatggcaagattacattgttgaaaaggcccaaaaaatccaagctaggatactaggaacttagaaagagctttaaaaatcagtggtggtatgtgtaggattgccacaatttggttattcttggagaaaagatgctgagtggctgtccccagtgcagattctaatggctgtttcccactgtgttaagtcttgcagcataaaagccatttggaggtatcaggcttaaggtaaaaaacgaaaaaaaaaattattctgatcttgaaaattttggctatattgaagctttatgtagtctctgtccttttacctcttgttctgaatgatggctagcaaaacaagggtaaggtacactacccattcatattgaaactgacctgtccttcattgcataatgtctatgtgactttcggcctcttttaacattgatggacaggcatacaatgacgtttgtagatagtttgatgtccatacattgccattttgagcatctgtcattttttttttgtttttttttttttcatatttttaatcccaaaacgatattgctaataaagtttggaatagtgtacgtttgattctcaaacttcaattttagtcagtccattctgttaactgagaagaagaaattctatgattgattttaattttttttgttttgttttatgtggaatacatgcgtctaactggacctactatgtaaatatacacatggtacatgcattattcactttttttgtttaactcaatgataataagaatgtatgtttccaaagtggaagagtccaaatgtttagacactggattatctgtttagaattcagaaaccacagaaaatagattctaaacatatgcagtcatattttaaaatatgatgaacacaacaaagatacatgcataatctgaaatttatttagtttcaaaaagtcatttgagtcattaaatgtaataatatttttatttttaacatagcaataaaatgagaagaggagactaccaaagtaaaagggaacaataatgactgaaatttagcttgaataaatatagtcaagagtgatctcaaacatgacaattgattgtcatgtagctttggaacttaagtatatatctaaaaagtaattttaatacttattaatcaaattgttatttaattaataggaaattagaaaatcgaagactgaaagttactgaacacagagataacacccactagaattattcatgactgaatttgagatgattctgtcttacgtgttatatggtatttgcattggaacgtctcactaatactaatacctcttatcagtgcagatagctgcattgaccttagaagtaaagagataatttgggggaaattatagtaacacttcagtgatccctctaaatacatctttcactgtaacaaaagagcctctgtggggaattagtgacttcgtgccatgatttctgaatcgtgatacaaccttattgaatttatgaaggatgaggtcagaaagccagacatcacttctaggcttaataatcagtttggatttctcattgtgtagaagtaaacaaaaatgtagttgattccagaggtagcaaaattttatatctacaactaaaaatataatggacccataaatgaacataattagatctgaccaccaaatggcatcaggacattctgactacgggttgtggcttatggccagcagtccatctggggaccagtccatctggggtccactccatagcataagtcacatgacctgtgtaaagcagctgacagaaaaacaaaaccaagaatgccttgaaacatcttatattttatgaatgaatactaggaagtcctttttgtttttctgttctttggttttaggtatttcaaaatctgttaaacaggtgaggctgactagggaagccaacaaatatagcttgtgattttggacagttgtgtttccaagttgagggcacttttttgatcaacttccaatcatttataaagcaaaagatagtatccaattagcgcaaatttatgaagtttgttttatgttacatggggatatcataaagaagcatgtttttcattactgctgaatacagcctgtaagatatgcatagcctgatggtcatcgttcattcctacagatatgatgcctcttggcatatctcttaggtgaaagagtttcccttctggtaatgtcctagggaaaaaggtcacttgtgtccaggagattaaaaccaatattaacttctacaatatgtagaggacaggttagtcttggaaaacactttttaattatctgatcatgtggctagaatatgtaggctgataattagactaccttgctatctgaacaccagaaatctcccctgagcccaggctgagatacagtactttcttctcttagatgcttttggttataagttttttcctgaagttgacaggaacatgaaaactacacaacatttaatttttccttgaagaagtgcttatattttcagaacacatagtccctaattagagtaaattactcctgatggaataagcattctgcaaaagcaggaaagaaaccaaatttaatttcccagtgccatagggaggtcttgactattcaaaaactgtctctaaatcttaggaactatgctttcaagggctaaactaatagaactgagcaggaaataagcctgattagcattttgtaagtaattttgagcacaaaagatatatttacaataatagccaagacttatcatctgcaattgaacccaaacactagcaaaaagaaaaaagtaaactgaaaccattaaaatgacatcaaataaattatgatattcattttcttgtatacttcttatcactttttaattttaaaatatatggttgatatgtctagatcctaataaggggaatgggttagcattgatgtgggtggcttatgaaacatttatatactcactgctcacttgttcttaattcataatgcagctttctcaaggccctcactttaatacagcctgtcagttgctgctatctataatcaggaggcctggaggtatatatagtttttttccccaaacgattttaatgtataacctctggcttataacgcattattttgcatccttccacttggcaaagtgtgttagaagtgattctgaatgtggttggaaacacgtttatagtactcagcaaatgcaatctaataaccatattattcaccagttttggaaaggaaacaagtattttatggagctatggttatcatcaaaggaagaaaaaaccctttttaatagaattttaatatgggttttcccccatttatagcatgtactaggtatcactaagattacactgttacaggtgtctgtggtactttgtaatgaagctgaatttgtcaaagagaataagactttcattttccattgagcacctgttttcatcttgaattttcagaagcagtcagcgaaaagtcaaaggtttctttttattctggccccatggggaaagatttgccatttgatcagcacagtctgcttttctgtctctacttggagtttgctatggccatatggagtcactcctctgaacactgatctctgcctcttgcttttatctaagggtgatatgcaaaggtgtatttctaccaacaaaccacacatttcactgttttgaaggaaccagtaatgcagtgacattcataaagatacataccattctatagaatcattaaatcaaaaaaaaattctacgcaggaaaaaaaaatagatggcttttgcagagaaaccaaagcatgcagaaatcaagatggttacagtaaaaccagttatcacttcagtgcccaaagtgttttcacatatgctagctgtctgtctgacagaattaggaatctgaagattccagaggctgtgtcccaaatatttgctgtggttcctgatggtttctatgccaacagtagattattgtattgcgctggaactaatctctttcttctccaaaccactaggatgctttacacatcttctttgtggtacttaacactgtaggtttaccttaggtaatttcttgtagccatgcacaggttccttatcttaatagtctatcacagaggaaataagacagagtagctctcttgagggacttctgcatgcctttatataccttcaattacttgtttactgtaatcaataagtatttgtcgatggatgggtgactgggtttatggattcagttttgagtcaaaaacatatgcataggttgttacatcgagtgccttttgttgttatcgaaaggggcaccatcatgggatagtttttagatgaaaatttggaatgggggttaggacattttactttgctctttaagttcatctgtgtgtatgatttctatgcatgatatacatcagtaatttgtaccagactgcttgaatagcaagcatattacaaatgtgaatgtagttttctgttataaattttacttaatttttttttttttttttgcttagaaagttatatttttctgggagaaaaacttctcattcctttcctctgctacataattccccatgccttctagatttttttccagtgctaataatggagactcaatttcttgagtgctaagatatatttgccatagtttattatataaccagaaaaaataaaataatgtagaaagcttaaattattaatggggcatttgttttctgttaatcaaatttatctcatttaaccctgtaacactagcgagacatgtcaaaagatataaagaggagaaacaactaaaatatgaacctatcagtggaaatacaaaggtataatttttaaaaagctttaaaacataaaaatgatattaacaactttttaaaaaaatgcatgcccaagtggctatttgacaagtatactacactttcagtctaccctattactttaatgttcacagtgtatactgctatgtttattttatttttcaaagtatacctaaaaaagacatcagaaaaaagcaaattatgctgatgttattatgtttagtagtgttttatgctgtgagtcaactgccagcaaagatttttctcattttatttcaaacgtaggtgaggttgctttgtttggctttcattctgtgtatctctattaacatctgaacctcaggagaaattacctttaaattggctgttagaccttggccatgcaatatgctgactctccttcttcatagcccttcatccatcagagaaagatttgctcaatcaagtcccctctgcagaaacacagctctggtcaccagctgtttgaggcaatacattgaaacagttgaaagactctaagaatttggtctttatacaatttatttaaaatcaattgcttcttgaaaacatatacactttgttcattaaccatttatatacacacacactatgtacacacacacattctatacacactatatatacacatttacaatgtgtatagtgtatgtgtgcatacagtgtgtgtgtgtatgtatacatacacatgtatatataaatggtcaatgaacaaagtgtgtatgttttcaagtatagagatggcttagtatatctgtcatacacatactatatgtgtgtgtgtgtatatgtagtgtgtatgtgtatatatagtgtgtgtgtatattgtgtgtatagtgtgtgtatgggtgtatgtatagagtgtgagtatatagtgtatgcatgtgtgtatatatataaaaattgtcaattaacaaagtgtattgtatatgtttttaagaagtatagagatggcttagtatatctgtcatatacacgtgcacacacactatacatacacactatatatacacatgtacacactacacatacacacatatatggtgtgtatgtatagtgtatgtgtatgtatatgcacatatatagtgtgtgtatgtatattgtgtgtgtgggacagatatactaagccatccctataatttgaagaagcatatctgtaagtcacactcatatttggtctagagtgaacatggatatgggaagccccaacgaaagcattccaaaaatatttacagtgaaagttcctacctaacgggtagcaaagaaaatgacagcgctttgaaaatcagactgctatgttcttacatacccttttatgacttttctaaatactattcagtgagctcatatggatttaataatcaggaaagaagtagatattttgtcaatatggatctgaaatgggacactgcccacatgtgatctctgtgattctgtaaatgcttgtttgactattttaaatttattttgccacttagttatacaaattattaattagcagtaaaacacacaaaaagacacccataattgcaatcaatatttttttgcataacataacatactcttttatatatacataaccattatgtaatcacatgacataggtatagatatagatgccaagagacacacagataaatacaaaagaattcactcttctgtaatctgctttcttcactcaacaacatatcattaacctctttccatttctataaatcagaatctagaatgaatgatggctctgaaaatctgcagtgtttcactaaggagatgtgttcttcataagccactcagcctccccagcactctcataatcatgtgcaaacatgtgtgaacatatttatgattgtttagggaaaatttctaaatataaatttggaaatgcaaagtataaatatcaaaaatatgtgctgttaaaaagcatttaatgcatattgtcgtgttgtccttcagcaacaggtaagaaatacccaaatttttgccagtaataaccattaaatttttttttttttttttgagatggagtttttctctcatcgcccaggctggagtgcaatggcacaatctctgctcactgcaacctccacctcccaggctcaagcaattctcctgcctcagccttccgaatagctgggatcacaggtgcctgccaccacgcgtggctaatttttgtattttagtagagacagtgtttcaccatgttggccaggctgccctcaaactcctgacctcaggtgatccgcctcggcctcccaaggtgataggatttataggcatgatccaccgctcccggccattaaaatcttttgatttttgacagtttatcaaaaaagtagcctgatttaatttactttttaaaaaatcaccagcgatgcagaaatatctaaaacaatctattaatgcctctttcagttgtaatagaaaattaaaggaatacaggcctgggattacagacatgagccacgtgccagccaacaaggatgttatttaaccctcttgtgttcaagttgtccaatcagcattaaattcacctaatattactgttattcagctaatgtttcttccactcacccacaaggatttcctgatacacattatcaaatgccatgttgaagtcagtttcaggtggaaaaaggattcaacacaaaaatcagaagatctgagctttcctctctcttccactgtcactggctgtttaatttccctattgagattcggttgtcatctctaaaatatcagacttctcttaattaatttttttcatctttcaattttagcagtagaacacttcaatctattttccaaagcccgtgataacactcttccacaaaaaacagttttcaataaccattatccaaggcctctcaccttttcctcaattaagaacaccggtccacatgcagctcatgtaaatatcagatgctttagacaggaagacaaactccatgatggcacttacttggtgccctagacagaaagggaagtgcaacacataccctgtggtcactatgatgatactacctctttagtaataaattgattaattttttttgtttcttctggaaaactaaattattgctgcatatgtttttccccagatttctggatttggggtgccctttaggaattcctgcctggtcttaactctaacatgctgcttagtcccaggacataaatttcaattctgtgaatattacaatctgtagttacttcagcctgtgaaataattttaaaagagaagttctacacttgtttttactattggctttgtcatgggattaaggtgtatatggccttccaaggtgatggtttatacagggcatttattttgctgaattattaacctattattttgtaagctatttatagttgaagttcatacatctcattatgttcatcagactacttattttccacatatgcattgcaaaccaaaaaaaaataagcatgtaagaaaaataaatgtatgctatgtatttatggatagctgagtgacacaatttcaatcacaattggagtaacattgttccatgctttatttaatatttactcatagctccaagtttgtttggccattgactcttattcagagaagattgtcggttgtggtttcccccagcctgagcaccttaactaacagatttgtagctgttaatcaaattcattgcagtttcataggttgggaaaggaaaatggccatcaaaggtcaccaatttatattaatgcaataggatttgggaatacacataaaaattcaaattgagcctctgtgttttttttaacaactagtatgtaaaatgatgtgttatcttggttttccatttgaactcccacttttgatttatgataatattattctgaaatacgtatttctcaaccattttttagtaacattttaaagttactgaatgcatatagagtggtttataactttcttaatgttgagagaaagccactttctcttttaagacgtatcctcccacaccaacgtcttacagcaaatatatatattttcacctctaagtccatatatgtctatatatatattttcacctctaagtccatatatgtctatatatatattttcacctctaagtccatatatgtctatatatattttttcacctctaagtccatatatatgtgtgtgtgtgtgtatgtatgtgtgtgtgtgtatatatatatatatatatatatatatatatatatatatatatgtaactgttcacacaagaatttatagtatgaaccctgcatgaatttgagtctgtgctgggcaatcatctgtcaggatttatgaggtaaataagttacagaaatagaggcacattacaaacataatgattcctctaggagtcacttcattctggctatcaatgtggttagactaaataactctttaaattaaatggaagccttgcttgggaattgattcaagtaaaaagaagcaacagaaaattcatttttagtatttttcttcctttggtatttcttcacaccccatctcaccatcatctattttaaggcaagtgcatttatgtaaacctcaatattttccagtgttgtttatatcagacaatatcttgtttttgttattttaatgaaactgcattatgaatcagaacatgacatgccacttaatgttatggaaaagtaacctgctattactgttctgcaagaaataattctctgttacaacataaccacccacaggtatgatctgatggatggattcaggtttgatttttgtgcccaaacttttaaaatcttaccagaatctttaagagatacagagtagaatgatggttaccagagggtgggaagagcagtggagatgggggaatacagcggggttggtttaagggtacaaaagtccagttagatagaacagaatgaacacaatctagtgtttggtagcttaatagggtgactataattaacaataacttagtgtatatttaaaaataactacaggcatagaattggaacattcctaacacaaagaaatgataaatgcttgaggtgatagctaccctaattgccctgatgtgatcattacacattgtatgcttgtatcaaaacatcacatgtaccccgataaatacgtacagctattatgtggccataaaaattaactatgatatgctttaagacagctttcagggaaggaaatatttcccattaaacttatgaaacacattttcccctcaatagacatggataaatattctacagtagaaaaaaaatgtttaagccgtacagacgttttttcacctctaagtccttatagaaataatccccatataagtagagttttaagtaaaacataagacaccacatttttaacctccaaaattcttttagattcagaccatttctggctagtttgtaaaatcagatgactcgtataaacttcagcaagcaagaagggaaaaatgatagtctctcaaactttcaaaaaattgttttttgtccagaaatggataaaagatgtgtagcagaaaatgtagtttaatacgtaaatgttatatttcagaagcaggataacgattacctatacacaaaattatcatttaagttgaattttaaataaggcagacagactaatgtattaatattttctcttttaaacttttgagttgattttgaaagaaacaaaatatatgtttcctgttagcctcttactctcgcatcaggttcatttcatgtgactatcacctggcttagccatctttttaaatcaacagaaaaactgagaattttccgtgaatcctggaaacaccaagagaaacaaaataaaaatagagagatgtaaaacacctgtgggcgtctgcatctaccttgaacttttatttatagctcataatcaactattgagacctcagagtgaggctggatagaatgtgggtttaaacctcattattctttttttttttttttaacattttcttattgtaaaggattattttctcaagtattagctatgtgtgtgtgtattttcagccaaattatgtttttttattttaaaaaaagcatacataggagcttaaaaaataaagtggacctcatgaagtcagagagattggtggttaccagaggccgtgaaatgtggcagggaggagagtgatgaagaaaggttgattaatggatacaaataaacagttaaatagaagaaggaagacctggtacccaatagatcagtaaggtggctatagttagtattcactgactatacatttcaaaatagttaggagagaataattcaaatgtgtgtgtcaaattttttttaatcagaaagagaagataagcgtctaaggtgttggagagtccagttaccctgatttgattatgtgaatgtatcaaattatcacatgtaccacaaaatgtgtgtaccaataataaagaaaaatcaaatgaaacaattcaacatctttaaaaagcacacaaaaatttaaaatgtaactacagcatataccaattaataaatgacttaaaaaactagcctcttcagattcaccatataattttacatatatctttcacttaaatattgaaagcatacatccatgtgccccagatatatgacataccttcttaaatggtggcacattcagcataggccccttcaacattgaaaacaatctgctatgagacactagtcttctgtcccccccatctgttaaaaatcacccaccaggagtgaatgacttaactgtcagatgactatatgtggtacataagtgatatcctcaaaaagtgcctaataggctaccttgtaaaaaattcactcattctctttttaatgtatttattagttcacatatttcactacactttcccaattccctatatctatcctcgctttgctttcagtcatatcatctaaaactttagtatatttttcacaaaaatgtgaggaatacaagaagcataaacagcaagatggcagctgggggaggtttttctaccatcagaaaatattgtttattaatttactgtaatttaaaacatacagttgagccatcagactgtctttcttgacctctacaattgaagcaattatgtgaatatttggagattagtgactggcttattggatcatatggtcatattaatggtcctaataacgatccaagtttgagttcagagtgtccatttattcattcggccatcactggccttattggtcaccgtattgacaccataatggtgcaataaatacggcattgaggaaagaaacacagttcctgcctctgtgggctcacattctagaataaatagacataagcaaataatgatgaatgtaatcattttcagacaggaaaatgccatgccatagggaagtatataagagtcaggaagccacagttgccttggtgatgtttacttgaaggccacatggatgaaactgtgcatgaagcctattgttgtttaaagcatgaaatggaatctagtcctgtacctaagcagattaatcagcggactgtaacatttgatttaggagactctgaagccagcagcatatcaaaccaatttccaaagcttatataatttttccaagtaaccatattgtgtttgtttttttgttgttaaggcagttaaatctcttgtctaaatattatcagagggacattttcctcagctaaaaaccaatgaaattgaataagttgtgaagaaatatggccaagttttatgtaagaaagagtgggattaggcaggacagatgtcacagagcacagcttaggaagggcaagcccaggtgagccccaggaagagcaaagcaagcattgcttggagtgaaagaagtttctgcagtgaacactacactttaacatttctggacacagcagatttgggatatataaaaatattatatataaatatatatatatatatatatatatatacacacacatatatatacatacatcccagatatatagctttgcttttaatctccaatacccatcttctagtttatcaacaccagtgtttcccagacgtaaaaatgtgctttaatgacttatgtgctttcatgacttctgggcaaccactcagatttattccttcactgtcagttattcggccatttaatcattctttctttcattcaacacataatcttgaccattaaatattcactgtgtttagtgctgtgcaaaaagcacttcataggatccctaacgtggagcttgcctactggtagacaaataagatatgtttgacaagggagttaagtaattgtataggtcagttaaaaaagattaactcagatttagtggctaagatcagcgtaagttggagtggtcaaaaacaaaagtggaaccagagtgaaacttaagcagagtcttgaaggatgggtaagaagacatagttggatgaaggaaaaaaaaaaaaagaggaaattccatggggggagagacatttgcagtgaaacttgagtctggtatagccaggaagcagggacatcagcaatatggtatatattacctggaatatgttagatgtttaatgaaagaatgaatcaatgcatatacatacacaggaactggaaggaaatttggaaagggaaatggttggcagtacaattttaatgaagaagcactcgtaaacgacatgattgacagagagctataccataataaaaaggcctgaagaggttatttcgcatttgatccaaaacaaccagttttcatctgccatcaattttacttgtgtctgtcaaggcctttgaggaaattgaaaaatcatgttatttatctagtgaatataaatattaggacaacatgttttaattaaggaatgttgatcaggcaattgtgctttaaaaacatgtttccgattatatggaagttacaggttaatcaagtagtttggaaaataatacattagataattatgcaggttaaatcatattgtcaagtctctcccagccacactaatgcatcacttttacttctgaaaataatttgtggactcaaacaaaatttctcagtttcatccttcaactatgagtgtgagatagctgatgaaattcgtgtcctaaatctctcttcattttgccggactatctgtatgatttaagcacttgcttgttttttttaagtgacttaagaatcttcagcattcaaataaaaattattaatccattaactctcagacctaaagagaatgaatggcttcatgaatcataattcagtcttctagtttggggcacataaaaaaagccaaacattcagttggcctcttccatatctagctgatttgctttagtgattcatttttcattttcctcacaattagactcaaatttctgggctgactttctaattttgagtctctaaagttgtaaattctgtagccatagaacaaaaatgacatagaaacacaaggtaacacaattgtatctttgaatgaaaacatacatatgttgtcttgaccccgttaccattttacaactcttacataaagaaatcaccagatgtttaaaaaatagaacgctgatgaatcttttgttcttccctaacctttatgtttttctgctgcagttttatctcagtaagagttatgctcatagcttacttattcaaaagtattatgcttattttcctcacaaagattttgttaacagaaggtttctttacatagtatttggaaaaatttggatactctatgaagaagaatgcagtagaggtatgagtacagaaaataatcatgagcaaataaagatgatgtgtgaaaaaataaataaaaaattttaaaaattcactgtaagctggattgcagttagcaaagcatcagagaagaatttctgtggagaaattgtaaatattattttaagggaagaaagttccgtatgacacagttgttttctgttagatgaggcccagctgttctatccagttcttggtcacagctaatggaaaaaactcattctgatcattttctaaaattcctactctaaatatgtactcacgaaagtaaagaaatatactttcctgaaatagaggtctgtgcagactttttatattcatatttgcagttttaaaaacgatgatcaattgactaaatgtccagcaaagacttagacatggttgataaggatctcaatatatatactgatttctctgcttagaagttcatctttcaaattatgcaaaatatatactctactgcagaaaaactaatactagtattgtttctttgtaaaatatggcaagcaaaataaataaaaatccatgtatttctaaatatttcttcatctggatatttacaagtatttgtattatacttttattcttatggccacacctcactacttttttttgtgtgtgaaccgaagtgactttcataatgttatgaaaagttattaaggggcagaaactagaacaaaaaccttgaaaagactcccgtttaaaaaatatttttcagtatttttaatactgattttgttctgaaaccaattgtttgaaaattctgaatcaactggatgaaaactgggtagagtacagatccctttaacagatcaaacaagacataactctttaaaaagattttaaaggctgggcacggtggttcacgcctgtaatcccagcactttggaaggcagaggtaggtggatcatgaggtcagcaatttgagaccagcctgaccaacatggtgaaaacccatctctactaaaaatacaaaaagtagccgggcgtggtagtgcgtgcctttaatcccagctactcaggaggctgaggcaggaaaatcacttgaaccctggaagtggaggttgcagtgagctgagatcacgccactgcactccatcctgggccacagagtgagattccattaaaaaaaaaaaaaaaaaaaacttttaaagtgttttcattgacacataataattatacatatgtatgaagtacagtgtgttttgatacatttatattttgtgtaaaaatcaaatcagggcaatttagcatatctataaattatacatttataatttccttgtgatgagaacattcaaaattctctcttttagctattttaaaatgtacaattacagtattgttttccatagtcatcctactgtgtgacagaacactggaacttatccctccagcctaactgtaactttgcacccattgaccagtctctccccattccccttcccctctcccctcctcagcctctgttctactctacttcatgagaacagcttccttagattccacatatgagtgagatcatgtgacatttgtctttctgtgcctactttatttcatttaccataatgtcctctaagttcatccacctttctgtagataacaggatttcattcatttttaatggctgaatggtatctcattgtgtatatataccatatcttctttactcattcatccattggtggacagacacttcggttgattccttatcttgactattgtgaatagtgtcacaataaacatggaggtacaggtatctctcacacttattgcccttcctttagatctatagccagtagtgagattgctggatcatacggtaattctgtttttaattttttgaggaaacgtcatcctgttttctataatggctgtactaatttatattcccgctaacagtttccctttctccacatctccaccagcacttgttaattttgtctttttgagaatagtcaatctaacaggtgtttcattgtggttttcatttgcattttgctgatgattagtgatgttccgcattttttcataaaactgttacacatttgtgtgtcttcttttgagaaatatctttctgggtctttgctgatttttaaattggattattggaggttttttgctattgagttgataacgcagacataaatccatgcacttatagcctactggtttcaacaaaagtgccaagaacatacaatggagaaaggacagtgtattcaataaattgtgctgcaaaaactggatattcacacaggtagaccccatctctcaccatatacaaaaatcaacgcataatggattaaagacttaaatataagacgtgaaacaataaaactaccagaagaaaacacaggggaaatgctacatgacattggtctgggcaaggtttttttggatacagaccccaaaagcacaggcaacaaaagcaaaaggagataaatggagttacatacatcaaagtaagatgtagccctttgactgttctttttcaacggcctgaacaggttccattttcttttcacttcctgcagtaacttcatggtttagaccaatattgttacttttacttgatctttataaccagtaatttttctccttcagtttttccaaaactttatttcctcatattcttaccttgctgcagaactttcaaagatatccatccaacttcttgcagtggggtcaagtgcaaattatttctacttttcttaatgctcttacatttaaaaatgtgttttgcattttttttccatatctttgctcagactatatattgtagcataaactttaagagcatgaaagatctgtgtttaaattcctattcttccacaggacaaatgacttaatggagcctgtgctgcttatctgtaaaattggagattatcaatacaaacaatatgttgtggggattcatggagatgatgcatataaagtccttaggacagaggttgggacctaagaagtttttctcaagtagtagcttctgtatgccgtctagtctccccaccccgccccaactgtttttaaaatcctactcatctttcagaacaagttcatttcccacattctctgtgaccctttatgtgatcagttattagtgccactcatttggcttgtatgttgtctttccctgtgtgtagtatcatccccccagcgaaatcacaaagaagaacatgtcctgtcctttaacactgtgtcttgcacattttgtgttgattaatagattaaagtgatacctgtcataacagtttttcagggttgtccaagcagagaatatggatgacaacaggctgcccaaacagctgttacaggatgaggttaagtgcagtgaccacaggaggtttatacaaactacctcagaaaatggagcacagccacagaatcctgggctgtcaccacgtctggcagattacagtgctgtgcagtaagcagaaatgggacatctcattttaaacaaatactttgggtagattatgaggttcaagagtagaactgtagacaaaaacaagccttacaaatcgcaactgcagctgcaaaggaaaagatgcatctttatgagaacctattgtaggaagacatgcaggttacaaatccatctttagcgacatttacacccccaagagctctagcattagtaatgttatcatccactaggattataatatagtgtgcaatgatagcctgttatgatctgtcagaagtggaaaaacttaacttttatttttagagcagtccagtaaaaatgttaacactctctgggaccaccagcctgagcaatatagaaaaacccgtctctagaaaaaataaaaaaattaacccagcatgttgatgcatgcctattgtcccagctactagggaggctgaactggaaggatcacaagccagggaggttgaggctgcactgagccatgagcatgccactgcactccagcctgggtgacagagtgaggctgtgtctcaaaaacaaaattaaatataaatgtgatctctactttttttaaaatttattattgttatactttaagttttagggtacgtgtgcacaatgtgcaggttacttacatatgtatacatgtgccatgctggtgtgctgcacccactaactcgtcatctagcattaggtatatctcccaatgctatcccttccccctccccccaccccacaacagtccccagagtgtgatgttccccttcctgtgtccatgtgttctcattgttcaattcccacctaagagtgagaatatgtggtgtttggttttttgttcttgcaaatttatgttagcttttctaagcattctctcttttttttttttttttgaaagggggtgctttccagattgagggaaactttctttgtattttccctcatgttcattttagaataagtagggatgattatttatttagaaactgcattgtatggtgggaaaaaagcaccttaatgctgaaattcagagggaattggattcaaatcatagctttgtctcttactctatattcttggataagtagtttaaccttagtaaaccgctctgtgaatcctcacaggaaggtttcagtgctacacaaaaaatgctcagaattatgcctaacctatatgaggcactcaagaaaggtagctattattatatttgactaataagaagttagttaattttgcagccagtcatattgtttaaaaggctggcacaagttacaatttcctgtaattgtcttagaaaccacacctttctaaataggaatgggtatgctctcaggtcaaatgccttatttgttcaacttgcatctatctgattctgcataaagtatttggctgatcagaacagtcaggaggatagaagctaatttaatcaataaatatgttttggaattttgttttacaacaccagagtctggcaaaagcaaataaattgctttctctctttgggattaggtgagaataatccaatttgaaggatcaggttttaattacctaatgaatgaatcctgctaggagttctgaatttcatgtttggtcaagattgacaatgatgaaataagcagaaaaacccaggcaaagagaaaaatagtgaaagcctgagataaagtatgaagaaggtatgtgaacaatatcacccatgaatggtggtgctacaagtcatggtttatttctctgaaaggttatctgaaaattaaaaatcaatgaatcttagaataaatactgactttgagtatctgtaacatgttgcattagaaatcttaggttggaggcaacagaaaccaaatttgttcacttcaacaggcaaagggggaatgtattataaggatgcagggggtgtctcagaacctcagtgcaagagtgcagtctggctcctggacccacaaaaagtttgtctttctctctcattctctctctctctgtaggtcaacttcatccttttacccttggttttggcaaatcatcttcatcaattactcagttcacctactaaaaatggccatagctctagattttgcatcttctcttaccaagagaccagccctcactgtaattgaaaccttccagtcccaattccaaactctcagagaaggaaccccaaaaggttcactgcatatactgaacagcttattatagttgggaatcaaatgataatgctgaaataaatgctcatgacagtgtcttacaaagagtcattcattttcaagcatgttacccaatggtccaaaatccaatgctcattgagataccactaagattatcattatacatgacacaaaactttccattgataataccattttgtattgaatattgtgttatcagatacttaaggcaactgagtcaccatcttgatgtctttatatagaaaagcattcaaatgaaattcagaggtaagaaatacaaaatgtagagggagaggaggtgtattcaaatgacgtttatatccccagcaccaactgtcatttccctttaggtatctttgctcctctgcagagcattctcagcttaatagctctaagatactcagctgtgaacacaaagggggataaaactctgaatgaaaaagatgaaggattctttggtagctcttacaaactgaaagaactgagtctaacaaggaatttgttttgttaactagtagatacatatatattctctccactccccttttagtcactagttaatgttttttgaatgcctgtcaaaaatttacattcaaagatgtaaacatgtggagataagaactagagttaacttttcaaattgtgtcacagtgatctgatgagactagagataggagaaacttagtaaaaagaaataattcattttgtaagaaaataaaaatctacaagtttcttgtgggaaatttatgtttgaaatgataaataagatctacaatccttcaattattgaaaataaatacctccaaaaagaaatgtgtctgcagacctgctataatccttttcttatgtatatcccttaataataaaatttaacaaccaaaaatccacttattattctaataatccactgacttagcaatcttgatgacataatgtggtgcaaaaataaaattttctcttccattttcaatgggatacattatagttttattcaaattgttgtcttgttctagttttccacctaacattaaagacacttgacctgtacttcttgttattttatttttaaataattgataaacgatctgtattccttaatcacttatttttaaagtacagttttgtgaccgattgtttttaataactgtctgcagacagatctatggttggaatcttcctttatcaaataatacttggatactactaaaatttttaaactcttattaacatttataggtgaagaagtggacagagattaataattagtttaaggatacccagccagacagaggtgcgaccagaccaagtcagatctctgaagctgtgactctatttagtagttttatcagactaataaaacgagttaaatttacttgccttcgataatcagcatcaaaattaagaaacaatttgctgtttaatcatattagttatacagtttttgtcttagtaattgtcactacctatattgtatatgtatttattaactttgtctcctttccattagaataaaatttatgcaaaggcaagcacctgagtgtcctctttacctgtctattggtatgacaggaattccttcttaaatgtaagtttatgggaattatgatgtctttactgccttacagaaaaaacaaaaatatattaaaatctttgatgggagacaggaagtggctatagagaatgaaaaatataaattaaaaaaggagagagagagagtgaatcttatgacccaagattttctccataaaaattagccagttgaaagttttatcacagcagtttgtagccacatagatttctgcctaaaggtaaaggcagattaaccaagtgtgagcaacagttcaaccaataactcagattaaaagagaaaggaataaattgcagacttcataaatattttaagtatgtcaaggtcagataaggacaagagtctgaatagaaatgattttcaaagtctgtgaatagttgtgatactatgtgattagagcacaaatgagtccacctactgtattttggaaatgacaggtcatgtactgactaaactgcagaattcccagatgatttggtaaataaatctcctaaagccagtgcgaaatcaagcaactagagtggcagggttttccctttgtgtttgtagcatttacacttgtttgtgtttgcagtaatacaacaatgatgatgacttagatggtgatcctaattctctccttctaagaccttgtcagtggctgttaggtgggggaaggagtaacaaatgctgcctcaaatttgacttacctaactcattttcctgtatggctccagagaatgtgaccctctcagaaattctctcctgcgactctcaggctttattcctccatttctttctactccagctttcttactgtttcttgaacaattcaaccttttcctgccttgcctttgtgcttcctagtcccactgtctgagatgttctctttgctgagaccactagctggctgattccatcttgtccttctggtatctgtttaaatgtcacctggctagaggaggcttcctgactctgctgtgtaagatagattacccactcccttctcatcactctctaacctcttctcttgctttggtgtttgtcttagcaattgtcactacctatattgtatatatatttattatctttctgtcttttacactagaataaaagttatgcaaaggcaagcacctgagtgtcttctttacctatttccgtagcctataactgtgcctggcatacaatcaatatcttccaaataaatgagtgatacttgtggttttggcaaaatatacaggtacggacaacttcaatttctctaggagccttctgcaagtaaatgcttgaatcatacaaaaacacactctattcaaagtaaaacataaattataatattgatcctgattagaaagcctattattgagtgtttagccaggatgagttatatcattttcgtgaaatattacataaactcgttaagtgaagaaaataagaaaaacataaagaagaacaaaatgaaaggcaggatatagcactgcacatattagtatcacacacacatacacaaatggtaactatcaaaaaaaaagaaaagtctcaagggaaattactctggaaaaagaaacgtgaaaactgtgagtaacaaatgggaatttccagccaagccagttatcacaataaaagttcactgttatccttctatctgatcaagccctgtttgaagttgctgacccctcttaaggagatcctagttattggcaccagcccctttaatttgacccatgattgggtactcagatatattgaatggaagcagaaggattttaggaaaaaaaaaatcataaagtcatatttcttaacctttatttgagaagcaattataaagttacttttcgcactatattctgatgctttccagttttcattttccaaaaagatatttttcgatttatatataatttatctccctcctcttccttctcccttcctgcctccctcctctgctctcaggttccatccaatcaacaacgtagattcctccacctccccgctcctacccaccccagggccagggtacagtagcttttattgaactttctatgggttagttttgagaggaattcaggggaagaatcaatgacaaaactctaagaatttacagctcgtgtgtttgtgtgtgtgtgtgtgtgtctttgtggctgtgtgatatggtttggctgtgttcccacccaaatatcatcttgaattgtagctcccacaattcctacgtgtcatgcatggaagggacctggtgggaggttattaaatcatgggggtgggtctttcccatgctgttcttatgatagtgaataagtctcacaattataaagcagagtttccctgcaccagctatctttctcttgcccaccaccatgtgagaagtccctttgcttttccttcatcttccaccatgattgtgaggcctccccagccacatggaatgtgagaccattaaacctctttcctttataaattatctagtctcagatatatctttattagcagcatgagaactaatacaatgtgtgtgtggcggggggtgggtgtgtgtttggagatgtattgcagtggagggagtgattgagagatagatccaatggagtatttacctcacctctagggaaatcacttggtatatttttatccacggtttatcaccactggcccagatactagattggcctcattggctaattcagtgtggtgttccaaaacagctcagtcaatggaagatataaaatacctcaaagttctagaatatgtatgaagcatcaggaaagggagggattcagcctcctaaaagccttgcccccaacccttaatccagtcaaccattaaatacatcaccaaccctgacagtatcagaaaattctaatgaattattcagaatatttatttgttttcaggtaagacaagctcagtttcacagacagtatggaagcctcaaaggaacccccatagtactgtagatcacagttctcataacagagagcaatatatcaattaccagctgcagcaattcagcactgtgctgtatcctcgaatactgcatgtactcagacctggctttctttgaaatcagaatccaatattgtctctgagagatgatttaatagagagtgtgaagatgctctatttcaaactcaaatatcttttaaacttttaatgaaaggtataaagaagtggtagatgggaaatcttaattaaattctatacaaagaggaacagagtttagagaggcattcacaggcaaagtcataatgaccagaaaagagatctgatggaatttctttactagagaatctatttgtcaacctcaggtctcatatatgtatctgccagacctaacaaggaccgacaagagatagctataccttaagaaaatggaaggactgaccaaggaaatagattaagtcactgattcagtgtccacagaaactttatagaacgtaactaccatgaataaagataattgactgtgtgtgtgtgtgtgtgtgtgtgtgtgtgtatttccttaaatctttttccttggtcaatcacaaggatatgtagtcataattacaaggatgtgaggcatgatattgagatataaacagggacaatagcagcctggaagcactgcatggcagtgttgggaaaacttcctactaaggcttgaaggatgccttgcagctcaaccaaaaaaggaaagggcagacatgggcttagttatcacaaagttctagattcggatcaagatttactaaccgtttgaccttgggcgtattgcttaaccattatgactgtttccccacttgtaaaatggaagtgataatgtgtatctttcagtgttgttataaaaattcaatgagaagtttgtaagttaatggagtaaatgtctagcttattaactggttggttactggtagaagcgatataagtggttactgatattaactaataggtttgggtcaaatgagaacagtatgcagaaaggcatagtggtgtgaagtgtaatgtacaagtgatttcatacagctgagtgcagagagcaattgagggagtgatgggagatactgcaggaagagaagcatcatccagatgacagagactagaacttagcctgtgacactaagcatgagagctttatcctgtagtgcagagacagcccgtgaatgatttgtttgttaattacaatgggatccattcttaggcttgcattaagcctcattctgaaaatatatgggtatatgaaaatattctaccattattctttaccatatcagaagcacttttcctccaattagttcaaactagtgatgttttgcttggaatgtttatatccaagcatttacacattggcttctttcaaaattactttctttccagctctaaatactctcatgattccagaagataaaatacaattaatggccttttctgttttctccaaaaacatatttttaattcttgttcatgatagggtgtattaatttcctacagcggctgtaccaagttatcacaaattgggtggctcaaaacaagacaaattcggccgggtgcagtggctcacgcctgtaatcccagcaatttgggaggccaaggcgggcggatcacaaggtcaggagatcgagaccatcctggctaacacggtgaaaccccatctctactaaaaatacaaaaaattagcctggtgtggtggcgggcgcctgtagtcccagctactcgggaggctgaggcaggagaatggcgtgaacccaggaggcagagcttgcagtgagccgagattgcgccactgcactccagcctgggcgacagatagagactccgtctcaaaaaaaacaaaacaaaacaaaacaagacaaattctattctcctgcagttctagaggccagaagtctgaaataaagggctgtttgcttctggaggcactgaaagagaatctaagtccctacctgccagtgactgggttatccttgtctttccttggctttgtagttgtatcactttagtctctacctcagtcctcacagaaccttctttcccatgtgtctctgtgtcgattcttcttctcctttctcctataaagacaccagttattgtatttagagcccacactatttcaatatgacctcattctgagatccttaatttatggacttcagcaaagaccttctgtctaagtaaagtcatgttcacagatgtcaggggttaggactcggacatatcattttgggggacactattcaacctacatagagaatgaattgaaacatgattaagaatctctttttacatgtttcagttatcctgctgtatgtctgctgtatgtctctgctctgttgaaaaggccaaaggcgaggaatgtgccggaagatggtgtttgttgaacagcccttggtctcactccctttgcacagaggccttggctttattatgcccctcaaggaaaaagactagcttcacctgagaaaggatgttggtggtcacttctatgcaaaatacagcaagagaaacacatcctttgcaaatcctggaccaatttgagaacagcttcactctcacaatgttggttttttgttttgttttgttttgttttctataatgtttttggaaatccatctttaaatttagccattttctctcatagcatttgctttttgtctggaaattggaactccaatttctgttactgaaggtttccagtatttcctctttaacaaaatttcatgtgggaattaaactattgtgcatttttttctttcctctgtttttctttcatcgtttttttggaatgtataaggtagagttattatttttacactggtaaaggagcgtgatggcaacaaccgctggtcattcagatgattcactatcgaaggattaacattcattttgaagcttcaagatgttttaagtatggactgagcaccctgccccatcctcccaggtagaagagacaaaaacttagttggctgctgacaggattcactccactgtttctcagttttctactttaagctccccacaccttccatttctagattttcttctgcattctatgaataccatttggctgtgttcagttttacacttaatttcactgttttattctattgatctatacctttagtaaaatttgtatcctttctcataagctccttttttttattatactttaagttttagggtacatgtgcacaacgtgcaggttagttacatatgtatacatgtgccatgttggtgtgctgcacccatcaactcgtcatttaacattaggtatatctcctaatgctatccctcccccctctccccaccccacaacaggccccggtgtgtgatgttccccttcctgtgtccatgtgttctcattgttcaattgccgcctataagtgagaacatgcggtgtttggtttttttgtccttgcgatagtttgctgagaatgatggtttccagcttcatccatgtccctacaaaggacattaactcatcattttttatggctgcatagtattccatagtgtatatgtgccaccttaaacttctgaagaacagaaacggcattgctcttttaactaattttattcttgctacactctgtggtagctattcaccaagtttttattggatccattgaagttaaagacccaaatttatttgaaattttctcatcggtcttattcccaaataaagcactgacctctgtgttattagaatgccattttataacatctgctaattaggagcaggcctttcctttgttaattctacttaactaataaacagcaggaagagtagagttggccaagagaggaggaaataaatgggatgtaaatgagtaaacacccaatgctgggaaagtcagataagagaaaaaaattaaggactgagagaatgtatgagattagaggagaaattctgtaactcagtagagaaagtcagctgtgttcaccctatactgaagcaatgtgctaataattcaagaatttgaaattttcaagacgctttttcaccacaaagaacctggatcccctaacctcaatttccaagcatattctcagtattggacattttcacataaatctctttttgatctcccaaactcagcatgtcacaaactgaaataatcttccctttcaatgcagcccctcctgatgatgttgttaaaggtgctctatattttcttagcctcccgtgctttcagtcttggaatttccctgggctgttgtctctctttctctgccaaactagtgaagagtcattagctgtcatttattgaccttcagatcttatgtcactagaattttctataagttattttgttaattaattcttgtgataaccctatgtagtacatactaacatccccaaagaagttatgaaactcacccagagcataaatgatgctgtaaatgtagcaaagtgcctttgagagaatgaatattgtgggacactgcctgaaggccatgataggtactcttttccctgtacacgtcagcatttatcacacctccactgccttgccagcccccctgtgccatttaccaaaacatgctttgtcagcaaatcattatctaaaactgaagggttgaaaaacagtgcaatgaaactcattattttatttactatgaatgagaacactatttatgcttacatagtggcagtgttccactggaaaaaattctctgtgactcagtatcaggaatggctgtattctgagcaaccagctggatcttatttaatgaatatcatgaaccctattgctcataatgtttcttcctgttttgtctgttggaaatctcagaaccacctctttgacctgaatctaagagttgaattgtaccccatggtgcactttctgaggttcccttgaccaccctcttatttttctcttggctgccccccagttaagccatgcctctctccttttctgaatttgaatggaagacctcactgcgcagattggatttagctttgtgagtggctgcagaggagctagaagtgtcctggaagtgccgggaaaagagcgccccttaggtgagccatgacatgggtgactacaggaagccaggccaagatgccgtctcactgctgtcttctgtggacctctccaggaagtgttttccctgggagtccttccctagaagcccagcatcacgggagtaggcagccttcagagggacctgctcagtttcttggtggctcactttgacacagtagccagtgcagtgatgtgtcatatcccattctttgcttgtttctgtgtctcatttctccttgattcctcagtcgccttgcttcgggcttgtatctctgaaataaaacgttagcaccttgatccatgcttcaggctctgcttcctggagaacttggactatgacaaatgtaagactgtttgttacaggcataaatcggcacttcttgctgctttttggttggtggcttggtgttaagggtagtagtggccaccttttttcatcacagaactggaactacattgccaagagtttgtatttggcagaaactttccttcggatgtctttctcaagaggaaactgacagtaagtgtaattccagtgttatcccccaaactccaacattttaaccccttatttctcattggtactgtaggaatgccagaaagcacaaaagagcaactgcctgtagcctgctgttaatatagttgaaataacttgtcagacttccactatgaaagcagattttttttctgctggcaaaaactagaagaggtgccataaaatcagaaataagctgtgaaatgcactttaagttaatacgaaactgtgttgttctattgacctagcactctgaaaaacaagcagtgttgtcttttgaaggatgataaaactgcaatgaggatttctttgtggcatgggggaggggaggggtgggtttattttattattattattttgttgcaaaataaaagagacagctctctgtgacctcagtgagaaataaatcctaaaacagaatattagtgattttgaaggtatttccatcttagccatcctaaccataaactagttgctgctttatgtgtatcataagctccctttttgccccaaattcgctttccttgtagtttttctaattattttcttccataataagttaacaagacatctctttcataaacaaatgtgtgtgtttgacatgagaaatgctttatttccagctcagaggactctttttggtcaaagcagaataaggctttgtactgagtcttcttccaaagactattttaattttattagttttttaatattcaaaaacaagtcatggcaggggaatagtcagctcatttttaagtgaggccaatttttcttcttatttctcattcactcttatgaaaacttagtcagaaattgaaaagaaaaaagttagagactatctacaaagcaacatagagcagccacagcgtggaaaaacccagcactgttttttttcaagtttcaaatcctgccacacacaaaaaaacattgtatggagttctattttcatgaattataagtcttttggatgcaccatgaaatctaatataagctggtaaagagaattcaccttgaccttgtctcctaaggtgccattttgaagagacagtgctgagtttagtgaagaaatgatgggatggggagctctgttcatgcctgagggcatttggagcaaagagaacctgaaagaattgttagttctgactccatgaccttgtgattagactttgcttcagacctacacagtgaaaccttgagaagcatggttatgagcctggctttggaatgaaaggtgtgggtgcgaccccagccacatgagaaccctgggacatgtcacatcataaatctgcgtaagtgtcaaatttctcagcagttaaaaaacaaaaatattcggccagctgcggtggctcacgcctgtaatcccagcactttgggaggctgaggtgggcggatcacaagctcaggagttcgagactagcctggccaatacggtgaaaccctgtctctactaaaaatagaaaaattagccaggtgtggtggcacatgcctgtaaccccagctactcgggaggctgaggcagaaaaatcacttgaacccgggaggcagaggttgcggtgagctgagatcatgccactggacttcatcctgggtgacatagagagactccgtcaaaaaaaaaaaaaaatcacatctaactcatgatgtacttggagatcgacaagatgactttagtatagctgataggccatcataagttcataggatggtggtgggtattttgtcttattttttatcagtgtattttcagcacctaatatgtagcatgacttcaagatttatttatcaaatattttaaaggacttaagattacccttgactgacccatgtgccaggcaatcttctattattattgggaatattcaagcactattttgttcaggatttgattagtttcttagggatgagcaaagagggcagttttaaagctccttcagagctaactcaaagtcgctgctagcaattaaaagaaggttaaaaaaaaaaagtgggacatggatcctctttattctcctggacattaaaacgtgcctcgacttgtattctccaatgtcccacattaaagtttagctgataagagagttccagtgctaaaacacagtttggaagttactcatctcatacacatccatgttgtaccaaccgatggccctctcagaaacaacaccatcagtttttggatgtctgtagtgttcagctctgtcaacagggcttaggaagggactctagcccctgcgaacatctggagaatctggacaccatctccattaacctgatccagcagatgttcccaccacacatatctatttcaagatcttcattgggagaggtaccatctttcaactgctccaagttatggtccatttcccaccaattagtaaaagaaagtgtctgtcttcatgaatcctgaagtatacacactcagtggtctgtgatatggtttggatatatatcccatccaaatctcaagctgaagtgtgattcccagtgtgggaggtggaacctggtgggtggtgattggatcatgggacagatccttcatgaatggcgtagcaccatccccttggtgacgagtgagttcttggtcagttagttcatgtgagatctggttgtctaaaaagtcagtacctcctccctctctctcttgcccctgctcttgccttgtcatgactgtaaactccctgagacctgaccagaagctaagcacatgttggtgccatgtctgtgcagcctgcagagccatgagccattaaacccctttgctttataaattacccagtctcagatatttctttatagcagcacaagaaagacctaatgcagtccgttgttaaggaaggataggattaggcacctctatggcaatcctagccaagtgccttttcaatctataaaaaacactgcttctgtggcactgctgacagcttcattcagtaaattaggacatggttcactaatgtgggtcttaccacattacaccatgttcctacatctccttcaaaattataaagttttctttggcctgcctcctttcataaaaatgtcagacacatcagatactttagacatttatttggagtaaagagcatcagaatcttaggaaacgggcctctgaaaggaagcattaatgaatgctttgattaatgaacctgggagtttagaaatgataccaaaaaaatatgaagttatatattgttcttgccttattttttatagcataaaccgaaaatgctgatattcctgtgtccatgtttaactttgctgcacttgttcctgtttcatctcatttctgtttttcatgttcaaattttgtttctcatgaccacaggccaggaataaaagggaaaacagaaggccaaagaagatgtagcttattattaagagtcagtgacttgggctcttttcttgctgcgtagacttgcttagaagcctctcgcgtagacacgcactcactccacaaacttcctgtctttctctcctctgtttcctttttcagcatttacaccctccctcatctctctctacagattttacaatccagcctctcccataataatctacagttaatgtttcctctgtggtccctggtaacttcctactcatcaacccaccgaccttcccttagcctttgtcctccttgacccttccttagttttaacgaccccctaatttcttcaagtctaatctttgcttggtttttatctcacagttatatcctcattcttcagcaatcactctaattcttttttctctatctttttcacttgtttctattctattttcatgccttcaaatgagagcatcccccaaggtcctgtttccttttctctcccttctttccctctgtagtctcatccagtttctgtggctttaactatcatcaccatataaatgactctcaccttaccctaaattacatcttcatttctaacctctctttagcttcattctaatattctgaattgcacaatagaaatgtctacttgaaggtttccctaatatctcaagtttaacaggttcaaaactgaactcattctatttcccctatactgctcttctttctgaatttggatttcttttaatgagtccaccatcctctaagaagccttgaatcacctctaattcaatcagtcttgtttttcacactctgtatgtagtccaaggccattctaacaacgttttcacagtctcacttactaatcctccttcgtcttccccagtgccagccccctagttcaagctcctattccctcactagtcccccatgtcaattttctctgctttccactgcattctgtccagggctacctataccaatcttccttacatgcctaagtgcttgtggcaatcccttgctctgaaatcttcaagattttttttcttctcacctaacaaagcagaaattctttcattagccttaggtccctccatgttctatagccaactatagttaaagactcttgtggtctttaattatcaatagtttccaatgcagcccacagtgcaaatacaggaccataagccattctccaaggatgctctgccttttgctaacactgaacttctgctcatcagttgtctctatcagtcctgccagaaaaccctagctctccacctatttgcatttttaaaaagtcactctaggcatgctgaaactgaagagtttcctgaccccccttacaggacctgtggcaggggtgtgggtcaaactcttacgggaggatgaacatacagacagacaggtgcgggagtcgggccaagtgctttttggctccggccccacagtagtgtctagaagtggatgcctgtgactcctgaagccccagtgggcatcttacagtgctcctttatctctgctgtctgctgacggcttaagtgttaaccagctcagtgccctcttggcacccaggttcttgtctgacatacaggaagaatcaggtcacacagacaaaatggaggatagtaaatgtaggggattttattgccaggtggaggtggctctcagctggatggatggggagctagaaaggggatggagtaggaagatgatcttcccctggatttcagccatcctgtggccgatctctctgaacttccccagccgaattcctctcaatattcagatgctcctcttctctccttctctgttgcactgctctactgttcctctgctcttctgcttgtcggctcatggagcctggggcttggggtttatatgggtacaggatagaggggcatggtgggccaaaaggcagcatttgggtgtgaaaacaggaatgcctgtttccatttagagccatttacattaccaggtttccaggcttggggtgcgaaaacaggaatgcctgtacccatttagggccacaggtttccaagcttgagggtggagcctttgctggggaactgccctcttctaaccagtatttccctgtctcctgtccgtatcaatatgctaagtgcctgtgggagaaaaaaaaaatcttccttgagggatataaaaatactcaatagatatttgttacatagaattcaaatgaatacaattggactaagaaaatattttgaacttgcatattgaatcacatcagagggatcaagaaaaagaaaaagaaaaaaatgaagaagaaagagggtcgtgatagtgaaaaggtgtgggaaagagatagagtattaacttttatttgatgaatgtgaaatttcatccttagcatcttggcccaataaacaaatgcctccttgattctatctcgttggggaggctaccctggaaaagcctggaactctctctagtggttgcagagtgtcacaaaaggctatgtatcctcttaacaacggaaacaaacataaatagcaagattcaaataagcatatggagtgagctatctgctgttgaatttggtacttgaggacttaagattatgtaagaaaaggacagttgttccttcttcatattaaataattatactacatatctaaatcgggatttctcaaacttggcactgttgtcattttgggggagataattgtggggggattccctgtgcattgtaatgtgttcagctatgttcctagtttctacccaccagataccagtaacatccttattcctcttccccccagctatgccaaataaaaatgtctctagacattgtcagatgtctcctgggtagcaaaatctaaatttacataaagatacatatggctaaaatgcatataatttttgtaaagctgtgaatacagccatgctaacatattttcccatggaaaagcaactggactcttttttaggttctcattccaaaactcctcctgtttacgttcctttaggctaagcctctaatcaatttgtattctataatattatgcataattctgtaacatccataatagttgatggctatgaaacagacaagactcacagacaccattcaataccacctcttataatgaatatacaaatatggaaagaaagaccccaactatccaaactgtgataactcttgactggggactggtgaacaattcagccataaacatcttcttattatgacagaccagacagatgcaaagaaaaacaaagaaaagacatcatgctaaaagacatgactagaactagttttccttttgaacagcctctcacattaactgttctgtgtaccagaagtgtcttttttgttgtgttttcattttgcctttatgcaaacacaattgcaggctacagatgcacttaattattttcaatggtagtagcattatcatttgtaatactctcctaaggggtagaatgaatctaaaatgttaacaaatttcacatagaatcatagaaaggcagtaattgttcggggaaaagggcagctgtttcctcctcatatccacctgctgagtgacagatgattcggtgactgggtaaaactttgaatctcatattacaaaatcccaatcttacaggtcaccaaaatcccttggagaggttactactttcattcagttacagaaaaataaagcaaaaaaaaaaaatttaactaccattctaggtacctgtctattttttaaacaatcaatagccactttccccagtcttagcagacataatacttctcctagcagacaaatttccagaatttgagtcttaatttgctctttttgtataacttacccaaagaaaccaatctcagttttgattaaggcaataaaatatgttttcgctattcagatagaagattggtttaaataacccatggtggaatggtcagtggcagctgtgctagtctggaaggtaaggctgttaacatgtactttacacaattactgtcagtattggatatgtgtcaaagttatttaaactcagctcccttatttagcatctatttattacagagcaaggctaatttattactcatgatctatcctccttacttattattcagcttcttatttgtgtataaagtgatgtagcttcaaatccacatccttggatgtggaatggaatggatgtggaatggaatggaatggtgtagcttgtgaatccacacaaagtgatgttgtgcagtgcaatagcagtgtgcccgaggcctcatttcattttctactttctgcattgctgattagtctactggcaactttctaaattacggggtctgtgagctcctaagttatgatggttctttggatgttaattatccccattcatacaccctctttattatacatttgatatacagtatgtatggctctcctttgtattctgagaaaatgccactaatggcaattcccagctctgtggctgctggtgccaaaaagagtggtatgtgcctggtggcccctctgtcacatgccgaggacattcaggagtggcaacacgcagcctgcacagagctattacaatcgtctgcgttttctcctccatcaaagccaccatgtttatggtgttttaacaaacattttatgctaaggaaaaggaaaccaaatgctttttttcccttcaaattctattatggatttagggggaaaaaaagcattattgtacatcctgaacctgacttcgatttttctttcaaccctgtattcattaaaaaggaagcaattgataccagtttcttttgaattcagggttcaggataacagcttttattcttaaatataaataccttctttgacttcggttaattgatacattagagtgattgatttcttttatcttttttctttcttttcttttttttttttttttggtaacaaattacccaaaaggtagagtaaggatacctatacttttccttctgagttgaccttctcagatcttgagtcacattagttaagttatgatgtctaggttgttttaagttaatttactttttaattgacaccaaaaaattgtatgcatttatcatatacatgatattttgaaatgtatatgtactgtgaaatggctacattaagctcattaacgtattattacatcacagtggccagtttggattactttaagaggcatgtgaaaaacatgaaaagagtttgaagtagagaaacaaagatgtaaaagccaacatatttaaaaggttatcatttattacacaaatattacacacagcacagtgctactgtgcattttacctactttgtctcattttaaccctcccaacaaacacataagttaggcatcattacccacattttataagggcaggcgctgaagatcattgagatttacaaactcacttaaggccatagttttaagcagtggagcagaaattcaaatagaggtcagaggtctccttaactccaaagtcttttctatttttttttaatcctagtgtagagaaatgtggatgatgatttgagaatgacctttaaatataaagtgtgttattttgtaaaagtctgcaactacatattctttttattcctgggaatagaagaagagaaataaaaagaatgaatctatttgtagcatgaaaaatttgagttggttataagaagtagtttcctgataaaagttgtatgtaaaactgttcttgccttgaaatggagaagtccaagcagaatagattccacattgtgccttaaattgtagcataagtccacatttaccagtatttagtgcagagatgaaagcctaatctagtaatctattgctgtgtaacaaactatcccaaaactttgtggcataagacaacaaccatattattacgctcgtggttctctgtgcctggaatttgggcatagtacagctgtgaagacttgtctttacttcctgatgtctgaggcctcagccagggtggcttgaatgtctggggatgggcagaatggctcatttgaggtaatgtttctagggcttctttctggctgttggctgagttccttggatcttctccacatactgtctttggggactgaaatgggcgagatggctccttactcacatgtttgtcctctcggctgtgatgactggaccagttgaaggctgccagtcatctcttactctttctcttattctttgcatagcctcatcgtgtgggtatcttgggcatcttcacagcatgtagatatcagagtagttgaacttgttacatagtgactgactgccagcaagcattccaatagagcaaggtggaagccttagtgattccagtaacctagtctcaatagtcacacagtgtcatttccattgcattcttttggtcacacagatgagcccagatgcagtgtgaaaggggcctagatagggaagacatggattattgcaggctatttttggagactagatacaacaaaccacatagagttctagggttgaaagacaaacaagcagctggttaaacatgctccacacataaaccatttatctaagggagaaaaaagaatatgctagaaatagacaaatagtcttcttggccaccaaggacagttttgtatatggattaaaggtaatgtgcccccataatgttctaacgtctccctaggcaggaaaaatgtcagaagtctcaagtgaattacatattaataatttgtattttcccatatatatgggtaaaaattgcttagggctataacttgtagctttcaatttgcatcttcattgcaccagggaaggctgctgtgtgacacatatgtttgactatcctagctgaaaacaaagtagtctgggtttaattctattggcaagagatcagctttccataattttagcctagtgaattgttatgggctataattcaaatgtaatgatctgactcattgaaatgataagattcccagctttaggcaggcatattgttcctcctcataagaaagtcaattattttagacatcaggtaccccctcaacttttctttaaatagaagacagacactgttaactgtcctaactagggcaaatgtttgagtcaccagagcttatgcgaacatgtgtagttccgtatttgaatctagtgagcccattgctaatgatggcatacagttcagagatttcactgttgacaaagactatatgttcccctagtagttttctgtataatgttctgtttactgtatattcagctgaggatttgaacaccttcacctggagcaaaatattctgtccacagcctgttttatgtgatgtgctgtacgaaatagattaatgtttctaaagtacatgagaagtgaactctctcactaagacagcctagaattaagtaactttgctgctaagtcatacaatatcttagcctgtctgtggagacgaggagagaatttcattgagtctcataataaacaaaacaaataaaaagctaaggctaattttaaagcataaccaaataccttctgtgcaaagatagactatgaataatgactttgttttcttctatttattcatggtcaggaaggacatattttccttccttactatcatcttgctgtcaaacttcttgaggttaacttggttatatagtcttttacttggaaaggagagtagttaaatctgaccaatttaattgatcagaaaatactgaaacaacaggacacgttcctatagtggtttgcttccttatccctctgttttgactattcaagaccaaagatatgcagagttcaatgggggtagtggttaagagaacacatccttaaaaattattcatcaagatgagattgtggatctactgcatagtaaaatacaactttggcaagttacttaatctgtcttagcttcagttccttctttgtgaaaaaaaaaaaaaaaagaattggtgcatgataacaacattatatacttccttagatagcagtgaagtttaaatggtatgattcattcaagaatttaacacaattcctgttataaaagcactgaataagtatgagctctttctaaaaccattagcatattttttcttacctataaatgaactgtgagtcttattactcaaatttataatcactagactaaactgaaaatcgaggggatgaaagtcacaatccaggtgtgtcataaagtaaattatgttagagtattttcagatgatccaggtctgattttttttgcttaataaaatagtatgggcaattagtggaatttggttcctttattgatttcctgcacactcttatacttaaaaatgtgactttcaagttccctgtggaatcagcaacacaaattccagtggtggccagttcaatttcatgccactacagagtaaacttaagataaactggataatgggagtataggtggagaaacatctaggtgaccacaactgtatatcctgaataattaaactgtattgtaaaataaaatgttatttcttggttttcttgaaagagcagtgtgggaatgaaattatttatgtatttttcaactacagtccatatcttagggttttttgagttgttttaatgaaaatttatataaagcatagctctttttatgtagcttatatagcgattcatatataaagtgtagctatccttttcagttaatggcaacataatacaatattgacaaaggtgcagtagggtgaaactttatgtttcaagtagtacattcatgagcttataagacaatggggtttaaacactcttagccacagaagtaaggaaaataaggggaaaagaccttcaaaccttcatgtgcttcagactgacaaggcctctaaataactagagtggcccaaaacagtgcattttcatctttcacttaaccaaagccagtactcattttctagagcttggttctgaagcatcaccaaggtccaaagaaagattattctgtactagtatgacgaggtagacaggtgataaataagaaatggagatttattttgcctctggctgtttcaaagagggttctcttcattcaaatatcccgagagagggctttctgtttgatccctgtgtgttacacacacacacacacacacacacacacacacacacatctatatagtaggtgtgtgtgtgtacatataaaaaaaaatagatatttaaagtacaagtactagaaacaggagaatgtgtttccaccttatcctgggtgttaccttttcattgccagcaaagctttcacaagggagaaaacactgtgttctgtggagtgtgcttgtcattgacaatctcatcacccctggatacttcaaaaagttatgtcagatcttcactgtctacaagggttttgctttcatgattcatacctggccctttcactgcttgcctttcaggtcaaaagccagaaagtcagcctctccagaagtctgattagcacttgaacttcaggagatttatggccacaaggcttgatttttaaagcagttttatccaagtacagatcatttattctgtggacagtggtatttatcttccaccttttccatacattttatgccaaaaatatacagcttagctattctttttgttgttgttgataatacatttatttgagaatgttaatgccgtcatcctcaagtggcgtatatcatcagtttaatcagtttaatgtgaatttttaaaaaatctctaacattttatacaaaattagagaatcctgacaatataccaattatgctctgagtttatgacctgggttttagaacttgggatctactatttgccctacatttattatgtctactataaaacaagcagttttttcaagtacagaaattacaatgggaattagaccttcttgccctgaaggagttcagggtctagttcagcactgtcccatagaaatataatgtaggccatatacataattttaaaatgtctaatagccccattaaacaaagtaaaaaaaaacagattaaattaatttaaataatgtatttttaattcaatgtatttaaaagaaagaaggagggaaggaaagaggaacagagaggaagaaagacagagagaaaaaggaagaaaagaaaagaagagaagagaaaagaaaataacagaaaagtaaagaaataaaagaaaatttaaacaaaaaaggtatagtttggcgagtatggcacaatcttgatcattgtcaaatactgacagtaagtttacggagattcattgtaccactttctccttttgttgatgttttcaaactttttaattaaaaaaataaatttaaaaaaaaatgccaagacaaaacacacactgctttggcccagagattctattctaattcatttgggaaagttcctagggactggagcattgctatttttaaaagctgctgggatcattctgttatatagccactgttaacaggtataagcaggtacttatgctaacaggacaggagtctggagaggaaggtttttaaaggttattggaaacgaaaggtttttttttttttgtagacagagtctcactctgtcacccatgctggagtgcagtggtgcaatctcggctcactgcagcctctgcctcccaggttcaagtgattctcctgcttcagcctcccgagtagctgggactacaggcacccgccaccacacctggctaattttgtatttttttatttttgggggtttcaccatgttggccaggctggtctcaaactcctgacctcaagtgatccacccaccacggcctcccaatattctgggattgcagggatgagccatcacacccagcctgaaaccaagggttttacaatacagtacaatatgactgtacacacatattaccaaaaaaaccactctagcagggcatggagaatagatgactgatgggcagattggaagcagggaagtcactttaggagactgggaagaaatgacaaaagtctgaactcacacaaagaatggacagatttaagatgggcacagagtatataagtccatttgtggactagtataaagaaattccagagactgggtaatttataaagaaaagtggtttaattggttcacaattctatgggctgtacaggaagcatgatgctggcatctagttggcttctggggaggcctcaggaaacttacaatcatggtggaaggtgaaaggaaagcaagcagatcttttatggctggagcaatgtgggtggagaggtgctatacacttttaaacaaccagatctcgcaagcgctcactcactatcactagggcagcaccaaaggtatggtgctagcccattcaagagaactcagctccagcgatccagtcacctcccaccaggccccacctctaacactggggattacaattcagtatgagatttgatggggacacaaatccaaaccgtatcagtataataaccatctatgaggtaaaacataatgaaattgttcagatttgcagtgaaggtgggagactggtgatcagaaaccagaggaaggagattttcatgacaactggatttgggcagttggataaaggggtggaggtaccattcattaaaatagaaaatacaggcagattttcagggagcaaagagggaaggcatggattcggttccaaatagcatagttagaggccacaggggaaataccatacacaggcaaaaaaaaaaaaaaaaaaattgtaaaagatcagaaggtgggccaggcgtagtggctcacgctcacgcatgtaatcccagcactttgggaggccaaggcgggtgtatcacctgaggtcaggagtttgagaccagcctgaccaacatggcgaaaccccgtctctactaaaaatataaaacttagctggacgtggtggcgggcacctgtaatcccagctagtcagaaggctgaggcggaagagtcacttgaacctgagaagcagaggttgcagtgagccaagatcgcgccactgcactccagcctgggagacagagcaagactctgtctcagaaaaaaaaaaaaaaaaaaaaaaagatcaggaggcatttagagtaagcagacacagtgctcaatggtttcttctgtgttgtctctggaatcttcactgtagccctctgagacagcttctataattatgtccatctgacttaaagtagttgagtaagttgctgaggagcacacagctagtagttgcgggatagaggacttggagctacagctgtccaactccaaagccttaatcatcatgttatagagccatcataaacatacttcagataaaaatacctttgcataatgagaacatttttactgaacatgatattacttcattcaaggatttattcatgcctttgtcagtattttaattgtctggcgaacaggacacataggtcagattaatctgctgcttaatcataatgctaaaaagagtgctgattgcaaggctaaattttgttacttagatttttttcaaataaattttgtgcagatggattttcccaaaagtttaaaaatgaataggctagtcaaaataattagcaccgatggtaacacagctgcttaaggacactggtctgcagtaaaagaatatttgttctattttctctctccaaatctccaagaatcgctattctagattgatgtggaaatcaccagaatcctctcctcgggtgtcactaacaattgaaattaaaaaaaggaagattgccattagcattacttttttacaagtatttttctacctagaaacaaatgtctgtttccagatgtccttccaaaagagtgttatctatgttctacatcttcaagtagtcaaaattaaataaatattatattatatctgagtgttgggaaaataaatgaaacatctcatggtaggtgggaaaaacccagattttgcagtaaaatggccctagttttaaatctttgttccacccttcctggctctgggaccgtgagcccagttacttaaagtttctggtttgcagtcacctaatcgtggacataggaatcagaaatcctgacagaactgtgatgaaatttggccacaccctgtatttattttctagggccactgtaacaaatgaccataaacttaaactaatggcttaaaacaaaacaaatgtattttctttgagtttaggtctgaagtccaaaatgagtcttattgggctaaagtcaaggtgttaacagggctgtttttttgttttgttttgttcttttttttttttttttttttctggagtttctaaaggagaattggttttcttgcatttcacagcttctggaggccacttacaatccttgactcatggccgcttcctctcatcaatctttcctcttgcttctgttgtcgtatctcctactagaaggcactcagtgcacttttgtacatggtacagggaggcagttaatatagagcagtggttctcagccagaagtgattttcttccccaggggccatttagaaatgtctggagacatttttgggttgtgctttacacctttgcatggaggtcctactggcgtctacttagtagaggccaagaattctgccaaacattctacaatgctgggataggctcctacaacagagaattacccacccctaagtgacaatagtttcaaggttgagaaactctgacataaatgttaggattactcaccccagaatccaactgcctagctttaaaccaggctctactactcattaaagtggcctcggacaggtcatgccatctctctgggcctcagagtttcttttgcttccattttttttttccatctggaaataggaataataatagtaattatcatatcagactattgtgagaattaaaacccttagaagaatggttgtatataaaagtatataaaatccttagaagaatggttggcatatattcaataatgttagttcttgttagtactgttattgtcactcagcaaatagtaattaattttgtctgtgcctttccaaatgcctttcaaaatataaactttcttagtgttttgtaagtagagtatgtttaaatccaatagtagaccaaattattttaccaactattgtttagaaaatcaacatttttgcagaattttaatgccagctaatgagacatctaaaccgcagccccttccatggagtctgtcttctttcataaaatttcgcttgggcctcagaaaagggttttcaaggaaatagcttcacatcccacacacgtatctcaggtaatcaaacaatggcaacaccacttagctcaatgcacttctggctatcataatattccctgtgactttggtggatacatgtaaattaagaagctattcaagtcactagtttcgccatggtgagatgtatttgtgtgtgtgtgtgtgaacacactggtgtggtttttagaaaatatacatacaaggttatcccatagccttgtgctattcagtatgatagccattcgccacatgtagttattgatcacttgaaatatggccgttttgaatggagatgagctgctaagtataagttatagaccaaattctgaagacttagtatggaaaaaagaatataaggtatctcaatatttttctcttgattacatattgaaatgataatattttgaatatatagagttgaataaaatgtattattaaaattaaagtcacctatttttttcctcttctttcattttcatttattgaggtaaaatccccttaagtaaaactgaccacttgacactatacaattctatggcattcagtacattttcagtgttgcaaccaccacctctacctagtctgaaagattttcatcgctgcaacagggaaatgcatttcattgagcagtcactccccttccccttatcccaaccagcctggaacaatgatcagtctgctttctgtctttgtgaatttccatcatctgaatgttttatatatatttaaggatgtaatatgtgaccatagtgtctgactttgtgaatttccatcatctgaatgttttatataaatttaaggatacaatatgtgaccatagtgtctgactttgtgaatttccatcatctgaatgttttatataaatttaaggatacaatatgtgaccatagtgtctgactttgtgaatttccatcatctgaatgttttatataaatttaaggatacaatatgtgaccatagtgtctgactttgttcactaagcttcatattttttacattgtagcacttatcagtatttcattcctctttatgggtgaataatattccaacatatggacatactacattagttggtggaaatctgcagtgtttttaccttttacttgttaatacggcctctatgaacacttgtgtacatgtgttgttgctggtttttttaattttaggtttgggtggtacatttgcatgtttgttacatgggtatattacgtaatgataaggattgaacttcaagagtacccatcaccccaatatagaacattgtacccaaaagataatttttcaacccttggccccctcccatcctccccacttttggagttcccattgtctattatttccatctttatataggtacttattgttgagttcccacttgtaaatgagaacatgaaatatttgattttctgttactcaattcacttaagataatggccttcagctccatcagtgttgctcaaaggacatgcttttattcttttttatggctgcatgatattccatggtatatatgtaccacattttcttaatcaatcatgatggtcacttaggttggttccatgactttgctattgtgaatagtgctgtgatgaacatatgagtgcaggaaattttgcctattcctttttaattttttaatatgaagctattataaagtttaaaattacatacgcaattcacattatatttctgttggagagcactattctaaactttgctctgttttgacattctgaggcagactgtgaagcagcctgtcttaaatgaacagagcatgccaacatatataagaagaattacaaagaaatgaatataaagacatttcatacccctcaggcagtgtttatcaaaggtagttcttggaccatctgcttcagtcacttgtggtgcttgtgaagaatgcagattcctgggttccattccagctgtaactatgcagaatctctgtgcccagggctctggatttttatcagattccctcttgatgttcatttgcattaaattttgagaatcgatgataaacttaacaatattaaaggaagaaaaaagatcagacaacaatgatacacagacacaaacaacagtaaaatacctaatgtaatatacatgatatcactcaccactatacataagaaccaaaacattgggcgtcagtgagtgttatatttggattgtagagaaacaatatcattcaatgttgcaatatcatttacttccatattatgtcataatacttggtagctttctgacatgacaagtcattttattcagaagataaaatggaatttagccatctctgtgtttaccctaagtcatctatgtaccaatctgcaagaaaatattagttaaatgttagcagaaaatgccagttgtgaagtgtccctttgaaaacataaattttcttgggggaaggggaatgtgtgtgcgggcatgtgtgtgtgtgtgtataaacatacacatctatatgcatacacatctatatacatatgtgtatatattactttattattgaattagctaaataaactccatgttagaaattcaaagaaatcatttgtgtgataaataaggttgcttattactgagcaactatgattatagcagttttatgaaattttaattacattatgcacctactcaaatattggttttgaacattaatcgagttacctgagaaacatttcatggaatgggaaataaaaatgaaatggcttatttacttatcccaatgcattaaagatgaaactcagtagggaaactcgtaagaaaaaatgagagacctactcagaaatctcattcaatgcaaaccacgggtggattttcagattctataaattatcttcagtgattgaataacatgtagttatgctgacgagactatgcttaaaatgcaatatgtatgacctagatgtatgttatggcctcctacttcttgcagcatcctaaatttagaaacccatcagatattttgtggttactaggtggacgaaatgcctcttaattccgttcaaagccagtgctatttgtcaagtccagcacccgatagaaagaatgggcaataaggtagtagagaaagcagaaggagaagcagagagaaaggaaggcatttgccttggttagccagagactgacactgaattgatgtgacagctccacattgggctattgcatatgttttctgtcccagtgatttctttcctgttacgaattacatgggatggtgactttgctaaaacctagatgtcaaactgttgtacacttcatatatacttatttttaaattattctccaaaatatccaagattcaagttagtagcccaggttgaaaagaaaatttcaagggatagccaagtgttcattttatacaagaacagcctttaaacacgcacagtcagctgtatagtggcagtggacttttgtcagttttcaaattagtcatatcattagacacatggaggaatgtcttctgggacataactgggacatatctgaattagctctatatttatctacagtcagaaattataaccttaaaaatacattcagagaagtttacacctacatgtagtactttcaaaagttgagcaatctttgtataatataatattacttcttattttattttattttttgacatggagtctcgctctgttgcccaggctggagtgcagtgacttcatctcggctcactgcaacctctgcctcccggattcaagcgattctcctgcctcatcctcctgagtatctggggttacaggcatgtgccactgtgcttggctaatttttgtattgttagtagagatggggtttcaccatgttggccaggctggtctcgagctcctgaccccaagtgatccttctgccttggcctcccaaagtgctgggattacaggcatgagcaccacgcctggctattactaccttttagtataatttataagaaagagtaattgatagaaatgcttccagaaataaatactaaacaatttccaataaaccacttttaatttttaaatacagaattgccttacttaaaaaagaaattataatacccttaattagtttgacccttaattagttgaccaaaaatatctcttatgatcttaatattgggagcaactctttaagacagttttcttggcaatgcaagtttattctaaatgctgatgaatactgtaatacctttaaaaaattagtagcaaatatagccaatttttcctgataatagtcaaacaaaaaactctggaacagaagcaaacctaatttgatgctgaattcacaaatgaattcatttttaaatgttaactctagtccataaataatgtacttaagcattaaagcctaaaatattacttaaattcaactagtttgatttcaatttaatttgaacttcaatgattctttcttaatttgtagaattaaggctgaaatgctagagtgggctatttcataaattaatattcatagattcttaaggctttagagaccctaccatgttattctaacaattaattgtttaaaaagagaaaatcagatatattgggatagctgaaaaatggtatgaagaatacaaaatttcaatggccaagatttttcggacacaataaaaagacacaaataaaagagagaaatttagaaagacaacagaaaattgaatgacaaagaaaatcttccttgatgttctaagagcttttggaggttataaaggtgacagattctaaattagaagcattcaactcacaccttgaaagaattggaacaggattttcttgcaggaaaagaagaaacttcaggacttatgaaaagggatcttgctgttgagtcctaaccgagttgtaattaaaaatgaaggtgcagggctgggcacggtggctcacgcctgtaatcccagcactttgggaggctgaggtgggcggatcacaaagtcaagagatggagaccatccgggccaacacggtgaaaccccgtctctactaaaaatacaaaatttagctgtgcgtggtgacacgtgcctgtagtcccacctactcgggaggctgaggcaggaaaatcgcttgaacccaggaggtggaggctgcagtgagcccagatcgtgccactgcactctggcctgctgacggagacgctgtgtcaaaaaaaataaaaaataaataaataaataaaataatataaaataaacagaaaaaatgaaggagcaattgagcagttgaacatgtctgaaaacattagattctatatgtattggacatgcctgaatagtttagattgtcaaaaaagagaaattcttctttaatgttttgagaaaaatatttgccacatgtgtgttgggaataaggaaaaaaatataaaattatttaatataaaactagacgtaaacctaggaggcggagcttgcagtgagccgagatgcgccactgcactccagcctgggcgacagagcaagactctgtctcaaataataataataataatgataataataaataaaaatagaattttggcagcctgtattatatctcacttgtttgcatttatataggagaagaaaatgccttctttattcaaagaaaggcttagagttacgttttttttcaattatttatctcagttcatattagctgaaatgacagatgagccacagaaaagcaataacactaaaattttttttgagatgggggtcacactatgttgcccaggctggtcttgagctcctcagctcaaagaatcctacgatttcagtctcccaaagtgctaggattacaggcatgagccactgcacctaaccataacaccaacattttaagggcactaaacactctttcttttttttaaataactatttaatgagcagatatatcctgttaagtgtattatatacattatcatatttaatctccacaaaatctaaaagctttttttcagacagggaaaccaaggcacagaggcaaaaagttacctaatagaactcatctagataaatgtcatagctgtgattattctggatgctaattttaattttcttttttatgtagattaagttatatgcataacttattatgaaaaatagttgaaagaaaataagtctttaatccttattctgagctcccaaagcactttatttcaacctgttttgaaccttattttctaccttgcatcattattatttgtacacttttcttacatccttgttagactttaaaattctccttagtaattattagtttcttgactttgttccttttaatgcactgtttttaatttaatagaagccattacttttttataactatgaaaattagggctattaagttgccttcactatgttctctagaattttgtaaagttagtaaaagagaaaacctcttctttataacctctacagagaaggtactagatctagtgtggcagaaaggatggaaggatggacggttggatgaatggatggatgaatggatggatggatggatggatggatggatggatgaatggatgaatatcagacataatggatgaatattagacataataaatcacatctcaactgattaagtcctctaggtataaataccaggtacaagaaataaatggcacaaaaaaggagtgagtgaaggaactgttatagatttaaagagacccaatagatacaccaaacaaatggaatgtgtgaacgttgtttgtatcctgtaaaatccttgatttgaacaagtgaactgtaaaagtatacttatgagacaaaggataattaatgagaatattgagagtccgttttaacttctaggtagaataaaagtgttgtgatttatatttttttgaagagtccttatctcatcgacatacattaaaatatttatggaggaaataagaagatgcctgagatttgctttaaaataattgttcatggcgggaggggtggagaataggaaaagatgaatgactttatattaataattgctgaagctgaatgatagctgtacattctcccttttttctctaggtgtttgtaattttctaaaatcagaagttaacatcaaaaaagtttttggcacataattggtatttctttaagttaacaatttcctttccttctcataaaacttaatcattaaatatgggcaacaggctttaaaagatgtgctccaccataaatgtctgtcatacttgctatgatgaacccatgagtatttaagacagcctatagaaaacttttgttctatccagtaataaaaaaaacccttgagcagcaacataaaatagaaatcttgatctttaaattgaattgtataatgagtaaatagaagctgaaaagtatattataaagtcactggctagtggatgcagcagattttttttctcattagtaaaatgctgtgcatggtacaagtgactgataatgtgagttgatctatgatatcccttataactcaaaaattcactgatatttcagatccactagcccaccatataaattcatcagaggatggcaattgtggcatgtgattaagcagcaagccaattgtgtgacatgttgacagtggcagtgcagtacgtactgctcccaagataaactttggcactctagtcagtagattttatttatattttcaaaagcttgtataaaacatgaaatagtcgagtgacttgtgaagcagtcaagatatcaacttcttccacatgaatgaaccaagacacacatttgtggagattctttgactgtctttagagaaagatgatatgccaatcatcccaacactaataagactatacaagaaatagtatatctatcaaaatagacacttatatagacttattttgtaggacattgtctcaagtctccagggcattatcctagagaaaaggcattatatccttagcttgggtagtatccaggacctgaaaaagtatatttaaattggtcttttaaaatatacgtaactttcctatggtgcaaaacgaggataatatcaattttgactcttattatttgtagtctttctttagaggtacctggtatacagaaatctctcacaacaccagctgcgttggtccagccttatgtagggaaggtatttccagtttttaagagaattcctaagttcaggctggcatgcaatttttactacataagaaaaattttatctaaacatgaacccaatctactgccctaattcatggtagtagaaaacatttcacacaaagagtaatatgctaactgaattagtcatctattacttcataacagattactttgaaacttagcagcttaaagcaacacacatctattttctgaagggttctgtgagtcaggagtctgggtaaaacttagcttcgagccttgcctcaggacatctcacaacatagcagtcaagcgtcatctagccaaggtgtcactctgtcacccaggctggagtgtagtggtacaaacatggctcactgcagactcgaactcccaggctttggtgatcctcccacctcagcctcctgaggagttgggactacaggcacctgccaccatgcctggctaatttttttgtgttttttgtagggacaggtttttgccatgttgaccaggttggtctcaaactcctgggctcaagcaatccacccacctcggcctcccaaaggagtgggattacaggcatgagccagtgcacccggcccacagtgtcttttaatctgatcatgaaagtggcatttcatcactgttgccatagtctattcattagaagccagtccagctcattctcaagaggagggattacacagggaggggtacgagtgccagaagctggagctctttagggatctacatactgccaactacactaatagtacattcaaacttcttgaaaaatgttacatgaaattagcagtatagtgatataaatagattcagatgctaatggaaggctattctgttgctcagatttttctctagttcattctgctccctcagttgggatggccttgctccattccatttgtccaaggtgcacaaatatctacctctctttgcaaactcaactcaagcatatggcctctatgagatggatctgacctctctgccttcatggtacccccataaggctctgctgcaggcttttcaatagcactttattgcacgtatcctcagtgtctttccattcagctaacagattgtaagcacgttaaagcaaggacaatcattagatactgttgcatgaatgaattatacattatatctcaattgctcttcaattctatgtacagtatactgaattatagtataatatactacgtatactatacttaattccatcttagatggggagtagggtctaaagtaagtagataaggtgagaactgcttagagtcaaaatcaaatggctcaacagagtggcttaacccaatgagatgcgtacccaagaaaagactctcaaaaccaacacactgatgacagagctagaaatgtatatccctcatcttactctcactctggagcttaactttattaagtggaatcgcttgcatcccaattctggagtccctcatagaattggctgaggtctcattgcagccacactgcagttcagctttgccctctgctcaattgcatttatctactgtctcatgcctgaataaaccttatgcacacaaatttctgcctcacagtctctttcaaaaaaaaaatccaatgtaaagatggcttcttgctctcaaacccaaatttcaaaagcctttttaaaatttcttcaccctcctgggtctcttcagtcctgtttctcactgtttctacctgttctactctcctacgctaaaaaagcaaaaaccccaagaaatgggcaggcactcactctttttaagggtgatttagagggaatagctgaggacaagctgggaaggaggcaaggctctaatctcttttctgttaataattgctgtttccgtcatagtactgcggtttgattaaaatgtattttatgaatggtgcatgattttttttctcaaaatgacagaatcagttacagatcccacacctgaactctcccatcactcagcatcccctatctggggggttctctgaagcacctgctagcgctacatgcttcttctccaatagccaggcagtacagtggcagtttattgggtgaaatgcctttttacaaaagacttctataattgcagtcaagtctatataagctgaaacaaattccagtttcttccttttattttatttatttatttatttatttatttatttatttatttatttattttttcctgacggagtcttgctctgtcgcccaggctggagtgcagtggcgccatctcggctcactgcaagctccgcctcccaggttcacgccattctcctgcctcagcctcccgagtagttgggactacaggcgcccgccaccatgcctagctaatttttttgtatttttagtagagacggggtttcactgtgttagccaggatggtctcgatctcctgactttgtgatccgcccgcctcggcctcccaaagtgctgggattacaggcatgagccaccacacccagcccaccttcttctatcacctcgataatttgaagaaagacctaatttaaacataagatacctacatgtcattttgcttgttttacagccactaggcagttagaaaagaaatcccaatcacatgtgtactccatctataaaaagttggtataaatatgatgtttaccttgttctcatatttcaaggaatttgttagttgcgctatatcctgctgtttctcatatttgtttactcctggttatggtaaattctttgcacatttgattatgggcacatgttaagcagggctgaatagtaggtgtatcggaattgggagtattcctgcagaaagggtttgtgttggcttccaccagtctcctcaaagttatcatcgatggggacacttaaatgttaatttcttggtgtgtgtgttggggtggggaggggattttcctttgaccacataagcgatgtaaatttgcatcccagactcaggcgagagaagaaccaagactaatgttttcaggagaatcaggcttgtttgtcttctactgagactaggtctcccctgtgccagtgggttgattttttttcctaatccgtatttcacagagtgtaagtccagtggtgtgctggtaaatgtttagcaaccaaccctttgaaaaagaaagtatgcatatatgtctaaacgtaggtttattataaatcttactgacccaaaggattatatagtacacctatgactactaataatataatgtaaaatactctatttgcagtttaatatagtcaattgattgtcatagaatgtattcgtggatgtaaaaggagacttttacccaactgagaataaggactaattattcagagcttgtgcctgcaagggagtcagccatcatcacttgtatttggcagactcaaagtcaggaagagcagagggagagctttataattaaaaaatggtggaaagcacaggaatgctccaattgaaagttgttggcaaggtgaagcgcaggcaggctaactagaagcaggacatcttacgtggtgagattggagagtgtattttggctttccctggttcctcctgagttgcaaacagagacaacaaaaaaaatagggaagccgaaagacattgaccaagttctgactgttttgggctgattgctgcagaggttgcagtttgacttcctggactgcatgttgcagaagttgtggatgagaattctgttgtcgtatatgatttgtccactgcccatttgtatattcagtcccacactttcactgattgttgctgaactcctgcatctgtagcctgtctgtggttgtaattgacaaatgaatgtagttccaacatgagtgtttgttgatatttttgtttttgttaatgggtagcaacaagatgttggaatttcatttgttcaccaatgatatcagtcactactgaattgcataatagatgtcaaaatactcgacgttttttcttttctactcacaatataactacagacatgctacacattaaagtgaatctgcattaataacaaaatttccatcattttcttaagtctatgcaatcaaaacaattagtgaagtcttgtagcatttgccgatctccacagtataatacttctatcatggccaatttctagctaccagtgtgtcattaatgaacatgaagttgggaagcaatgtgcaaaagaataatagcattatgttgtatttccgctatagagatacaattcacacagacaacctcaaaaacataggtagtggtaaaatgtaacaaataattaggaagtcataagttttgagcatttatgagtttatttttgtagacatgaggtcttgctatgttgcccaggctggtcttgaactcctgggctcaagcaatcctcctgccttggcctccaaaagtgctaagattacagacatgagccaccgctctcgccccaaactttatttttaatatgacttacttaattcaaaatttacctaattttaaataatgactctatttaacaacaagcttacaaaattcatgaaaatttaacaattggtataaacaagtggtataaggacacacagtttacatccataaataaatacttaatgcctcagtcttctgggttttgagaatttgagtatgaatttttattccactttgtacaggccaaggcctcatctattttcctagagaggctgttaaaaccccaaactcttgaatattagactatcaaccccaagctcatccattctgctgggcagctagggcatcagtctaagtgctggcttttagtttcaacttgggttttggctcctgtgtattttccttacttttttccagcttattacacatttaaatgagtgtttctaaaactctcatctagcacttctaagtgttttctcatggggaggttttaagatatctggtcacaatattgcctggaatgaaagggtcctgtcttgtgttagcactctctagaaatttctgaccttgaatctgactctgtataaaggagttttcctgactttcaaaactcagctttttaagacttgatagtaaccaagttcagtttattttatgcatgaaaacttgtggttcttcagtgattcttataatttttggccttcgagaggtatgctttgattgcaaaaaggagaactagtccttcctagatgtgccagctgtaagaagcatgccgttaagtgcagggttgcctgctggatgcttgatgtgtgagtcttcaatgtgtagatttcagaagatgtgtaaaggcaagacagtggcacattcttccaaactacagcatgaaagtgttggtccctaacttagaacattcacataaattcatgaaagaaaatgtgataaactgaagtaggacaaaccatccatcggaaaaaaaagagatgaatggtaatatttcattgacttctgatatagtcccataattataaagacaaacaagatgaaaacagagtttactatgaaaaacagttgatggatagatacgcaatatgcaacatgcaattttaaaatttatcaacatgaacagcaatatgttgacctaaaaaaaattcaggcaactgaattgaatgatgcctaatttcccaaagttgctgtgccatgtaaaacgctgtagaggagggagtacacatattaataaatacaatcaaagacatatatgggaattaacactgcttagcatcaagattgattccccgtacaaaagtggtttcttttttttcctcttcaacgcttttttttttcgccaccacaatcagaagtttctgttgcagtactgagttatttttatagattgtggaaaccttgataaattcttttgagaattagctgggtcttaaaagaatctctttgtttcagcagaaaatatagtctgagcacgtaagcctccgtgatagaagggcagatgctcctgtggctatttttcacttttcaatttcccttttgtttttcaatttaagtgacatacttaattttactaccctaattatttggcaatattattgtatcctgtgttgtaacttgcaggatactcttccaataataagaatatatttctcataaatttaaattaagaaacaataaagttactcatcagttacataattttaacttgtccagtccagaattaactttgtcttggagtggtaacaacagacacttttctccttaccaaaataaaaattttaactgtcaactgtgtattaaaagagccccccattaaatgattatattcctcctatcgtattttctccaattcaaatacatattcatgtagtataaatttcattttgtgcaggaatgacagccagttatgtcaggctagattgatttgattgatttgcttaacaaatgttttctttcagaagatccaattattcttgtaggccatcttggggaatgcacacttgttctacagcttgattcctagctgtggattcatttaatcatgtttcactataaattcatgaactgtagatagtggtgtccaggcaattttttcttaaattattaatagatacatccaatgttaggtatgggtttaaattgttgtccctgatacaaagtatgttttatagcagaaatatgattgaatgcataatttatttaaggtttagcaaagatgcaagacgtgttcctttccaaatgcaaacactctgaaagcactgctagataagtaaacactgtgctttaagagagagtgtgtgaggcaataaatgtcatccccaactcagataaacactaaaattatatttatgtgatgatggagatgtttttgtggcatctaagcacctttaaaacacagccaggattattgatgaatatgccctttacagttgctttggtttgcttgttttttgtttgctttgtagtgatctttgacagataaaattgtttttccattaatcccccttcattgcaatgtttttaaatccccatatgttctgatatttccaaaacagtgagttgagatataaaacttatctgaggagatgacagggctttcctcttcattttcaactgacatttgttattgattggatacttacctcttctcccaactttgggggtcttctgcgttgttgggaaccttctacatttccagtggcaaaggcactctccctggctcaaatttaacacctccaaattagtccttaatatttttcatttcaaaaaaatgtttgttttcttaatcaatgaaagatttcaataatattctgagaaattttcttagtgcctataacctacaatttagataatgaagcaatttatgactatccacttatgttctgctttgcctggcatagacaatgacatttctccttgcaggagtcaataggttttgtgttggttcatgctcatggtgatagtgagtttctgtgtgtgtgtttaattatggttgatagtccaataagaaataaccaagtgaatacagctttaatattcaagtggcataaaatctgagattttcaaggatccccaagttcacaataaatgtgtatattatacatgagaacagatcaacaaagctgaattgaaatggacatgttcacctttaacctgacttaatcattagtcacaggacatcccataccagcctggcagcttggtatatttgaactggtttccacaaaataaaaatgtctaagaaagtataatggaggttaccaggtggagggagagggcaatggggaattgttttcattattttttaaatttatgatttttaaaaaatttttttgaggctgggtctcattctgtcaaccaggctggagagcagtggtgcgatcatggctcactgcaacctccacctctgggctcccgtgatcctcccacctcagcctcccaagtagctgggactacgactgcataccaccacccccggctgatttttgtattttttgtagagccaggggttttgacatgttgcccaggctggtctccaactcctgagctcaagtggtccactcgccttggcctcccaaagtggactacagacatgagccgctgcacccagcctgctttttaatgggtacagagtttctgtctggatgatgaaatttgtctgaaaatattagaggtgatggtggcataacactgtgattgcacttaatgccattgaattgtacacctaagaatagttcaaatggcaaattttatgtcatatatattttaccacgataaaaattaaataaataagtagatgatacttaagtgtccagatttcactaaaaattgaagaacaacaacaaacaggaaataatgaaaacgttagaagcctaattgccaagactatgccttatttatgatagtaactggtgatatttatatctaacttttaggagaaagggtacctattactctatttcactgaaataataaacaagtataaaagctaaaggaatatgctattttttttccacctattaggcatctagagttataaaggatacctttttaagaattctacaggtccttctgaccggtatattcagacgtatagacctcaaaattactagtgatgaggatgataaattatgatacatttatgctaatcccacttgtccttaacagtcacaattgctccgtctgatcccttgtctcccagtattttccctaacctagcgattaagtgatgatagcagagggtcactctgttcactttgattcatctgcagacatctatattttcatgattctggctttatcgtggtttcatcatctgtgaccttctcttgcccttgacagagttggttgtgcattcacaaatgattctgaggctgggaaatttcttttttttttttattgtcaaagctcttaggtgctggacattcataaaggagaaaccacaagttctaaaaagcaatttgtgccttccatggtgactgggaagagttacatatcattcccttctgccctggcagacactgcactagacatttcccctctttagaagaatttgcccatcttggtagtctgagggagcaaaggatgaatttggaaaggtcatgttgttttttcaatctgtaacaaaaaatttcacaaataatattttgtcttgtattacatacaagatacagtcaagtaaaattttaaatgtaacttacatttctcaggaagattatttaggtagtaagatgtctatgttccttcatgcctccccactcctaaacagcctcttatcttcctggaaaactcttttcatctccagtaaaaggtgtcatgttacttcctgcttgatgccttcctcaccttgcccagatcagtttaatctgttcaacttaccaagcaagcttaattattattatgtgattttaggtctgttattctcttcagcttttggagccctctagagcaggtctgtggcctaactcaattttgccatcttcctcatcctatgccagtcattttttgtttcatttctccagtaagtcttttgttcttgaatgaatgaataaatgatgaatgaatgaatgaatgaatgcttaaacaaacaaaaaatatccagacctatacattttatttatttttctgtttctattttgctgataaccagtaatggctttggagtcagagaagggttcagttttaatttctatcaccttagaagcagtttcaccttggataaattacccaacccctctcagcctcagtttcttcatccgtatagtaatggttataataattatgacaaaaagaaggaagtcaggtgattaacgttaggtaataatctctctaataggaactgatagcagcagcaaaaatagacataagcaaaatcttgaattttttttataagagaactttcaccagagaaataacatccaggaagattcctggagatcattagaagcaaaggatgaaacagtggacatgtttcataggcattcttcaacctaaaataaatgggttgtgttttaaaggtttgtttctgagccgattgccttagagctcagaaatacattctttcatacaaacaacatgctagttgatggctctgttcttagcacagcctacaaagtgtaggtaccttagaatatgcactaaataaagaattaatagtaccatttcagttatcataccaacatttttctatagggcagtgtgttctgtgttcataatttaaacttctaggaacacaggaaacatctggaggaaggaagttagagaagaaaatttggcaatcaaacagatccagaagatagaacttattgaaatcaggtaacaaaatgaaaattaaatctaaaactaggcttttatacccattttcaagatgataatcaaaattaaccaaaaatctcaaaaatgaatctttagggaacatattacgtgggaaagaactgtatgaatattactgttaaatagaactaaattaaaatcctgagttgatatgtagaattccagaattgtgaaaaatgtatataacttcttgagttttaatttccttatatgaacatggaacaataatactggaaatagttgccaagaagaattataatgccctaggttattaggaatgtctttcttgtatcatttatcttttatttttgaactccagcattagcttgcattcaaacacttatatgtgatgtatacatttatgtatatatgtatgtatgtgtctgtatatatgtatgtgtctgtatatatgtatgtatatgtatgtgtgtataaatagtatatatagtatgtgtgtgagagtatatatattcacctgtatgtgtgtatatgtgtgtgtgtatgtgcgtgtgacgtgtgtgtgtgagatgtgggtgtgtatatatgtgtattgagatataggtatacacacacacacatatatatacgtatatatcacacatatatatacgtatatatatgtatatatatacatatatatatgtgtgatatatacgtgtatatatgtatatatatacacgtatatatatagtccttgaaaccgtttggctcaaaacacctctattatttagtttttttctttctacagaattctcaaactttccatatatttttcttaagctgcttcttgctccccttctcatcttgcccatgcttagatgctgtcagatcattcattttgctacagtttccattcattttgttgccttcactctgtctgtgccaccttccctcgtggtttttgattctcagaacttttgctgaggtgtcttcacttttcttttcttccatggtctccctaaaacccatctaccactgtgattgtttttctacttctattgaacattctcactttaaggttttatggagcatttaaactccttctttgtatgttccccttttgactcttcatattgtcatctttatcatcctgaatggttgcctcctactttccccttcagactggggttttcagtccatctttggtggaatatttggtctccacttatttcatttttattcattattgtcctggttctttgtgtagaattgcctctccataaataagccctgtttctccttttgtagaacagtttatttttctgtatttgtttctccacatcttgttcattctagcaactttctttttactcatttgacttttcttccaacatttgaaatcaaacatcaatttattttataagtatttcttttgaattgtcatgcaacattctaaactcaaatcataaagtcagagaattttagaggtagatagaaccataagtatcaccttggccagaccgtatgtattaccaaaaaggaaagtaactggaaaacatcttctcaatgcccagctcttaagtgttatcttccccttgcactccagtgaaactttaggttgagtcatattctgtattgattatcagttccacctgtataatattgtttttcttctattcaaaaatggactgatatagcatatatggttatctttaattgcagtaaattacacatcacataaaattcactgttttaaagtgtacaattcactgacatctggtgcctttatcatgttgagcaaccatcactattgtctaattccagaacatttttatcatcccaaaagaaagctctttgcccaagaagtcactccctagtcctccctcacccctacctcctggaaaccgccattctgctttctgtctctaagcatgacctattctagatctttcttctaaatggaatcatgtaatatgtggcctattttatctggcttctttcaacacatatagttttataatctgctatttacaacttgctatgtatggttatataatctgaaaacatagcaaaagtgtatatatattataaaagttttgaaaaatattcttctgcatacacagtgcctttatttttatttatttttatttttgacaaggtctcatctgttatgcaggctggagtgtagtggcacaatcttagctccatgcaacctctgtcttccaggctcaagcgatcctcctgactcagcctcttgagtagctgagagtaaattagtgtgcaccaccacaactagctattttttgtagagacaggtttcaccatgtggcccaggctcacaatgcctttttatattcccaagttttacatgctttgtttttacccatgctagtactgtgacctttttcctacaactcaaacaactttcctgatgttgagtttaattcatagagcacacagagaagcatgtcccagttgtcctgtggaacacttgcatgcctgtcacagacctgcctgggaagctcccagcagacactcagtcccacttgacaaagattcttcattcattctggtttttgtcctgcagtctctaagtaaatataagatgtagactgatatgaagctctccaaaactcctcacttaccccaggtttagtaactctatgtatgtccacaaccaaaggccatctcctttaatatccaccaccttctagcatagtgggaacaaagagacttgtcacacttatgttcttgagttgtccccataacaaccactttatttctccatcttggttgcctcttccctccaccagtgacatctgcccacttttgcagacctctgccttaaagtcctgcaccactgtcctctttaacagtggagaaaggccccttctgtgccattgaccaagggatgaatggtggcaggtcacacttctttttatccctgcccttccttttatcgtattttttgttacttcaccaccacatcttttgatatcttcttgccagtgaagtgcagaaggaagttggttatttggacataactcttgaatgaacatgcacacacacacacacacacacacacacacacacacacacacacacctgccaaacacaaatttgttaattttcagtaataatacagtctaggtctatatgaaggaagcaaactttccccaaatgcattatcatctgcagagagcaccagcttcaaagaaaacagagttcaatattcattattatgcagattgatatcaatcacacatgctcattaacaaacaacaaagtttaccttctgccaccaagagtgtgcccagaagaccacctacatgaaaaacagagtcatctactcattgcttttctgcccttagcacaaaatcacatttctaggcaacactatactactttttgcgagcagaagatgattatgggagcatctcctacacaagcaagagctgttcacaggaatgctgagatgctggaggaggctattctagtaacatgttctttggattcatccctattttaattaacaatcagagtcctcacaatattatttcgggtagggtaactgttttactcttgcaaagcaataaaccttactttaacagaatttaacagatatctctttaaaaaactgctttaatgtttttaccttctatcttctttttctccagctttatcctgacagagaagttagcactaattaatctattttctcttccccctcttttttcccttgtgtgtgtcttttctgccttcatctaccccagtgaatttgttcagcattttggctcactcatttcttcagctaactacagcttactactacagccaccactactagagccactcctgtctcatcctggatggttgacagagatgaaaacatcttgctaaagcaaatatacagctcccctttcactggctctccagtcctcctgctgtctttgcttgacctcctgcaactgctataataccccaccctttttcttctctcactctctccactgtggccctgatagcttctttcaaacttgcaaacacagttgtcagactcttgtgacaattctgcaagcaaggtacatagtacataatacataatacttaatgattatcttttatcttggtggattactgattgaaaagattgggcttgagaaccctggcttcctacttccaaatatgattctttttctttcctgttgcttacaaaatggtgatatttatcatgtcaaagttaaaactactcagactgtgttaccacagaaattcacattaaatacaaaccatgactacttgtttccctgggccaaaagtcaggaaggattttctccaaaacaaaattgtggaatatttgaggattagtatgtgcaggcacagcctgctctttccactttcgccccaatcctaaatggagatgacaccatcaattaatcaaacaacacatatttattcagcacataccctgcactaaatggaattaaagccaaaagagccacatttttcaaatgatgtgaagggcaaaaatatctctgtgttcaaccgggcatgtttgttttaaacagatggctaggcacccacttctatttatctgcatttcattgactttctttccaaatgcatactctgcagccacagcctcctttggaaattttccttattttaaaatggttacagaaaatccttacaccactttgttcttttcagaatgactcgtctagaatctagataaaaacagccgcgaacaggagataacttgaaaactattgtacaaattactgtcttttctttcaaggaatatctattgatatggtattcccaaattagcccaggatctaaacccatttgcaggcagcctgtgaaggacaaaatgtctgggccctcaagcattaagtattgtaaatgggatgagaacagtgtgtcctcagtgttattgccctagtacataactatttagctagcttattatatgatctgtaatagtaaatagtcataaactatttactatttaaatattaatagaaataaactacttttatgctgccctctgatgcttttattgttatttttaatttccagttatattttagatatagggggtacacgtacaggcttgttacatgggtgtattatatgcagttcatgagcgtagtatcaaataagtagtttttgaacccatgctcccttcctgtcatccccctccactagtcggcagtgaccattgttcccgtaattatgtccatgtgtgcccaatgtttagctccctcttataagtgagaacatgaggtatttggctttctgttcctgcattagttggcttaggattatgggctccagctccatccatgttgctgcaaaggacactatctcattctttttcatgacttcatagtattccatggtatatatgtaccacagtttctttattcagtttgccattgatgggcatctaggttgatttgatgtctttgctcttgtgatagtatggtaatgaacatatgagtgcaatatgtttttggaattatgatctattttcctttgagtatatacacagtcatgaaattggtatgtcaaatagcagctctgttttatgttctttgagaaatctccaaactgctttccacaggggttgaactaatttacattcccagcagcagtgtataagcattcccttatctgtgcagcctcaattatatttgagtttttaataatagccattttgaccagtgtgggatggcatctcattgtggttttgatttgcatttctctgacaattagtgatgatgaccatttttccatatgtttgttggctgcttgcatgtcttctttcgaaaagtgtctgttcatgtcctttgcctaatttttaatagggttatttgattttttcgtgttaatttgtttaagttccttatagagtctagatgttagacctttgtctgatgcatgctttgcaaatattttctcccattctgtagggtgtctgtttactctattgatagtttctctggctatgcagaagctctttaatttagttagatcttacttgtcaatatttgtttttgttgcaattgctttgggggactagtcaaaaattctttgccaaagaagaatattttctaggttttcttctaagatttttatagtttcaggtcttacatttaaatctttgatctatctcgagtgaatttttgtatatggtgaaaggtaagaatccagtttttgtacattgctagccagttatcccagaaccatctattgagtagggagtccttttcccattgctcgtttctgttggccttgtcaatcatcagatggttataaatgtttggctttatttctgagttttctattctgttccattggtctatatgtctgtttttaccagtatcagctgttttgttcactatatagccttatagtatagttcaaagttgaatagtgtggtgcctctggctttgttctttttgcttggggttgctttggctatttgggctcttttttggttccaaattaattttagaatttttttctaattctgtaaagaatcatgttggtaattttatatttaatctgtaaattgttttgggcactaaggccattttcatgatattgattctttctatccatgagcatggaatgtttttccatgtatttgtgttgtctcagatttccgtgttatcattctctttgtagaaatctttcacttcttcggttagctgtatttcaaagtaattcagtttcttcgtggctattgtaaatgggattgtgttcttgattttattctcagcctgggcattattggtatatagaaatgctactgacttttgtacattgattttgtattctgaaatcttactgaaattatttatcagttctagtagcctttcgacagcacctttaaggttttctaggtataaaatcatattgtcagccaaaaaatataatttgactacttttttttcctagttgtatgatttttttttttttttcccttgaggctgagactcactctgtctctcaggctggagtgcagtggtgtgatctcggctcactgcaacctccgcctcccgagttcaagcgattctcctgcctcagcctcccaagtagctgggattacaggcatgcgccaccacacccggctaatttttgtatttttggtagagatgtggtttcaccatgttaaccaggctggtctcaagctcctcacctcaggtgatctgcctgtcttggcctcccagtgtgctgggattacagatgtgagccaccatgcccagcctatttgtatgatttttattgtttcttcttacccaattgctctgggaagcacttctactactatgtcgaacagaagtggcgcataaataaactactgagctaatttattatctgatctaatattcagaaataaatgctcctacctttggattcctttaatggataaatctatctctagaccctcttagtttatgctaactcaccttagttgagtaggtggcctgtcactaccctgatggactacatctcaggggtcagccagaatccttcttaggagccaggcactattctaattattttataggtattaactcatttactcttcacaataaccctatgatccagtcttatctttattttagaaatgacgaaactaaagcatacaaattttaagtaaactgctcaagatcacgcagctagtaagtgtcaaagctggggtttaattccagataatccaatttcctttctgcctctaaaaagccttgtgtgttacagatttagttgttgcctttcttattttatctagcctcatgagggaaagaactggtaatctccctcaccctcaggcacgtttctctgtagactccacatcttctcaggaggtagtgaaaaggtgggaaaaataaattactgatctcttcaacttcgagcaacacgtccttcttgctggtatttcctcaagctgtagatggtgggctttctcctcttgcgggctcctgtggtcctagtctttctagagaagaactatattaatatggtagatggtcatggatgaaatacaaaccaaaacgtttttacatattgagcacttaattactgatttgagcaagtcttccaggataggtttgactcactgatctatatcattccctggaatcctgcccataacccatcacagtcacggatctccgtaggcggtagtgtgttttgcagttgcagaaaacctctcaattccttcaaatacaccacagtcagaaagtcctatgacttaggacttagttctctgctaaaatgttcataggatggaagatggaagaagcatgacagaagggagttaccagagagttggagtaggggcaggaatgaatgcaacaaaaatggcagccagggtgctgaggtgtataaggttctcttgtagcctgccactccttgggggagcatctctaaacatttaaaagtactaaaacacttcacacattggatcccaagtttttttccatctcatttggttttcttcagtagccttagactcctaggtctctgtgatgctgaagccactgctgtattcatgtggattatttgacatcatgcagaaaaatataaccagtttattgctggaatttttttttttttctttttttttttttttgagacagagtcttgctctgtcgcccaggctagagtgcagtggcgcaatctcgactcactgcaagctccgcctcccaggttcatgccattctcctgcctcagcctcccgagtagctgggactacaggcacccgccaccacgtccggctaatttttttgtattttttagtagaggcggggtttcaccgtgttagccaggatggtctggatctcctgacctcgtgatccgcctgccttggcctcccaaagtgctgggattacaggcgtgagccaccgcacttggcctattgctggaatttttaatcttcccaactggttggttgttttggcatcctgttgggtgtcactagatgccatttaaaacagattacttaaatctaaattttaagaggaaatttagaatctgaaatgagaacctataaataatctcttgagtcttaactggctggccaaacaataaaataaacctataataaaattctgcacatgaggcaactaatctctaaatttaaataacagttgcatttacctccagccaggtgtttggaaagtaaataatgcgaagcagtgattgagataaaatatggctttacatgaaaaatcagtatttccaccttcctctttttatattcaagttaaaagtagcccattgaacttttaaaagttgaaatatatttccaaaagaaaaaagattcattatttattgttatattgttgacataccagagtaacacagaatagcttttgaaatgcatagaccatcacaattccttttagtgatgaagggaaacattagcatgctttgatttggccatgatgtcccagacattgtttgtcattagcttagtaaatggtttaaagatagaggaaatgatgaacttctactaaaatttcagaggagacttgaaagtttagtttgattgcagtgcagccaacttcatatgttttagtgctattttaagttgaaatttctcccctcctttttttttaacaataaatgtaaatagcagagattttaggcaattgccaaggtgtttatttgttcagttagccatttctactaaaatctttgagccgtcctagcctcacctagcttgaagctaatattaacagcatctgtagttcgttgctgttcaagactcaactattcctgaggctgttcaccaaacatgttacataaatcattcctagtcctcacaacagcccattcaggtcgatattatcatctccatttaacaattaaagaaacaagttcaggaaagttaagatcacacggctggtgagtatttgaaccatattgcttacctgataaaatgtagtccattactataagtcccccacaacatggttgtaaattccatttcacctaaaatagtagcagggctgacagtccaacttcagcaaagttcctgcataacatatttcatcttgaataagtaatggcatctttttaacccttaagcatttgataaggttcttttgttgaaattaattattgataagaatggtcgcatgaaaggatacagaaagagagatgttgtgaaagttaccccagatcatttaatttagtaacagtagttagcaaaaaatatatatatattttttttctttctctaacctggattctctcttgttcatactactcccagttcctaacccagtgccccacattctaagcagccttgaaatatctgccgaaagactgaatacagaaacgaataagtgcatgaaggaataaacacataaataaacaacaatacttatataggtgttagttattcttaaagttctattatttggtgacatggattaacatgtcctttgaaatttgaatccaggtggtaaaacctagaataacaagctagtctattatacagatgctgtttctgtcaccccaagaaatactataaagtggcttcaatgtattattataaattaaatatgatcgcttttttgctctttggacagaaaatgactaaaagatgaaagtgtgtaagcacacacagtggtgtctgataaacctttgttggattgagtggaatatttcacagcaatggcaataggtacttgtaaccaaactctcaaatattgtgtgacagttgttctgattagctctatctcaccattaatatttattgaagcaaaatccatcatggagaattcataataccttttgcatctgaaatttaatggcatatttttatgtgaagcataccagtctcctaagctgtgtagcatttttttatattctttactttctgcttaggtattacttttataattgaataattggctattttttcttgtagatttgttcccaatcctctagattttccaagatcactatgagtattattaagtaaacaaaatcatgaaccatggagaaaagtgcttttagaaaagggttttcatggtcttgatgagctttattttttttttctgcaatggccacacatattttagctactgaacaaaatctgcaaataaactcttttactcatttgtgattactgaataaaatagaagtgtacaatgatataggctctgatgggaaaattttgtaaacaccaggtggagaggacacagaggtgatgcaaacatcttccacattttcaaatgtcagctgttctcaagagaggaagcttaaataaacatcatttatagtcttagcagatgttatcgatacgtaacactttaattgtagttttccaatatcagtgctgttaataacagttcagaaaagatctgaagtgctttgattttaatcagtggtcatttaaaaaatagctgtgctaaatggcgtatgtttgtctttaaatcatctccgttagacagatggtatctttggaattgttgtgacatttcattgttgctggtgactgatgactcattgtaggaaaatccttgtgtacacaatacgtgaaaataagattgtttggtgttctttcctacagctaattttcaaacagaatttcaacagatgtgacaattttaccaagatgttgtcaaaataagagcaacccactgacaaatgaaatctggctcatgttcagccctttggtaccattctggtttgttccaagtatcaggagactttgtatcaatgtcagccctgataacttgatcatttcagatggcacactgtcaattttttcatcctttctaatgactcactttgcaatcgagatgcaacacttcctggtttttcttttcctccacctccccccactcatgtattaccaaagaaacaatgcttgtaactgatctttagttgtttggaaataaaatgagatcatctactagaaagacttttagaggtcatggagaaagatgatccatgatgaaggaactcacagggtcctaaggaatttcaggtttagctgtgaatgttagattgataaccttgcatagtgaaaaaggtaactcctatgacaattcagtcattgcttccttgactaacgtggtggtactaaccctgggaaaatgaggtccacacataatgatatcatgcattagtttaagtgtaaaaaaaggccgtaaaaggagcccattattatcaatggcaactggatgagcaatactgttaaaatactgggttttattacagtgagctgacacaacagaatattcagaatcacttaaagtagcccagcacaaaaccctttaatgatgtatcatcccctaggagggctaatcaaaaacagataaaagaggggagacaataatatttgtgcacagtaaatcctattttaaaagaataatgggatcaaggtgtaactttgtttttaagaagtgggtagtgcgtatagtaaaatgtaactgtgttttctctgaatagcgtattttattcctgaccagtcttccagaagtatccagagggcaaaagtgtgactgaaagcaatacagtgaaaattctgttgtttctcctatttctgaagtgactggcgttgttatcatactgcattattcacctactagaaagagaaaatagcccaaagttttccatttccattatggctccagtaattctcattctgttccgctgacttctacatgggaataaaaaatgttgtagcattctacacattgcagaaaatagcttacactcaaagcccttatcaagagaagaaagttttaatactattgctaccatataaaaagagacagcagtcatttaaaaagatagttttcatttcatgtttaataattatctccttaattattatgtttttgtaaatatataaagttagtaagtatttgggaaacactatgagtttgttttttttttttttttttttttttttagcaagggaagtttggtagttaaaaataaccacgattgggaggctgatgcgggcagatcacacggtcaggagattgagaccatcctggctaacacggtgaaaccccctctctactaaaaatacaaaaaattagccgggcatggtggcagacgcctgtagtcccagctactcgggaggctgaggcaggagaatggcatgaacccgggaggtggagctttcagtgagccgagattgcgccactgcattccagcctgggtgacagagcaagactccatctcaaataaataaataaataaataaccacgaatactttgcaattcattcggtcaagaggaggagactgtttctccctcttttatttgggttgaccttgtaccttgctttgaccagcaggatatggtagatgtgatgccatgggacttctgagctgaggacttgagagagcttgtagcttctttctgtctcaccctcttaaaacttggtcaccaagaggtaaactgaactagcctgctggagaggccagtggagaagaactgaggtgtcctcactgccagtccgttatctgccagatatgtgtagacagcctatttagaacattgagcccttgtcaagccaccagatgacagcagcctcttaggtcacctcagaggagaccagcagaaaaactgaccagctgagcccagccaaaatcaccaactcctggaattatgaatgaataagggatgactgtttgcagccactacgttttgtgacaatattttaggcaggaaaatattctgaaaaagtagagtgaaaaatcagatccagcctggccagccctcttcccgcagcccagcacatctatcagcccaatatctcctgccatgaccacaggccagttatgaaaggaaagaccaccatgatcctctgacataaactctgtgctgtcacgtctcctggggaaaattattccactgaggtcatagactgagttaaattacaagctgagggatctcctcctggggcacctttgcttgtatgatccaccttaatgtcaaatgattctatcctttttagtgtcactggctgcaggcaggcaaacctgcttactcaaatcaacttgacataataggaataagaatgtaaccattgtgcagcaagccagtgacagaacagatcctcaaagaattgagtgggtcctcatctcctgcacttgcctaaaacaatataaaagagtgagccaaggtatatgtgtgtgaatgtatatttcctttacagggtagacttttcttttgcttcatatgggctaccagacctctgcttttgagcacacctctgttgggtaactcacttatgcttttgatcttctgtgtatactttgctgtgtttgtttggtggaccaagagctaacaaaagtataagcaactttagcccagcccaagtcaccaacttggacagtctttcttgcctaacctagaacagatattaaattatttaggagaaaatgagactttactatcagttttgtttgtttccttcatttttttttttttttttttgagatgtggtctcactgtcgcccaggctgaagtacagtggcatgatcatggctcattgcagcctcaacctcctggactcaagcaatcctccctcctcagcctcccaagtagctgggactacagtcacatgccactacacctggctaattttttaaaaatatttttgcagtgatggggtcttgctatgttgcccaggctcatctcaaactcctaggctaaagtaattctcctgcctagacctttcaaagtgctgagactacgggcatgagccactgcacccgacatgtttcattatttttttaaagtttagactgaaggtgatgtcatagatttaaacagtctctccctaaccaaaatttggatggtaaggcagaagaaagcatgagaaagggaaacttgagggaaggtctccaaatacagaaaaggatgatgatgaaaagtattcacacatgtggtggttttgctacttttttctccatttcatttacgcaagcatttgctgagcaactgcagtgtgacagtcactttgctgggtgctaaggggactgagatgtgtaaagtgtgacattttcagtcagaagtttataatccactggtgaagacagacagtacaaatgaatagttataattcagtgctacatatactatgattaaagtatttgccacgatgtacaaaagtagtagtttcaattttgaataatgagagaacagacacaacctctaaaaactgtactgtttcccagcaccaaatatgcttacatattggaaatgatttgtttgccattcctacatgctcatatttgcttaaaaagactgaaaatgctgtgtatctctttttatttaccatcctcaagcacaagtagaaactcaataaatatttgtgattcctggtgcaacaaatgtttctgcttcccctcacctgcctgagttatgcacctgtaaaacatctttctgcggttcattctgcactgtgcctgtcattgtttggacctaggaagacttctacctgattataaccaagtgagatatgacaaatatttaaggaaaattctagagaaatcacttaatgcattaaattgatttttcagaaaaataatgaatggtatgtgttctaaattttcttactctctttaccaacgagaatgcattgtaagctctcagaacatagatatcagaacttattactacctcagagactacacacattgtaaccctttaaaaactgttggcaaattggactgaatagatcttctgtaaacataatctaataggtaatcccgtgggcattgactcagtaaaattaaatgtcaccttttaaggcctttctagaaatgcttatgaacatatgagtaaaaataaaaaattaggagtgctcattttaagataaaatttgtaactgaatgttttcctttaattcccttgaactcagatcttagaaaaaaacttcaatataaggcgtagctttactttctggtgtacttagtaaaatgctcattgttagaagaaatgaaaggatgtagccaattgatatggaagagagagtgggccttcaagagtgcagggcattaataaaaccaaaaatacttagaaaataattgcttaatacatttaaaatttaattttaaagaaaaatataaagtgtggatgattaaaggtctttaaaattttaaacttctgtagctttatccaaaggcatttctataatcacttaattctgtttctaagtaattggctaacacaattagcttaaaaaacagtttttaatattcacaaatcagttcacttgtattatactcatttttttctttaatggaatgcattctgttaatataagacaatattcagagtgtgctttcttatttgtagcaaaatcctgttctgaagaagcacatgtttggtacaagccacctgaaatcaaagacttagagaaaagtcacttttaatccaattaaaatagccatacactttcatatcctttttaaataaaatttcaaattaaaaacctttataggtttccttagactggctgtggaatacataaaggtgattccattagatcctattctaatgaactgggattatggaaatttccacagatctcttcttagtcacatttaataggaaatatatattacatacatatttatggaaataacaaattagagtttaatgtatgctgtactgtcaaggatcaatatagaattatttggaatgacatggaaactaagaggcttgagaaatttttgatgctagatgttggtataatatttgatttagttttccccagtctctcaatatttctagattccacaaagatccaggcatctcctgaagataacagtttcttactaggcaaaaacccttgggatgccttgatgctaaacatttagaagatgctcagaagcatgaataatcatctagcaccaaccgaagagataataaaaatgtgatacacactgtggtcatcttcccagctatgttctacttctccccagtgttatggcagcttagtagtttaaaagggattgatatcaactgtggtttgatactgattgtactggttgtatcagcaaaacccattcagttcagcatagaaaaatacagagagatgtgatggggctttagaaaaagattcccatttgtcctgcagtgagagccactagaagagaccctcactatccctggaagtagagaaggaaacctaggatcccaactgtgcttagcatcttgtagaaaacttaggatgaagtgtatgccagggatgcctaagcagacagagaaaatgcatccagttccttggcgatatcactgagctgcaaacccaagcaaccatgaagctatccttaccccttcacctccctgttactctttgctccattttgcagttgaaggcctcctggctaataccattaacaaactaagacttttttttttacactgtttaagattgaggtaagatatacatataaaatatactatctttaccatttttagtgtatacttcaatggtcataaatacatttacatccatttttttttccttcatccctccctcccctctattcttcctggcctctggtagccaccattctactctctatcctcatgagatccacctttttagctcccacatgtgaatgagagcatgtggtatttggcttcctgtgcctggcttatttcacttaacataatggcctccagttccatccacgttgcgcaaatgacaggatttcatttcttatggctaaatagtattccattgtgtatgtgtaccacacatcaccaggtgtgattatgttcattctccaggtgaggttaagggacttactgaaattctgtgtggtctatggccataccatgctgaatgtgccctatcttatctgaagttgtctatagtgatgaaaccacatgttgcagaacaatttaaaaaataaaaatcttaagagccttcttaatatttattcttttcgatttttccatagagtgtgtgcctaaattaaatctctaggaatgataataaagtagtgatccttacagcagggctattttgtagtctgtatactcataattaacctgtcacgaaaaaaatttggggtgccataaatcagctctactagaggaatgagtatgcatagacaaacaaaacctgacaaacaaaaattgagaagtagcattttcatcccatgaggaaattttaaaagaaggctgtagatagggagcagtaattgagagttgctcactggaagaagtgctttttctgttcttcctgaggtggccaactgcatctaagatggaattatgcttttactgtttatgtttttccctacacttatacctctgtcctagcagagcattctcagctgggccggaagacccttccatgcccactgttgctgctgctggaagtctaagattaaatgagtaaggagacatccaatgatatgacactgtgttagaccatggaacctccggtcactcatgtttatcaccccattaattaggtgctaattgcaaaagctccttaaatgtagctttctgccttgctcagtgccctgacaacctgatcttaggatgaaactcgcatcaacaccaatgcctcagagaaacaggcctaatatttgtaatgttcaagttacagagtttagcctcaaaggaaagatgtgcagaagcttaagtttttatagcagggttaatgccctcattatatattcaacatgctttaaaaaagacaagatacaatgtggcaaaattatctttcctacaaggacttgcattttgatagttatctattaatgttatccagaataagtcgtgtaatttcaaaacaatatgctactcaaaagcaaattagatttctcataaggcaacttctttgaaaacatttttgctatttcaataataaattattctacactgaggatcagtttcatgaggacattcaattttaataaatcaagtatttctgcctgatttagttcaaaacaaattatttcattttcttaaagccaaggcactaactcttttactttacatgactcagacatggctgaacacattacagaaatcttctaaaataattcattattgaatatgtaatttattggtaaaataactagagaatacttatattctctatataataggaatgtgaaagaagtaactgtgtatggtgaactttggaagtttcttttaccaatccaaaatattttattttccctgaaaaaccatagtctaagctcaggcaaataaattgaaaataaaattttgaaatacaagttgtttgaaatatggggattgccagtaatcttgttacagtcaatacatattgctgaatgccatcaaaaaattaattgatcatggtttatattttgctcttggaacaaaaggaagctctcccacattggtgataaaaatccattgaaaatacatctgttgactatagatcaatgtgatgctacagactgtcttttcctttaaggaaagtgtaacttaagatggataattactgcaactcagaaggataaaacacatgtagccagtgtggcttttggcttttcctcagcaagcttgcccttagtgacaggattgcagaagagagaagctagaaataagaaaggccagagccagaggaaacgacagaactgtgggactgctccttccctccaaccccaaggaatgatcaccagctctaatgaccatgccccaaatttcttatctttgattttgacagctaagatgacttgacaaagctaggctcacgctgggcaggaggagtatccagcgtcaggctagtggcagaagctcagcctggttgcatgaccctgatgtgcaggacagatccatcccttaggcagagaaggctgacaaaatcagacaggatgtctggagtccagcctggactgtagaaccctggtcttggcctacaaatgaagccacaaaggcttggtccaatcacataggttaagcaaatgaagcctggcagcaaaatggtaaacactccccaagcacacttcactttggattggcaagatttgtttgctatccgctatcaaatggctgagctgctcactaaaactgatttattggctcagggtaaagcctggtagattaaagtcttcagtgactgacattgagcaatcctaagaaaaagaatagggatcgacagcccttgcatatatagatttttcatttgggattatttagtttctttggggatgctatgtatgtccctagagatctttataaatagaatactcattagtaagacatgaataaggggaaatcaatcatttctggagatgttttgcatcctaaggtgctttcaggttccccccactcccaccatgtagacttttccattgctctctgttggaatctgcaagtcttcatgaggtaatgtctctaagagcacgaatccagagtagacagttactgtgagttctctcttctactttttgaagctactgaaggcctatgtttagaaaataaaaatagattttaagagtttgtgtcctactgcatcattttccttctaagttagagaatgctattggaaatcttgtgatgagccaagaaaggataataggccccttcaccccaatgagatgcaaattccaggtgcttggctggaaccattcactagctaaaggactctcccaaaaagccttgcatttgtatctcagcaaaatggaaaatttctgtagaccatcaaacatggtgtctgtctctctctttctctctctctctctgtctctctgtctctctctctctctctgtctttctctctctctctctccctctctgtctctctctctctctccctctctcagttaaatcttctaagtggaagtcctcaatgtcaagagtccactgcactacaggtgtaccttgcttaatgacagggataccttctgagaatgtgtcattaggtgattttgtccttgtgtaaacatcgtagagtgtatttacacaaacctagatggtatagcctactacacacctaggctatgtggtataacctattgctctttggctacaaacctgtgcagcatgtgactgtgctgaatagagtaggcatttgtaacacagtggtacttatgtatctaaacatacctaaacttcaaaggtacagtaaaaatatggtgttaaaatcttatgggatcaccataatatatgcagtccatcattgaccaaaacgtccttaggctgcacatgaacgtatttccattatcacatttggtctgcaatttgattaaactgcttccaagtgacaacagggttagaactttctagtcttaataatcagatgccctttgatacagttaattaagccaaaaaaaggcatgatctcttatctaactatgatttctataaaaaaataagagagtgagagaagggtttttgttttgtggtgagacaacaaagcatagccatcatagaataaaatgtttaaaataacgtgtttattaaaacgtttgatgaaaatggtaatatctctaaagatttgagtgcctttctcaccaatatttaccctgtttcagttattttataccaaagtttcttaactgagaacataaaagatcaacttttagagagatgatcgattctcccatccaaaactacagatgcatgttttactgagaaggtcctatagttttttacgaggttctcaaaggggtacatgatctaaaaaagacagagaactagattttaaatgactctcctgccttgtctgcccctccttgcagaagtagtttcagacagagtagtacgtttctttcaactcaactctccctgaaactttttaggcgtctaggtcaggtttgttgcttggccctggagtattctagctttcagaggagcttttcttctaattgcttaaacatcgttttctactttagctccaaggtccttggcaggctggtggttacccaagagaagtgtaactttccccagtgccttcttttggcaggttcccctgccccaacacacagacagtttctctgaattcctggtaatatacaagtgttacacaggcagcatgatgccttgagaatttttggtccgtaggcattgttagtttcattaacatttattctaaggtctttctgtgattaaaaaataatacccatttattacctgctacaaaaaacttggaatacagagaaaaggtcaaaataatataactgttatccagaaatgcagaaatgatgatttttaaggttttttcttttcataatatcttacacctactataatgttatgtacacttccagaatgtattcacttagtatctatagttacacattctaatgtcaatgatgatctatgtaacaaatcttaataattaagttttaaagaaaacataaaatacctaggtggcactgtataaagttttatcctcagtatggaacttgggctattttattttttaatagaaaagataaacaacctcctgtaattaataggacgtttgattttctttcttgaatagaggtatatttttactcagtaatacataactttcttaaaggaaaactatggctgaataagatgcatggaaatgtttccttttaatccatttccttatttttttttgtcacatcctatttggaatcgaaactattattagacatttactatattctaaggaattcacatgcatttttctcctttattttatacaaaatcatgtgatgtaggcactgcttttatcctcactttatagaagaagaaactaaggcttaggggaaatagcttatccaaggtcagaaagccaggatgcagagccaggcatgtccagttctctaacttggaagctcatgctcttacctacaatgctagtgattcccaaagtatggtccctggaccagcagcttcagcattgcctgggaattggtagaaatgaaaactctcctggacatgttgaattggaatggggcccagctatcattactttaacaagtccaccagttgtctctgatgcatgcaagactatgaggatcacttctttctaatagattgcctccaaattttaaaaggtaactgatacaaaaatttttttaatctatattttttaaaaagaaattatgttaaactcttgccaaaggaatattacgttagggttttattgcttaatctttcagaattttactttggggatttcttgagttttatgcattagagatcataataattgaagtgaaattgaggggtggagcatggtgagtgagtgctgggagcatttccgtactttcttcaagttattcatgaatgatgagctgggttatgattcaagtcaacagatgactacaaaacagatgctgttatgcaaatcagacttgctgattggcaataagagaaacaaaaattattttttaaacaggtccaatttttagacatatttttcaaataaatgagttttttattgaaaaatgcagcaacttcacaatcttagttctgttgacccaatgcggtttttgttccccaagacctgctatcctgatcctggtgtatatgtttcatttttcccctttactctgcatgtgactactgatgaggagagacccatacatttagaatgccatttacatatttctcaagtccaggacattttggtgttaaatgtattagattttttaaaacgtaggtgtgattaggtgtaatttaatataaatatggccagctttagtgtccctgggtagccaaaatgcaattttttaaattagtatttgaaagggaaggcctcctgtagccatcataatcgtattttcactgtatttttattcctttccagatctgactgtcttaaaatttaattactattagcaagacctttatgggaagaatagaaatattcttgtaatagtgttagcatattaaatgtaattttcaggtgatcctcctaggattccagcactcctccattgagccaatttagctgccttttttctgccctgacagttcacatgcatccaactcagaaatatattctttctatgtctcctctgatgctgttagaactttgttgccctagtatattagtgttcattcatttgtgatgaaactgtcaaatctgatatgcattttaatgctgttcatatgaataatactaaacatactaattatagcccttctatgtcttaaagtagacttattggtttgttgttgtttatttatctttaaactctgttaatcatttttaattcaattgaggaggttttgaaaaagaaatcaaacattgctagataagaacataaaagaaaaatacacatttttgcctaaaaccaaggacaaatgactaaagaattaatacgaggacctaaaaaagtgtaattgtgaccaaattttaaaagaaatgtataaagggatgttacagctgcggtctgaagaaatttgagagatcgcttcttaatctgcagtcacttgtctgggacaacgtagcagacaagagactgcaatttaagaagcgatctctcaaatttcttcttgctgtgactagaagctcatggcaccccctcccttggtgggccatctcagttctggtaggagcagctgattctcattggctcaagtactcttaggcagcttgtggcacttctgacaggagaaggacagccacctgcaggcttttgcttgccccaagaggttatttgtcagcctgtaggctcctaattacttagaattaacatatccatatttctatgcttggtcttgattggaacgtttattccctaaatcagaaacagcataagaatataaacaagtcgtacttcacattttaattatctctaatagcatttcttcttttttcttgtaacaaatatagagcattctgttaaattataataagtgatgacggctcctagcctgcagttggtgggatataaatttccacttctgaaaactgacacccatggatttcaatagagctaagtgcatggcttttgtgctcagggttcaaattgttttcattattcagtttttagcctttccttaaaagtgaacctgcacccaaaacttgctcactgctaactcaggactagaccaccttttcattccattattttaaaaacatgacagtaaataatccaagggttcaaattcattgctgcatttggtttcctgtcagagaaagaaacagagagacaatcaaatgggtttcattgccagattatagaatcagctaatgaattttcaattatcattgcatttatgctttattatttaaatgttcagaagtgtgtgctgttattccaagccaaattggttttctatgatttgccaagatgacaaggggtgtgtgtgtgtgtgtgtgtgtgtgtgtgtgtgtgtgtgtgtgtgtgtgtggtgtgtctttatttgtggttatttcattatatgtgctgatttttttccttttgattcataacagaacttgttggagagagccaatacatgatattagcagatttactgtaaaaacctcttgaggttaatgatttgtggttcagaatggaagggaaattcatggctagacatatgcacatccttactgccttctgcttcagcctgactttctcagcattggtacatatctttgtcctacctaaggactgctgctatttctttgacttgtagacaattccctgaaattgcaataggataagtactaaaaagaaagtccatagctgtgaaaaagaagcattacaaaatatacacaatttactatttgctttctccctgggtaattagtgaaatagaaggaaagtaaagaatgcagagctttgattactgtctaaaatatcttatgctgaagagaaatcgccatagagttgctttcagatgaccttgacacagacagactattctggattatccaagtggactcagtgtaaccacaagagtccttaaaaatggaagaagatggtcgacaagaaggtcagatggtgttatgtgagaaaaacttcaccagctttatttggttttgaagatggaggaagtggccatcagccaaggaatgcaggcagcttctagaagctgaaaaaacaatgaagcagattctcccctaaagcctccagagaggaatgcagctctgccgacaccttggttttagcccagtgagatctgtgttggacttcttatctccagatgagatagataatgaatttgttttgttttatgccactgaaaaatgaatagccgaggttttatatattcaggaagaacaccagaacttgttcattctaaataaggagaggacatattaagtggatttattttccattttagtagttctcaatacagaattttaaaacacagtctccaaatataaccaatactgagataggaatatgtacaggaagatatacaaatgtatgaatatatgcatctacatctacagatacatattatacacatgcatacacacatatacacatatatacatacatattgtgtttcttcttcttagtcaatttctactcttcctccaataccatcttaggtctcatccttcaatgtgaggtttttttcatgattctagtctacaaggtccacttccttctctcaactgaggtttttcctataacctcaaataattcataatctctcctacaaaggtaagacttatttatttaaaatgcagctgaaatcactttgtatgtttaatttctacatattactgactccctcaccagatcataagcactttgaatacatgaactaatatttcatttctttattttgaatggttatagtcaatacagtgccctatgaataatggtgtttaatactgacaccatattgatgagaagatggacaaacttcctttgtgaaccacgagataaatctagaatactactaaagatatagaatgttataggaagtgcccaaaacatactagcattgaaattgcagataaatgaatgacaattctgggacaacactatccaatagaactttctgagatgagggaaatattatgtatctacactctccaatatggtactcaccagccacatgtagctgttgagcatggggtgtgactgaatttattactttaatatgtctaagtataaatagccacatttggctggtggcctccatattggacagcacaaagacacttcttttgtgtgtgtgtgtgtgtgtgtgtgtgtgtgtgtgtgtttgtgtgtgtttttttgtgtgtgtgtgttttttttaattttttttttattatactttgattagtagactactctttgagttctaagggctagtgtaataaaggattagggtcatttttccactttcctgatgcttttttttaattcctggcgcactgtattaataatggtagagcaatgctacccagagtggtctataattcagaccatgcaaggaattgtttgttactagtccatgacaaattaagtacagaaattgaaagtaagcatttagaagacttacagccgcttgatattgacatagcattcaaatgtggagtcagtgaactcaacgcattaaacaaggcactttgaatattattaaacctgcacagtatcatctggcatatagcagtagggccaaatattggtccttggaaaatcagaaaattttaatagctgcctcgtataggacagctacagatagtttaaaaagtccatgtatagagaactagaaatcagaggccaaaattatagcctattcaccataaatcagccaagttgtatagaccagacctttcagaaagatacgactcaaaaatacaagcactcttataaactataaactccagccttctcaatttgcaaattaaaaaaacaagtactaagaagatgtgacatactcagctacttacatcagagcttgaagaactttccttctagctctcaggcaacctctttttccactatgctaaatggatttggaccaagagagatcttacgattccctcccacaacaaatggaaatctgagaatattactacaacacttccataaaatccaccatacagtcagcttgtgcctgtaccaactgaggcttttctcccctttttaatgggttgtcacatgatgaatttaaaagaaaatcaatgcaaacaaggtatccacatggctcagtgcatatggaaaaatgaatcaatgaaaaccacccttatactaaacttttagatttgaacaaggtattgattagttttctttgttttgctgagccataaaaggatgcttcatattttgatttctgtctttgaagtgttcctagatagtaggcaaaaaatggtaataaactgttaacagcttaggacttcctaaaaggagcccagaaagaatccagccaagcagtattctctgcattggaaatagggcagggcttagtattgaatgtgtaagggatggcattggcactctagctagatcctctttataagcaggtgctttcgattcccagccacacctttctctgaaagattgccttgggccacaggagctatctggcataagaagttatgcctcttttccttctcctgtctccaggaggtgggggcattcagctgccaagaatggactgatcaggagtttcagatctcctgtgtcttttgtgtgtttggatatgggggtacaaatgtctggcccctttgcccagaggcaggatttactgtgtggtgctctggagctcctctttataggataaggctgaaaccatatctgtgctggccccatcccttccctttttctgcttcctctcacttgcttacagatttctcctaagagcacaccctcaataaatcacttgcacaagaatccccatctcagagcactgtttttagagaatgtgaccaacaacagtgtatgccaactgaagacattaaaaagctattttctattacctcaaatattttgtcctctggcttgattcaaattcagaataatatttaattatcttattattcaaaaagagaaaactaagagatatctgaatttttttatgcctttgaaaagactcttgtctcctaagtttggactccttattatcgttgatcactgatttcagagcaaaacttctgctctattatagaacatgtagctatttctgagtttgtgttaattgctatttcttatctgatgagcccattgtaaaagttttttcgcaagaacttaagaaatttcaagtacataaataatttcttatgcaaatacaaaatacctcatatttttaaatctatggaaagttttaatatgttatttagtgaaagagttaatcaaatgtttgccctttggggccatgtgagggagcctgctttattaatttatgataaataaaaatttgtatgaaataacaaataagaaaatataattttcaattttatattcaaatcatatcagtggctcagaaaatggaatttattaggaagaaatcctatcgctctttgcataattttctggtgctgaaacatgagaaaaatctggctgctcattactatatcctggtttaacattgctttcaaatgctcattcaccaacctaagcttttttctttcctgtatctctgtggagttctcataaaatatgcacttaagctaatgtaaaaataatgcattcttccattatgctccaaatcatttcacagtgtcatgtgtttgttaataaattcagttgtcagtcatctcctttggtagctatttccattagagatttagctaccatttagtggtggtggagtcactaaaattccaatcactatcttcaacaatgttttatttctctttattttattcatccatgtgacccaatttcttatttcatcaagaaatatctaataaatgatgtctttttttcttctatttcttcctgaaatcataatagcactgcagaaccccttctttatttgcagaattcccagaataaaattctgtggaatggtcacttggggtaaataccactgaacaagaaattttctatggcgttgaacaagagcagaatcatttgtgatcatttttaactttcatcctgtgctgatggggcctatggtcttctaaaagctaaacagaacaagactttccaacagagaaaatatgaaatatacattttgtggatgataaaacaaatatttattgttagtcaacgtgattcaaaaaatgcagtctctacattcaaatggatcaaatcagaaaagagaagacaaaaagacataagcaatcctaatacaatgtgattagtcccagatgtctggacaagactctctggaagcagagaggtgaggaaaacttgcccatttgctgtttggaagagaccgagggaaaggtcacagaagattactagttgaagtggtttgtatacttgtattgaaaagggcagttttaaagataccgaccctacattatttaattcccacatctatccttacactacttaggtatctctctgtcaagaatcaatcttgttcgaattttttatttctctatcctaactacttctcttccatatccaccaacttactaaggattaggtaaaatctactactgacaggaaagccaaaaataacaatggcttaaatgagatggaacagattttctcagctggtgggtcataaaatgaactgttaatcagaatctgtaacactagtttttccgtcagcatcacctctcctgccaaatggtattgagttgggtttgtacaaagacagtcctttctgtttctagggtcagactgcagctctacttcccatagctatactcaaaagattataagatgggccattcagaatgtttatacttatatctgggaaatccaattcctactgaagtctaaagagatctgtgtcagctctaggtgctctcttttgatgggctggatttggcaaatgtacattctagtctgggctgaggctggagtttttgtcgttgaaaaggaaataaaatcttctgccttttgcaaactttgaccagaattcatgaaggaataaatatatatttataagcaatgattacgcattagctgatgttcagaaaattaagagaagagaaagactttcacacaaaagaaaagcttgtgcaagacctgaaccttgagaatgtacatgttaatcatagtaaatgcaaattcccagtgcaaagagcaaaaatcaactttgggcaatattggttacagtaaatatgaatgtttttctcctgatcaccaaactggatcgtatataaaatgtagttgatgctgagggttgataactgagttatcagctttctggtatgttggagaaatcatgcatttagaacataacactgagtttattaaattcatcgtgttttttttttaattactttttagagatggggtcttactctgttggtcaagctggagtgcaatggtgctgtcacagctcactgcagcctccaactcctgggctcaagcaatcctcccacatcatcctcttgagtagctgagactacaggcataaccccactcctactttaagtttgcagtttaattagtagcaaaggcattcatagacccttaaaattataaaacgatatacagttgttaaacaagaaaaaggagagatagacagacagacagagaactattcaaaactccaaacttccaatattgaacatctctggatgtttgtggatactgtaagtttttcatatttttgttaaaaaaaaaaaaagcaaacatcactaacaaggaagatagtcccaaagagttctggactgattagaaatccagagagtagctgattcttgcctcatatgaactagaacaagtttgaggaactaacaaataaaattttttcctgaaatcacatgcttgtttttccataagacaacaattaaagaaaaaaattgaaaagaaaaaaatggtaatttgcatcattcttttggaattttgaggaacattgaatttatttatttatttatttatttttgctaaagagttattagaagacactgtccattttttcaaacaccagaggctcctgcagctcaaaattatgctgacctcctctggctcccaggattctgcttgatcttagctgtcctgttttgattcagtagctcccagaataatcccaaatgcacatcatcacagggctctgaaagctccataattaatgaggaggtgggtgctatttttctttctctacatgttttgacattattctgggcattgtttgatgcatgaaggaggctttacgtaaatagtaaaaaagctgttttagttttactgtcactcagtttttatccctgtaataaaacagtaatgcagaatgaatggctcaaaactgaaatgaaatgaagatggcaaagtaaaatagtatcccaaaagttagaaaattaattcatttggtatgatgtaattattaaataaattttacagaagcttctctttgcagtgaagaaatagtcaaattcaaatgtatcataggactttccttagatgacacataaagatgtatgtgccaaaagtatgatctatgtaagtgaagactctgagcagagaaattaaaacatgtagctttcatttttgttaaagaatcttcaaagagaatttcactgaagctagttggatgtagtaacataggggaaaaagtatttctaaattgcatctacatgtgcaaactaaaaggcatacttaggaatcatctgtacaaactaaagcaaaaaatataaaggtttcatctttgtgtcattatctgaacatataaatatttttaatgggaggaagctatcttagataactggctctgaattcatttgaataattatatatagtttaaataagggtttcttcatttgaataaccaaactaacaataagtgaatcaaaacaaaatgtatttttcttatgtaaactaagccctgcagtgaacagcatggggctgatgtggtagctctgtaatcagtgtaacccaggctctttcttactgctctgctatcctgtaatgtgactacctatgggcccaaggtatttgagtgagcctgaccatcacatctttccagccagaagtaaaaaaagaggccagggccaggcgcaggggctcacgcttgtaatcccagcactttgggaggccgaggtgactggatcatgaggtcaagagatcgagaccatcctggccaaccaacatggtgaaaccccgtctctactaaaaatgcaaaaattagctgggcgtaatggtgcacacctgtaatcccagctacttgagaggctgaggcaggaaggttgcttgaacccaggaggtagaggttgcagtgagccgagatcacaccactgcactccagcccgggcaacagagcaagactccgtctcaaaagaaaagaaaaggaaagagaaaagaaagagggcaacaaagcgacaccacctagctctacaaaaatttaaacaaacaaacaaacaaaaaaaccaaaaaactaaaaaaagggtgtgtgatgacacatacctatagtctcagctactcaggaggatgaggtgggaggatccattgagcccaggaattccaggccacagtgggccataattgtgccactgcactccatcctaggtgacaaagcaagacctggccaaaaaaaaaaaaaaaaaaaaaaaattaaaaaacggagattgcccttacctttaaatgcacttcccagaaactgcatactcgctttctgcttgtattgaatctggaatgcagacagccatgccaggctatagaaatatggtctctattctgagcagcccagggctaaactaaaaaatcggggcttctgttaccaagaaagaatggggttagaaagtgaggacaaccggttctctatgtctcagttactgttgtttctttttcaccagttgtgacattttcccccttttatgcaaatgactgaaggttttttagtttgatgaataataataatattttttgttaccggatagacacagatcctcatagggtaaagacatgaattgattccattactcaaccccaagtttcattttcaaaaacaaaaatttaaatgttgtgtgacatagtttgagccataatattctttctgtcttttatttacttatacctagaattttatcagaatttaatgcacgtaacaacctctttgactttcaaagttactcactctatttgcttattcttttatttatcatttaatgacatttactaaatttgagacactctgttagacattcaactctgtgatcttacagatagttcaccaaatgcatttcaaggccaatgaaggatattaacaaaaattaaggcttgtgtgataatttcattggaaagtttcatctgaacaaagatgaagcagggtcaatgcaacccttagggttgttatgcagaagataagaaataaagaaaaagaggaaaaaacattgcagatatttgggtaactttgaaataacaggagttcagatgtatttcagaataggaccaagagaagaaaagtaaagactgtgtatattatacatatccattatctacttgcataaacaactattacactttgaatattttccctcttactataatattggaaccaatgaattgtggagaaatataaagaagagtatgaagaataaaatgatcactattcaccattctctcacccaggagaaaaccactaactactgttaatattttattatgtgttattttagtattttacattcatttacagttgtgcacattttggggagttaatattttacatgctattttgcaagtcaactattctttttgcaaattactttctgtcaagtaacatgagaaaattctcaaaatatagtactgatatttttgtcttacaaagcattacttaatgattgcataatattttacatgtgtccatttcataatttatccagttccatgttggagaaactgggtatcattgtgtctagaatgcatgatgacatttttactttaagtaattttaaatctaacttaaccttcagtttttttcatttgtgaagtcgactaatacgctctctcatgagaatgtgataaagatcaaaagcagtgcctaattcatagtaaagactcaatatctacgaacatatttctttggacataagaatatttctatttttatgttatcctaaacaactcgttggaccagaacattgttggaacatggtgaaaactttcattgtgttcaattatgcatccatgcattcattcctttattcaaggaatatttattaagcatgtatttgtttgccagataattttaaattttacagtaagcctcttatgcacttaataagaaacagttattaaagttttgactaaaatttttaactgcaattataataatgtcaactagtcaaataaatgttatttaacacatccagtaaagattctatgaaaggatcagattctagaaaatgtaaaataattttaaatttgactgtgactatgaaaatattctttctacagatatttcctaatattcaaattcttgttttgatcatttagatgacataagtgtcactttcctatgtgtgtcagggcaaaatgcagtggagtaaaagtgtcactttcaaagctatttctatacaatcatagtgctttggagcttagacactgtgaccccccttcttttactcttcctaatcatctgtttgaaagctctgtcaagagaaaggaatcaatatagtacatttattctttgctttattattactgttttttgcataaagagataggttccttggaaaatctgcaaatatctgatcagatctccagggtagaatgtttaataatgaataaaatgacctcagggtggaggtttcatctacaaagggtcaactgcctccttgcctcttgtcctgctcccttgcctaacctgttccacactgcagaggggtctttctgaatttcacatccctccatgactctctttggaggatctgcatctactccttcttcactgtctctcttgctgattccaaaatgtgactcggcctcagaattaccacgggtagtttttaaagacacagatcctcaagctcctgccagaaacattgaatcacaatcatcatgtttggggcttgggaattgttatttctaaaaagttttctaggtgattttgatgtggtccaaagacttacatttggaaagttttgggctattgtcagggtctgtgaagccatcccccttcctccccatggcctgaaatctgcctcctccttcttcatctgttgctatccccagaccctttgtgccagccacatgccagccttagtaatgaaaaatggcacttctgcagtgtacctttcggataggacttctgctatatagagaagcactatataagttaatatacttaatgcattacgttaaatgattcttataatctattttggctaggatagcaaagtagcctaaacagctaggaggctgggaaatccaagatcaaggtgccagcacattgtgtctggtgaagtctttcttccattttaatagatgggttctcttttctgtgttctcatatggcggaagggggagcaagctatctctggggtctcttttacaagggcactaatcccactcatgagatccccaccctcatgacctaattgtctcccaaacgctctacctcctaatattaagaccatcaaattgaagattaggttttaacatggggattacgggggacacaaacattcaacctgtagcaataacatgtatacaatgtgttagaatcatgtctgacatatagggaaacatataaagaatgttaatgctaaaatatgttaaaggtaaaaataaattgatagagatggacagaaagatagatagatacatagatacacagatacaaagatagatacatagataggtagatcaataatacatgtattatttcagttaatcctcacataaaccctgtgaagtacataccattattttccccattttttagagtaggaaactaaaatgcttttcatacaattggaaaaaaaagtgtaatccaatgctggatatttgtaattccttaaatgtggtaatgccttctgttacctgggtgataaaggtgagaaattcatgtgatgccttctctcctctaactccctgacaagtgtccttctatgtagtcccttttcacacctcataggttgtacatgtctgttttatctgtcagaatgacccataggattatatatttcttgagtgcagggaccatgtgttattggtaaatgcattgccagagcctatactgaatctgatacagggtttgtgttgagtaattgttacataataaaaggagcaactactctgaaaaccaccgctgctcacctgctggtaattcgaatctcaggcatagaacctcaagaagaactcatgatcagagcaagaagattctccagcactagcctcagccattcacagtgactttctagaacacagtttttaaaaggattctaagataaagtctgggctcagtgccgaaaaactttcacccacctcacctatggtgtggagatagggggagatgaagatatacgtgctatgctgccatcaagcagcaataatgtcagactggaatttcaattatttcagacagagcaacctatggtgatcattaaattgaagactggtcgttctttaggctgtatttataaggaggcttggttaaagtagaatccaagactctgatttagtcaagctttctttgatatttggtgccagtcctaaatgaagtggaatttgaagaatgaaaatacaaagagtcagttttccacagaactaaactttatatatgtatatatgtgtgtgtgtatatatatatacacacatatatatatatgtatatatatatattcttttctttgtataaaatatgtaaagaaataatgtggaaaagtacaggtataaataaatgtaaagcacacctttgaaaggcacacacatgaaatgaatttttatatcatggaaatgtacatttttggtttaaaatatataagaaaaatgcaatgacactgttattgacaaaatatgataatattttatcatcttaatgttttatgctcaaatgaattctagcactcatttcattaaataagaacaaatttggattatgttattcagatcaaaacataattctaccctcatgacattgaaaggacagtaatgtctgccttttttttttaatttactttgttctctgcccttcatgtgcagtgaaatttgatatttacacaggagcaaagaaagaaaagtgctgttttttgatgaaacactgtgactttcagggcctgcatgtgtgtgaattaggccaagcttttagggactcatctaggataatatctcatgaggataaaatgtacagttgggagaaaaacataggatgtgaaattttgtgtaatgtcacaggaggtactatttgcatatcgttcaaaagtggagatgtggcctatggtaacatcttgtcagtaaagaaaccacagttgggctgggtacagtggctcacacctgtagcccctgcactttgggaggctgaggtaggagaattgcttgaggccaagaaatccagacaagcctgggcaacatagcaagacccatctctacaacaattttttttttttttttaattagccaagcatgatggtgcatgcctgttcctagctacttgggaagctgaggcatgaggattcctcgagcccatgagtttgaggctacagtaagctataatcatgccactgcattccagcctcagtgatagagcaagaccctgtcaaaagaaaaagagggagaaaagaaagaaagaaagggagaggggagagagagagaaaggaaaaaaaagcgggagggaggaggaaggaaggaaggaaggaaagaaggaaggaaggaaggaaggaaggaagttagttctcagtgcgtgaacatttgttatattttactgatatttttaaaagcttattacttcattgatttttttttcttctctactaaaatcagaatggacacaatagaaagatgaacacatatagttgtgcattctcatctgactggctaagcatccttaagaactcaatatagaacagtgaaaaattccaaatcactatcacatttcagaataaaagggaatcatatgatgaaattattagaaaatattttaagtttattcactcagttaatttaagaaatattgcttaggaagaaaaatagacattattctcctgctctcttctagaacaagtaactctagaatacaaagtttattatgtatgaggtcactgtactttatttctaatatccttaactattaataaaacatcataatcattgttttctctaccacactattttatcctttgtttgagagtagatgttcaacagataaattattttacaactttatgaagcttcttccaattgtatatcaacaaatttttccttccttttgaattccaagcatgtcttcttaatttctattcacaattgacttataggaagttccataaagtatttttatgccattctgtagtggtagtcatgttttaggggctgcttccaaggatatgaggtgattgtcaaggtacacaactgtagccatcagagcacttttcaacacacaggaaatagtaaagaaggaagggaagggtgattactgagatgtgttctcaagttctgtcaagtgaaattgcttggataaatcaccattacccatcacctacaggataatggatgtcttagtatgtgtaatgatataacatcactctttataaacattaaacttagaattgacatgttttttaatttcataagtctgaagattttaaaaacattctctctgtacataagtcctagaactagctttgtgtatttccataaaactatatatacatacatgtggcatatacataaacatatatataatacatcatatttatatagtttatatagacatctttatggtatatttacacatatacccctcttatacatacatagtttacataatttatatatgtatagtttatatgtgtgtatatatgtttttatgaatagattcatatgtaaatgtatttttagtttacagagatatgtgtgtatatatatatatatatatgtgggtgtgggtgtgtgtgttatatatgtttgtttttataggtcctgctttatatcaacatacttctttttatgttttatttttgtatttaagataatgttaattattaaaatcacaatctactgtataaacaaggtgagaaagaatgtaccttttcagtgaaatagaagggtagagctggttccttcacatagaagtatagcttgtttgattaggtcaatttaattgtgtactttattatagaggcagggcttttatataactttacataacattctacttttggttctatatccaccaaagcaattagagaagtttgttgatttaatatcctaacagaatattttccttgcttttattttagaccaatggttgcactcaaggttaattcaaggtatcaggaaggtgtgactgtgacaatgtttagtgatgacaggggcaaatcaatgcaagatcagtggcctggatattgattattatcatgagatcttggtgagatgaagtcattatttaattagacttttagttatactaatacatgattctcagaatagactgtccttagctctgatgttggcagttccatcatcacttataaatttaaaaggacggtgtatagaaaatttagagaaatgttagaatagacacataggaaaattataagtgctaggcttcattttctgtgcaaggaacacaagtagtttgtctctaaactcatcatttctcagatctccttagttaatattagcaggcctcattgagaattctataaaattatcatgaagatgatcacatctgatttctttttgacggaaactacttagtaaagttaactttggttttggagcaatttcaataagcccttagagctaggaaatggtagttgattagattttttccttactcatagctttcaaatgctaagtctgaaaactaataatgaaatttctcacctgcattatggcaaaggaaacacgtcctctatatatgtacaactacttttgccatgtaaatagatgtatttgcatcctattcttttgtcgtatctattttttaaagtaattaaaagcaattctaattcatgagcattctttctttctttttttttttttttgaaatggagtcttgctctgtcgcccaggctgagagcgcggtggcacagtctcagctcactgcaacctccgcctcctgggttcaagtgattctcctgcctcagcctcctgagtagctggaattacaggcatgcaccaccacaccccggtaatttttttgtatttttagtagaaacggtgtttcaccatgttggccaaactggtgccaaactcctgacctcaaatgatccacccgcctcagcctcccaaagtgctgagattacaggcatgagccagtgcacccagactcttattttttcaaaataagctattttctcctttactcatgaagtataaaaataaacatctcatctactgaaatttctggttcaaatttcatttgcttctaaatcactattcatatgcattctgtgaattagtgctatgaaaatttagttggacacgtatttctaaaataattcctactgtccttaaatccaatttagccattacatgattactatggttttatgagggaaaatttcttttggctaagttggcaacattttaaaaataacacattgtacaaaaaagtacaggaaaaccccatactgtatgtgggaatatttatattttcctgaatactgagtaaatccaaaggagataagccactttattttgtttcccagatatcaaatgatgtgttctttattttaattaaaaggccacagcagcctactacagtgaaaacaaaatacttacgtttattacaagttattgaaaaactgaagaaagcttttattttaagaattctcatgggagagaagatttttcaagttaatataaataaattataattttttcacagaatgatgcaagaatcacacttctgttttcctgtttacaaatttaaaatttccatttaagtaagggcatgaatccaatctatgtaactctttattcttggtaaggtttattgctataccataacctcttgctctgggaatagcattacatctataggaatatattacctttacaaaattacaatattgcctcatagttttaatctcaactaattaatttaatatttctgaatagatttagttcttcagaaattataacattgtggattggttatttgttcctatagagcacatttttggttttgccctaatagttcaattcccatttcttttcccaaaaccaggttaggaattattgctcattgcttattctaaaagaaactttgattctgttttccttctttctttaaggcagaggagatggaaattaggatatgttccattaacagccccacaagccaggaaagcatgagtgaaagtgttagtgctgtgactgaagatagtggttctgtaaggctgactctagtgttctctattgcttgtctttgagtttaaagaagagagtttttcccatttgtttagctgttttttgtttccctaatctgtgctacacgttcatagttttggtacaatatccagtacgatttttaaatgggcacacttattcatttatttcttcatctaataaacttttatcaaacatataccgtgagtcagtttctacactgtatgctgagaattcatagtctgtgcccaggcaaaccttatgttttagtggttctgtagggtaggtctacttttgcaaaaggtaaataagctgtgggctttcagcagaaatatcttctatatacctgtttttgcctgatttcagtttgttagaacatgaggttgatataatttttacttattttttaaagtattgccatgatacacaaaatcatggcccctgcatacctttcctgttttgtcactgtataacatttttcacatagcaccctgtacttcaactattttattttattttattttattttattttattttatttttttgagactgagtctcgctgtgtcgcccaggctggagtgcagtggcacaacctcagctcagtacaacttctgcctcctgggttcaagcaattctcctggcacagcctcccaagtagctgggattgcaggtgtgcaccaccacacccaggtaatttttgtatttttagtagatacagcattttgccatgttgtccaggctggtctcgatctcctaacctcaagtgatccgtccaccttggcctcccaaagtgctggaataacaggcaagagccaccgcacccaaccacaactattcttaatcacttgcattttccatcaagttctgttgcctcagatcatctgacctttcccatacgtgtaatatggttaacctggtatatgttaatatcaagttgttaaattgttctaggtactagtgaacttaaacttcagtaatggtatcagaaacttatcaaataatcatacaaatatattttcaattatagttacataatgatggcataagaattcaaaatatttttctctgaaacaaattttataaagataccttctgaatattattcataaacctcataaaaattaccttgacaatagcactggggataggaaatgaatgtttttcttgggattcataattctaccctaacagaacaaatcttaagtaaaaattgcccctttggaaacctagtgtttgcctatattgtagtcatccccagaaaagatgagtgaaaaagcaaatgaatgtgttccattatgtcgagatatcctaagaaaacttacattgtttccagaagatagttaaggaataattttagttttataagttccaataatagtaattttaatcaatacattgaaattatcacttgttatttttctgcagttatttcctggaaccatttttatttgaaatctgacacctttccacaatccctttgaagatgtagtacacaagtgaatagtttaccattaaaactgtaatttcctttaaaaatttttggaatagtataatggtgattgtgtaattaaaatttcaaggtgcacaaagagcctactacagaaaacacgctaaggctgaattatgaatacaggcccctttgggaaaagcttctgatcgtttcagctacttcattgtgtggtttgagtatttgctctgcagaaaatatcattcctttatgtcacacactgtctttgagattatcagacttggtttcaataaaacttttcgagtgatgtaatggccttcctttgtaggcaagtacagtgacattctaacattgaggcttcgagtccttaggtgcatggaccggggagaatatttttcttggtggttagtgctttcttgtctccactcacctctactttttcaaaacatttaatagttgaaaaaagcaaactgctctgcttattaactaaaaccactccaggtcacagtaggaagccaatgttatagaccaaataacatttcaaaattctgcaaagtccatggcaactggtctgagaggacaacttaaaataataaaagagcattcaaagactatgagctcatttggaagtatgcttttgctcttgaaattgcatttgtttttctatgatatttatttaggtggaagttcgtaggcttgtcacttttcacaaaaatagttatacatatagaattgggattataggacatctaaattagaagaaaataacctggtttctgatcttgggcttggccactaagttttgaatgaaatcatctatctgttggtgaagcacaattacctcatgagtgaaataatggaattgtcttagagatgtggtgttcaaactgtgatcaacagacacctacttcttagcagaggatcaaggtcaagtagcttcataagggaactgcaaattcctacacccgtgttatcctgaacttctccgtgtttcctctttttaaaaagttctctttttaagtaacatcttttaccagtaggttttgatgaatgaatgaataagtgaatgaatgaatgtttttattggctcttaaatgccataggagacatcactttgagctacatctgtgcctttcacgtacaaaaaagcctagagtatatttgctactctcctattttatgtattaaaatcaaccaagttcttctctttggtaggattactagaagaaattggactttcttctaagcatcttaccccattggctatgcatcgactttacccaattagtcccaacataaaataatgacttggtcaggggaaactgagggctgctctgctcttcgtgtccagagccctaaggctatggtagaagacctcctctccaaaccaaaagaagaagagtctttacctcttttcttgtccattatcacatcagcataaaaagacataatatgtgtgtgtgtgtgtgtgtgtgtgtgcatgcacgcttgtgtataaaacctaggaaactaccaagattgcaataattttgataaaggaagatggaggcagtatctttgctttttagcaatatagtagtgaagaaagaggtgataattaaaaggagttgttgtagatatttccatgtttgctttacacaaggtaaatgttccataaatgttgctgataaatgacagattctaaatgaggagactgcaagggtcctgctgcattagcaacaagtgaagttaaacgtaagggaaaatcaagagaatcagcgttgagacatggttacaatgatgagtccttcccttccttatctcccaaatttccatctcaagttctgtgttagactttaacatacttcctagccatgttgatttcaggtgtgaccacatgacttgctctagtcaatgactgtgagtaatgtggccacaaatgttgaagagaaatcgaaagcacttatttatagagttttccgatttctgtagtgcaaatcatcttgaaacgatgtgatgtcactgaacttggaatttaaaagagatatgcagtagcatgctattgcatattatttccatcatacagatacaacagatgtaaataaccttaagaccatagatgacaataaaatatagtaaactaagagttggtgggttttaagtattcatttttaatgaaatttccttgattgtaagtttatataatttaatttttattaatggccatctttaaccacttgctcatcaaatttataaacattcaacattggttcttgcaaaccaatatgcacaaaactcaagcacaccactaattaagcagaaagaagcccagttccttctagcaaaagctttaaggtaaagcttattgttctccatgccttctttacttccctctgctatcatagctgaattgttccagaaagaagctgttactgtcagatgtggtctcagagtggggatagaatggaacagattgagagctagaaataaaactttttgttgtaagtcaatgaaattttgaggtcaatagttactattgtataactctagctagactgagtaaaaactctaacttataagatttttaaaaaattaattaatttttaattgaaaaaaattgtatacattatatacagcatgatgttttgaaatatatatgtgtgtatatatatataatggaatggctaaatcaagctaattaacatatgcattacctcacatacctatctttttttgtggtaagaacacttaaaatctactcagtgattttcaagaatattattaactatagtcactatgttgtataatagatctcgtgaacttattcgtcctatctcacagaaattttgtatccttcaaccaatacttcctcaactcccaacactgctggtaaccatcattctactttctgcttctatgagtttgaattttttttattatagtttaagttctggggtacatgtgcagaatgtgcagttttgttacttaggtatacacgtgccatggtggtttgttgcccccatcaaccccgtcacctacattaggtatttctccaaatgctatccctcccctagctccccagccctcgacaggccctggtgtgtgatgttcccctccctgtgtccatgtgttctctttgttaaactcccatttatgagtgaggacatgcagtgtttggttttctgttcttatgatagtttgctgagaatggtggtttccagcttcatccatgtacctgtaaaggacatgaactcatcttttttatggctgcatagtattccatggtgcatatgtgccacattttctttacccagtctatcattgatgggcatttggattggttccaagtcttcgctagtgtgaatagtgccacaataaacatacgtgtgcacatgtctttatagtagaatgatttcatacataagtgagatcaccggtattagtcttttgtgcctgggttatttcacttaccagtgttctccagattcatccctgttgttgcaaatggcaggattttctactttttaaagactgaatagtattccattgtgtcgaccacattttttgttcatcagttgatggacacttaggttgatttcatatcttggctattgcaaataatatgggagtacagacatctcttataagatatttttaatcaccataattcctctgatagagggattctgttagagattttcctacaaggttgagtaagtcagatgtcctggggtctgagaaaataaataacaaaaccaaacatttatacattattggcatatattgaaagcgaggcaatgaagtttcattttctcacaaatgactcatcaatttgattttttcctcatttggcaatttgtcccaaattccaatttatacttggttcacaaagaatttgggaacctgcaaatactggtggtgctttagagtacttgctctgcaatgattttgcgtggatattttatacttccctgtgtctgtgcttttccttgtttgtttctcttcttctggaataccctgtcagacatccctatctttgtggctcctactcactcttccctgaaaccccaactagacatgtagatagtacgttccatgaactgagagatcccagtctctgtactcactactctatttctagcacctgacaaatactttgtattcaattgtgttcattaaataaattactgaaaataaaccacctttgaaatccatttatactctggcatgtgtgttgttatatttattattctatattacattcagaggacttgtgtctgtgtgctagcataaactaagacaccttgagactagcatcactgccatctttctgtacaaaactatggcaatgcttagaactcatagcaggaatttttgaaatatatatttttatttgaacatcttctatagcttctctatatagcaatgaagtgtctcttcatgaatgtaaattttattccaagttggacagttggaactgggggcttagagatgacagaaagactaaaaataggtgctgatgatggagtattgccataaaatatctacaaaataggcatggcagaaacttaaaaaggtacatgaattcagttattataaaaaagatagtcaccttgcatttacacagcactttgcagcaaaatgaatttcaaagcaatttgccaaacagttttacaaaggatcatttggctgagtcacaaagagtgtcttctggtgtgggactctatagctgttcacaatgcacatcaagatgccaatgagctggtttgctgatctcagcagaaggggacttactaaggagcacctgctggagcttgcatagttttcttgggatgcttagcgttacttgattctgggatttcttctccctcgagtaaatgccactatttctgggaaaacatgggacagagctttttacctcctataaaaaggccttaaaacaggcatattacctagcttaaaagacaaaatagagtaattgatttagtacccagaggacaacctaagtcattacaaatcaaaccagcaaacatttattgaacaccttaggcaagttacttatactctctaagcctcagtttccttacttgtaaaggtcttttctcagacattactatgaggattaaatgaggactgaatgtaaaatatttatcagacggcatttcacacattaaatttacctagcattatttttattatctttaattcagtatcttacatgtcattatgttagttaaaacaagaaaattacatttttaaacatttttaaacatgtttattgcatttttacaattataaatatcttgaacaatgcctttaggttttttaaaaataaatgataggtaaattgttaaaaattaatctaatgaaatgatgtgtacactaaattcttatatgaatataggccttattgatattgtgcatagaatttagctaaaatctagtgagtaagaattatgactatatttaaacaagtttagataaatagcatacccactctctaaattgttgtgcgttggcacaatgaaaagtaccccaagaaaatcaaaacaggaccaaaatagattggtgaattcacaagtaacatgttacatacgtgaatgaaaatacagttggtttcattgaaatctataatgtattgagtcaaagtaaaagaaccatcaaaaagaaactgcaccagatggagttaaacagtcatggaagattttgttcaagactattgcaatgggagagcgacaccattgcacaagagggaaaaaaataaacaacttcactgaaccaaaatgctggagaggttttagcattggagtgaactgttggaaaagtgctggagaagattaagggggaggttttggtcaatgtgattaagccacatgtgtttgcttattggtgcttgttaaagttatgctcctaccctcacatagagactagaagataggggccctatcttattgattatttttcaaacagttggctcccagttccttgagaaggatattcctgagttgtaaaggtgacaagaggcttggagaagatttacatctcaaagaggcagagaaagaatttacaacttttctaaggtaaatgcactaagaaaagagaagtcagagcctatagttagaaagaaacctgtctaaaatttagtcaagcagaagggaccataggggtgctgccgtgtcggtcaataccccaatgaaacttggtcagctcaattttccagaattgtgttaacacagtgaaatagatcaaaacatattagccaaagaatatttagctattttttctatgcctactgatcatgcagctgggagaaagaacataacagataaatgtattggcccaagttattagattatctcaatattgacctagatttatcttaatttattctagaaattaatccactttttctttgccagaacatttccttattacacatgaattatcaatatagtagagagacacacttaaagtagggatgtaaaagcaaagggaattacagcattaaatgtttgattaaaattaaatgtcaggaatcctgaattatgttgacagttccatgtttcaatgtatattcagaaggtgaaaaaaaactccctgtcttgaaatatgtaaaatcttaaaattttagcagaagatttttgcctataattagtggcagcccttaagggagcacaaagatctcaaagacagttagtagactttgaccctaagttatctcaattgagttgaaaatatcctactgaagcctgaaaaagggaaagggccaattacaaagtgctttaatttctccacaatggcttttgcaaagcactaatgaaaagtcattttctatggacatttgataggatcctgctattgttcagattcagacagttaaaagaaatcaacagtcacacagtcatcttgaaagaggcaaaaattgaccaaggagaagtgaataattcgcatctagctgtgaatgaaaatagtctgaaggcacagctaactaagccacatgctccttttccagtgtcatggtcaataacaagtctcaggtaggagcgtggcgtgtgctttctccaatgttggcaactccagtcaataaagtataattggaacctgccaagaaggtagtgtgtcaaaggtgtatttaagcagaaacttagatgctgaactgtttgtgtaaaaattgagcacatagtctaattataagtttaagaacttaaaaaagtttgaaccttgtaaatcagccctgtgaatgatgcacactgctggaacatgacaactgcatcaatagagctcagtcagaatagaggaagaagtgtcaaaattacaagaggagcactgctcttagcaaataattaaagggaggattgagagaggtgtctttgattgggataagcaaaaaggttaaaatgccattttaatttatctccttaaaagacacacaagtgaaaacaagaccttttttgttaaatcaataaatagtaatttgattagcttatgcttgttaggcattttgatctaccatcatacagcctactatttaaactttcttgacactcaagattctatgatattacaaacagaatggaggcaagatgcacagtccactttactattgattgtataggtcgagtgtggagtaaaagttcaatcagttctaatgaccatggacattttgataattataattacccctcaatgtgactccaaattcagaggcttcaagaggctcactacatgcctttctctggcagtctcacttttgaaattggaaagaaggttaaatctgcatatctgagctctgccctgctctgagaaccaattgatttcccttggtagatgtgtcattcaaaaactatattttactgctaatagtacataatcaaagatacaggcaaattaatgaactactttcttactagaataaaataaagtatgcttaggatcaccttcttccatgtaacttagcatttcattggcaaaattgcattaatcattccagtactttcatagagtaatctcagttttcctcagcatcattttgttgttagattgaaccctgatctattgttaatgctgctttggagaggaaatttttgtctataccacaaattaatttgacatgtactcatgtagagaaagcaaaaagtaagttgtttgcacatttttcttttatttgcatctttgactcatttcaggaaattaaagagataatcacatggtatactagatagacagtatcaaggaccaacttactggatgatacttaacaatgtctgaatgctgtgatgtgaccgagccaggcaccactccagtgcaacccctccatcccagtttcatgtctgaaaattcaagggctggattggcaaattgacaaacagcacttggaacatattggagaatatagatgttttaattgaacttaatcctttttatattaaagaacacaaaccttataatgaaatgactggtttttagtgcttttttcaaaattatttactgtttccttttaccagatttatcaatgaagaagatgcaatgtcaagctttcaaggaaaactttgtatgtatagtttgacttcttactatgccacagtgtaaaatgccaggaaggttaaaatcagacttaagatttgttacaatgcatgatgaactatagctctttaaatctgaatagacagctgggtgcggtggctcatacctgtcatcccagcactttgggaggctgaggcaggcaggtcacctgaagtcaggagtttgagaccaccctggtggtctcaacatggtgaaacaccgtctccactaaaaatacaaaaattagctgggcgtggtggtggatgcctgaaatcccagctacttgggaggctgaggcaggagaatcgcttaaaccccagggggaggcggaggttgcagtgagccaagattgcaccactgcactccagcctgggcaacagaggctgactccatcccccagcccccaaaatatctgaatggacatcaggtacacatggactaataactccttgagcctaattagaaagaaagaataaattgggattgaaggaggtatgggaaatgacattggaatttcaacaacatgaaattgaattttattaagattaatctatatacataatatattcttcccctcagttttagaaaactaatttgtagaactatgtcgcagtttgtttggattttattatatcaattggcatcatagttttccaggcctccactgataatccttgtagagagttctgcaatgatctgcataaaatagtagcctctttgaaatccagacatttcttgaattctagactcagtgtacaggctaagtacttattcaagtctttcagcctctctcttctttaaaaggtacaacacagagtccctatatgctggctctttccaagtttggaaatttgcatgtagtgacattgtatgaagaaaagacatatcaggagacatgagctctttctttagttgtacaactactgatcagtcacatgatatcaacaagccaatttagttcctaggactcaatttcctcatcccttgattctgtattttttgcagtgagactgtattctaaagtgttggccaaaatatgcagctacaaaaatgagccctagaatattaaacatgtttattattttattcccatcccgttccatctggcttatctccttctgcctcttctgatgccattttctcaaggaaaactgcatattttctcaagataaatcattttctgagggcatgatttatttctgataagtgtctaaattagatcagttattttttcaataatctttaatactctctgctttaaaaaaagacttattgtactgagtactttgatttagaaatgcaaaagatgttgaaactctttctttcctaagggtaaaaatgatattaaccacccacttgtttatgggctctagttaatagctacagtaaatgaacatgacagataggaacaaatgtcagtgttttaacatttttatataggcaaagctggcatgctaagccagaatccccatttaactattgcatgtcacgcacatactcctcaaaaacaaaaatgtatgtttatttgagtatattcaaatgatgcttttctgtgaaagggccatgtatgcaaagtgacccccaaatcctgaaggagctgaggaaccaaagaaggaggcagacagattcagtttgtcgatattgggtgatgtattgagggaacttaaagacagaaccgtggccttggatagcagcaagacaggcagatccccacgctgctactcctcagacccgaggcttatacagcttcaggaaagcagatgcgctcctcagcaagacagttaaaggcaaccttccagaacaggcaagaatgtggtgtgtgtcatagcctgtactttgtatgatagcatcaaggttgctttgttcttacgctagttgaagtaaacattaataaagtaaaaaccaggaggcagtcatggggctaatcagaaagtcaacatggcagattagcattcaaagtggagtcacttttccctcccctggtgctgacattgaaatgggtcaaaccacctagttttattttctaggcgccaccaactatgagttgcacgactttggacaaggtatttggcctttctcatttccgtttccagagatgaaattgatctcaaggggcattttaaggagtagtttcaagttttaaaggagattaaatatattaaagtttttcaagaactgcaaagtactgtataaagaactattactgtttgtgtttatgtcaacagttggacttatttactctttatgttggcatgagaaattttccttctcatgttttccattttctgggaaaaaaataaaaataaacaaaacaccttccttgaatcttagttccctccttagtcactatgctgtttctctgcgtaacttacaaactaatttttaaagcaatagacctcaaatattaatttaaaagtctccaaaatgacttcctaaatcttagatccaatcaccttccttcagattcctgaaatccatctcacgtcatctgacacgagtggttacaacactcttgaagttcctcccctggctttcattaatctgaaactaagtactcagatcactcattaattcattgaaacactcatccatccagtgattcaacacatatttatttatcccttactgtggttaggcactgtttgaaagcactagaaataaagcagtgaacagtgaagacagcaggaggaatcgctgccctcatggagcttacagtctgtgcgggagatagacagtgaacacatggatattgatagatattgcgtgactagtgttcttgcatgctgcccatgggtgacacactgttgctgctgctgaccatggacagcatctggatggtaataccaagagaagagacctcgggaatgcattaagtctcactgtcccctcttctttcctactgccctaaagtgaacattatgtgttgtttggtctttgtcgtccttttccccctttaagtctttttagcagtttattttattaagtaaaaacaatttccattgctagattaaaccattatgacccatcaatcagtatgcttatgtcctctgtttgagaagctggacttctagcccattgtgagtactggctctttacattgtggtctcattcatgataaatgttgccaataacttatgtataagttgtctattttttagtgtttacagggacatttcttttttctacatgtgaatctaacgtacatttttaaggaaacaattcagataatatacacttaaagtcacttaaaaaaaggagaaagaaaatttattgataatgccatccccccaaacaaagcatctgtttttatttttatggactcactttatatatttgtcaatattcattccaaaatatcataaattttttttctagttctggtaaattataacagcattcaagttcttgcttctgtgtcctgccttccacattttaataggaattttcttctcaaatgcagcacattttcacatctctcacacatactcacatggtcacaatcatcctgaaaccttcaatgactctgaactttgtaattgcacagaaaacattgagaatctgtctcttcagaagtaatcaaaatttgaattagaggcagagatccagtacaatcatcttcatattttttgttatgtcctccctaaaataaatttgaaactctatatacactcatgaacattggtaagttgttatctaaaatttttatcataagtttaaatagatgccagtaatcccagcacttttggaggctgaggtgagtggatcacttgaggttgggagtttgacaccaacctagccaacatgattggtgacaccctgtctctatacaaaaattagctaggcgtgttggcacacacctgtagttccaggtacttgggaggctgaggcaggagaatcgcttgaacccaggaagcagaggttgcagtgcgccgagatcatgccactgtactccagcctgggtgacagagcaagactaggtctctaaataaatgaataaataaatagttggaaaggatgcatttggtgccatattgtaaatattaacagttaagacaacattacattagtcttataaacactttcaatgaactaaagatctaaatttctcttcaatttgcaagccattattatccatttaaaaagacataagcaggtttttctttaacagttgttttcctttctcctgaacttgtatttccattataattcccctacaaaaatttatgctaatataatacaaatttatgctttgaaaaatttaataaccaccctatcatttctgcaaacaaacacatgtatataaagtaaaattaattttctgtttaatttccatgattgtaaggctccaagtgctaagatattccttcagattgagttatcattacaattattattgatattgatcaaaactatgcaactaaattttttgataattaaagcttaagagtaaagttttgttgcaaattttttccttaatgaaatggtaggatttcccccctaataggtgaataaatctttggataaatattacttatggacagagttctactcctttttgtgtgtatacagtatgtattgaaacataaatggttcacttggaataaaaggaatgttgttataggaaagtcactcaattcattgaacatcttccaaactgtaagtcaaaaataatatagtagcagacctgcttgcaaaggatcttgggtattagaataatttgtttctctacatgcataatcatgttttgaattgttcctagcatcccaccccaatttctggtcctcagctacttacatgctggcattatgcaccacatgacatttaggacaggtgagaagaacgtcctttttgtgacttgtaagaagttggcagtgaaatagatgaccttgacagtaggctcagtcttagatctattttaggaaataattcacctaagatgtggaaattacctctgtacacgtctccctaagaaaagcctcccatgtcctgctttaggccatggccctacataataggagaacagaaccatatgtctgtatttaaaaactagatagtggcctgaggtctaccacctgtgggcagagaatggaaatgggactcaggaaggctctcctgagagttatgtacgtttaatgaagtttgatatagaagaaagtaccatttttccagtacaggtctgcatgatcttgctgctgaggctcaggacatattactcaactattcatgacaaaaagcataggaattcagttggcattgctgttggagttgttattacatattttgactggaaatttcagaaaaagtaaagctctatagattatagtctcctcgattcattttccctgtagcacagtaaacagacagcatttgaatcatttaaaataccttcgaagcctgcaaaaacaaacccaaattgaagatcaaataatcgatgcttattatgagagaaaatgtgttttctgttattcaagtacattatgctaacatggctgtcctgatgaagtctgggggaaaaaatgttgaaaaagtaaatgccaataaaaattagaaagtcctcataaaacttccttcaaaaaggacttgaaaagattaatttaattgttcttcctaaatgtgataagtacatttgatattcctttactttagacagacattaacatcagaaggccaagggtaatgaaaatgctgactaaaagattgtaaaatcccatttttacctgtattgaagcttttctctattaacaaagtggtattcctttagaagctgaattaactctttcaacttgcaggcgtttaatttagtatcctgagagacacactttataatatgcaacatgtttaattaccaaaggactctacgtatgtgggtgaggggataattcttttggtgttagcatttttatggcaatatgcaataaactcattgattttgttactagatttctataccatttgaactatttaatatcagtgtttgtgcacaacaaagttcttgggaatattcgtaaattatattttttagttatctgcctgacataaggcaatgtgggaagtattcttagaactcagtaaaattatgcttaatatttttatttaagctttgacctacaacttaatcagtggctttatagaattctttttaaatgcagaaattaatggtggatgatgttcctaggattttcactgtgaattgaaataagtctactaggatttttcataggaaaatgggatcatggatgatatatccttaacatggtctcattggctacaatagaaatggacaagagcatcatatctgaaacaccaagatgatattaaagttttctaaaatgtttttgtgccaaataagtcatcaatcacataaaattacatctattgatatactatcatgatatgcaataacgcattctcatttaacttcagaatattttcctttccactaaaggagaaaaacatcagtgccatggaattcaggggggtttttccagggaaaaattttagcaaagttggaggagatgtcaggaaaaatttagtcacttcttatatttcatcattcttttaagtaattactgtaagtaacactgctttcctctacatcaaatattttataatttacaaataaaactggtgtcatccttcaaagtaacccccttctgaaactaaaaaattattcaagcaaccatgcattatttggggaaactatattttatgttgccttgacacaagaaaattaggaacattatttttgtatcaaccttctaccccatgatttattttatgaaaatgtgcttttgttggtatattctcccctccctcacccatccccagaactcttgggaatactgaaaatactgaaaggcaccacatgcccagtaatcctacttagacttttattatgttgttctcggaatatgtttacttaagataaaaataacagaaacatttaatcagtcaagagtccaaggatactgaattcctccgtgttcccaatattccactttgagtttcttttcctgttctcctggcatttgcagcagtgggaattccgtatggtgtgctgcccactagcctgttattcatgaagtcagttctgcactagctctgttgtacagccattcattcaaacaaattctcacctgttattcttctgctgtggatcttgctccctggtaactttgaaatccatcattcattttcattatagcacctcaagcagtgccagcacatggtgataaatattaaatattttctgaatgaacttgaaataaattcagtcatagccatctattccattaatattggaaaagagggaagaagaacatttttttcttgatgcagtgctgtctttttttctcctttcaaagaccgccatcttattttctttgtcctttgattttattattcttgaagggtagagacaccactggcatcttttgaaggatctctacccgatcagattcttcatgcccatggaagtttccaagtaatgttcacttctttgctaatgacagttcatggcttaattgtcagccaactgattacagcattaccaaactagtgtataatctccctctgatatttctcttattttttttctccttctttgaggcttttcagaaaaggtccatgctggtactttgcagggtgaggttaagaatgggcattattcatggaatcccactgctgctttgagccaggaagactttctcatagggctcatcaggaattagaatcactgatgtgaatccatatgtgtgctaacaactaggtggtccataaactagatagcattaatgcaacctggcaggaagccatcattgtgcatagagtggcgattgattaatcgatcgattgatcaataaacaatagcaacacaaacttcatatttatgttttgtacatccagaattaccaaaaaaccacaatgtgttgtgtccgtgcatgttcctgtgtgtatagggcatattttaacattattcacctcttaccatatgccagctacttacactaggtgtttaaagctgtacatgttcctgagagagtgattgatttggttttatattcttgaaaatggcacatccccttactttaaaggcagattctgtgtatttcaaagcagatccattataagtatgtaaatattcctgtacagaggctagaaattcatagcttttaccaaggtggattctcacttcagtgactcatatttaaactcactgctaaaatgtttcttctaaatgaagtagtatttaagctgtaatttctagctgaggaagacaactatttcctgatgagacgcttagggatcttgttttacattctgtgtgcacatattgaaaattcacatttgattaaagttcggaatgtcaagcacactgcccaaataaaaggcaaatcctcataatggtacagcaaggtaaaatttaaatgatgtgttcgactgggtaaacatattagaaagctgtctgaaatatgtatttaactagcagaaagaactattttattctaatgaatgaaaaatatccattcttgtgtgtgcatgtgtgtatgtatatatatatatatatatgtccgtttataatttaaatgctaaatttggaaatactccagtctttcacatgattgataacatacatttactaactcctatggcggttttatttatgtgtttttgttttttgctttttgtttttgtttttgagatggagtttcactcttgttgcccaggctggagtgctatggcgcgatctcagctcaccacaccctctgcctcccaggttcaagcgattctcctgcctcagcttcccaagtagctgggattacaggcatgtgccaccacacctgggtaattttgtatttgtagtggagacggggtttctccatgttggtcaggctggtctcgaatgcctgacctcaggtgatctgcccggcttggcctcccaaagggctgggattacaggcatgagtcactgtgcctagccttatgttttaaggaatgaaattaaatatagaaactgaatctaggtgacactgaatttgtaatatacgctgacaagtgctaacataggactggcaggaacagacacagaccttaaataatcttatttcctatgtcctgcttttgttgtgtaagcgttccacagcattgatgttacttaaacttggctttggaaattctgcagttacagttattagataggcaaattatgtctattccttttatcccagactcagaaagtgctgtcgttttatggcttgcaaatgcttcataagcctcatgcttttctggggaggttcctagttaataagtaaattaaatttttaaaaataggctgaatattttatcactgtggcattataaacatttgtcatccatgtagggaacatttttccttcaggctctgatttacaattcataattgtttcctgtcttatccttgttctctctcaatggtacaagatggagaaaagatagtttcagagtgtagacattttaatcagtattcaaatggaattagaaggccccaaggttttctgtgtgtatgcatggaaattcatctccaccaaccaccattagcaacagctgaaatcataggtgacttctcaagagagaaagtattaaaatatcatttaggtcatgcacgtcaagctaattttggcatcatgtaattcagggttgatattatttagatcgtttcttttttgatataactacatgggtaaatacagcctctcgttagggttaagcaattgtgtctttagctccgaaatccctttacactcaaatatggcagtaggaattcatttgttggaggaactgttctttctctttttaaacagctttatcaagatacattttatgtactataaaagttcacccgtttgtagaggccaagtttttagtatatttacggtgttagcaagcaccactgttcccataatctaattatggaacatttttgtcacacaaaaagaaaacttaggcccatcagcagtcattctccagcccccacacctgcttccatcactcccttgccccatcccctgacaaccactaatctactttctgtctctatggatttgcctattctggacattttatatataaatggaatcatacaatatatggtctatgagtagcttttgtcatttagcataatgttttcaaagttcatccatgatgcagtatgtatccaaattttattccttttaattggtgaataatattttgctgtacagatataccacattctgtttactcattcatcatttggagaatatttggattgtttccagtttggaggtactatgaaggatgctatagacatttgtgcaaaagttttttgggtgatgtatattttcatttctcttgagcatgtaactaaaagtagaattgctagatcacatggtagttttatgtttaatcttttgaggaactgccaaactgtttttccaatgtggctgtactattatacatccctattagcaatatataaatgtttcaatgtcttcacatgtacacccacactggttattatctgtcttttttattattgtcatcttaatggtgtgaagcagtatcatattttgatttgcatttccctaataattaatgatgttgagcatgttttgttgagtctgttagccatttgcgtatcttctttggaaaaatgtctactcaaatcttttgcctgttctttaacagggttgtttgtcctttttttgtggagttgtgtatatgctggatactagactcttatcagatatatgatttacaaatattttctcccatctattggttatcatgttactttcctgacagtgtcctttgatacacaaaagttttcatttttatgcatttttatgaagtcctatttattttttcttttggtgtcatactaagaattcattcttaaatccaagatcatcaagatttaccccatatgtttctttcatttgctcttatatttaggtcatagatccatttagagttagtttttgtagatggtatgaggtagggtaggttccagctgcatttttttgcatgcagatatccagttgactcatattgagttggtgaggatattatcctttcctccttgaatggtctttgcacgcttgttgaaaatcaattggccataaatgtgtgggttcatttctggtgtctcagttctatttcactgatctgtatgtctgttcttacaccagtaccactgtgtcattgttgctattttacaaaaatgcataacactcttagaattttttgacagtacattgttgttaactatctacacattgtcatacagtacatctctagaatatttccatcttgcatgactgaaactctatatccattgaacagccactcccattttcttcatcccctatccccaggtaactgtcattgtgatctctgcttccatgagtttttctactctagatacttcatataagtagaatcatgcggtatctgtccttttgtgactggcttattttacgtagcataatgcccttgaggttcactcatgatgtagcatatgataggatttctttcttttttaaagctgaataatattccatttattttataccatattttttctcattcattcattgatggacatttaagatgtttgtacctcttagctatttgaataatgtttcagtgaatgagaatctaatgcctccactgatctgacaggagacggagctcacacagtaacaattgaagcattgttttcaatgttctctgagaacctgttttcaattttttggaataaatacccagaagtggcattgctaggtagtactataccatattagttactttagctttgtagtgcatttgaagtcaggaaatgtgagtcctccaacgtagcttctctttttcaagattgtttgactgtttgggcatttgcaattttatatgaacttgagggaaagctgttagaattttgaaagagattgcggtgaatctataaattgctttaagtagtattgctattttaacaaaatatgtcttctagtccataaacatgggatgtatttccattgaattaggtcatttgtaatttccttcagcaatgttctgtagttttccatgtaaaattctatcatttcttagttgatttattcccaggtatttttaagatgctaatgaaacagttttctttttttttttttgagatggagtttcgctctttttgcccaggcaggagtgcaatggtgcgatctcagctcactgcaacctccgcctcctgggttcaaacgattctcctctctcaacctcctgagtagctgggattacaggtgcccgccaccatgcccagctaatttttgtatttttagtagagatggggtttcaccatgttggccaggctggtcttgaactcctgaactcgtgatccacccgccttggcctcccaaagtgctggaattacaggtttaagccaccgtgcctggccagttttcttaactttcttttcccattgttcattgctactgtatagaaacccaacacatttttgtgtggttaatcttgtaccctgtaactttgctagatttatttattagctccagaaggtttttttatggattctttgggatttcctatatacactgtattagtccatttttatactgccatgaagaagtatgactgggtaatttataaaggaaagaggtttaatggactcacattgctggggaggcctcacaatcatggcagaaggcaaaagagaagcaacggtacatcttacatggtggcaggcaagagagcttgttcagggaagtcccacttataaaaccatcagatcttgtgagacttattcactaccatgagaacagtatggggaaaaccatccccatgattcaaaattatctcctaggcctgcccttgataggtggggagttttacaattcaaggtgagatttgggtgaggacacagccaaaccatatgttataggatcatgtaatctgtgagcagagagagtttttattgttgttgttcttgttgtttttattttttgagacagagtctcactctgtcacccaggctggagtgcagtggcaccaccttggctcactgcaacctctgcctcccaagttcaagcaattatctgtctcagccttccgagtagctgggattacaggcacccaccacgacacccagcaaatttttgtatttttagtagagatggggtttcaccatcttggctaggctggtcttgaactcctgaccttgtgatccacccgcctcagcctcccaaagtggctacaattttcaatacagtgttaaacagcagtgatgaaagcaagcttccttgtccttatcttagagagaaatctttcagtcttatatcattgaatatgatgttagctgtgagttttcataaatgtccattatcatgtttagagaattcccttctattcctacttttctgtatatttttatcataaaagtgtggtggatttcattaaatttcttttctgcataatttagatgattgtgtgtgtttttcctttgttctcttactagacacgtattatattgacagtttcttatgttgaatcacccttaactttctgggagaaatctcatttggttagtgtgtagtataatcctttttttttttttctgagatgaagtctcactctgttgctcaggctggagtgcagtggtgcgatctccgctcactgcaacctccgcctcccaggttcaagcaattctcctgcctcagcctcccgagtaattgtacctacaggcacatgccaccacatccggctaattgtttttgtttttagtagagatggggtttcaccatgttggccaggctggtctcgaactcctgacctcaggtgatcctgctgcctcggcctcccaaaattctgggattacaggcatgagccactgcaccgggctgtataatccttttaatatgctcttggatttgctttgatagtgttttgttaaagactttttagtcaacatatataaggggtatttgtctatagcaggggtccccaaccccccagccgtggactgtggcctgttaggaacgggttcacacagcaggacatgagcacctgatgagtgagcattaccacctgaactccacctcctgtcagatcagtggggcaatagattcttataggagtgtggaccctattgtgaactgcatatgcaagggatctaggttgcatgctccttatgagaatctaactaatgcttgatgatccgaggtggaacagtttcatcccacaaccattcccccacccccacacctgtccacggaaaaattgtcttccacgaaacttgtgccaaaagggttggagactgctggtctgcagttttctttccttattatgtctttgtctggctttggtatcaggtagtgctgctctctcagaatgagttaggaagtgttacctcatcttctgttttttggaagagtttaagaaggatttttcttgattcttctttaatgtttggtagaatttacaagttaagccatctggtccagagtttttctttgtccggaggtgttttattactgactccatgtctttacttattataggtctattcatgttttttatttcttcatgattcagtcttggtagggtgtatctttccagggattttttgtattaaggttatataatttgtgggtgtatattatattaccacaaactgagtggctgaaaacaacagaaactatttcatagttcaggcgcttagaagtctgaaatcagattgtcagaagccaagaagtcggaactcaggttgtcaggtggttctttctggatgcttggagggaaacactgtcccatgcctctctcccggcttctggcgggtggttgccagtaatccttgttatttcttgcttatcaatgcattgctccagtcactgcctcaatcttcacatcatcttcttctttgtgtctctgagtgtccttttctgtctcttacagggacactttcactggatttagggcttatcctaatgaagtacgatcttatctagatccttactttatttatattggcaaataccctatttcctaataaagtcttatttgtaggctctggatggacatgcattttgtcaggattctatttaatccaccacagcgtacaactgttcatagcatttttatataatcatctttatctctgtaagattgagagtaatgttccttctttcacttctgattttagttactttttcttttctctctttgatagtcagcctagctgaaaattggtcgatttggttgatcttttcaaagaaccagttgttggttccattgactttctctgctgtttctctatttgctttttttgtttattttcactctaatctttattatttcttttcttccactagctttgggcttagttttttcctttttttctagttccttaaggtataaagtgaggttattgatttgaaatctttcttctcttttaacataggcatttatggctataagttttggcatgttgtgttttcattttcattcatctaagtattttctattttccctagtgatttattccttaacccattgtttgtatgaaacgtatgtggtttaattttcacgtccttgtgaacttttcagttttccctctgttactgatttctagcttcattcctttgtggtcagagaatatactttgtacgattgcaatcttttcaaatttaagacttgaaatttagtaatgctttttcgactgaaatttatcagtctctttcttgactaagtgctcttctggttgctgtatgtttttattagattccagtgttctgaaaagttgattctgtcatgtcattttttgctagttttgctcttttcttcagtggcgggactaattattggcactgtgtctgccatttgtgtgacatcactcatcttccatgcttatcttacaggcgtctgttacatgccttccttcaagagccctccctgtctactctggcttctcagttctaagctaattgtccttttatgggttccctttacattgcatttccccaagataataattatttccctcaaatgactgaacatgaacatattctgggcatcccaataatggcactaggtttcttctttcatcccagtaaatggatgaatgaaggttgcacaaatgaataaagatgaaataaatttaatttcccatgagcttactacaaagcctatttataggttactattaaagaatcaaaatcagaaatatttaacacaaaagatactttacatgtaatttaatcattctttaggatctggtgatataagattatgaggaaaatcaaaagatcataatcacaagagtcatcttaaatgacatattatgactcattatgactcttatgagtcatcatttaatgtgactgtacattagaaactgtggaagaaagcatcaactcttgcccaaaaggacatttagaatgtattctagctgaatgttttacttacattaacttatctatcttttgagagcagaagatagatatgtttatttgattattttggttatatgattttcatagaaacaagcatctgctaggtgtatgttcattgtgtgtatatatatatatatatatacttttaactttcacatattttcttgcttatttaatattttaagaaacagtcacgtgttacattggctactattaggaatagctaatgtgagcatccatgcatcaatgctggtccagatatagaaatcttaagtgtattagagacctgaaatgaaatattattacatggctaagaacatgctatacctcaagtcccgtttagaaaacataagaattacttgctaaaacattttgacatacatggctagccaggtagataagtctctgtcctaccccacaatacagctttattaaggattctttttgtattccttgatatgtttcaatgtgttgcactttagccataaaaaaaaaattagtgagtttccaaatgaactcaatgatttttgttattttatttactttttgtttattttacaaggatcgttggttataaattttactatattttcaagactagtaaactgtaatatcaattacaaaataataatgtatgtcaatcattatacacaagcagaaaattaaaaaataactaaatccaagatgtaatgaattcttatcaaaatctcacttagttggctcacaaacttgtgtctgtcttttcagtagtgggaaaattaaattggaacaattgactattttcttttttcccaactaatattgtaaaagattattgttttcaaaataaattttactgtgtatctttaaggtatatatcatgatgtttaagatacatggacatagcaaaatggttactgtagtggaacaaattaatatacccatcatcttacccagtcacccatcccctctcagagaatcgctgtaatctttttctttagcaaaagtcctgaatacagtacactagtgttaactataatcttcattttgtacattagatctttcaaattgttcattctacataattgctacttttcatccttgacttatatatccccatttcctgacccaatcctaacccttgtaaccgccattttattctctatctctatataattgaccctttttccccagatgccacaaatatttgaaatcatgcaatatttttctttctgtgtctggcttttttcacttaggataatgtcctatatgtccattcatgttgtggcagatggcaggaactcctttttttaagactcaataatattttattgtgcatatataccaacttctttatccattctttccatgatgcacacctgtgttattttcatatcttggctattgtgaataaagctgcaataaacatggaagtgcagatatctttacaaggtggtgatttcatttcctttgggtatatataaccagaaaagggattactggactttatactggtttttatttttagtttctttaggaacctccatattgttttctttaatggccacatcaatcccttttctcaccaacaatgtacaagggttccatttttctccacacccttgccaacacttgttatcatctgcttttatcctaacaggtgtgagatggcatctcatagtgcattcctctgatgactaatgatgttgggaaccttttcatgttcctgttggccatttttgtgtcatctttggagaaatgtcttcataagtccttgataaaagattatgaatagcatgtaaaagttaggtgagagctcaaataagtattaaaaataatgttgtcatcatcagcttattctttgacccaagtttatttcccagtttactatgactatctggaaagttacagctacattatttaaaaaataaacaaaaatccacattaccaactaaaaaaataatctcagctttttatttctaaagagggattgtgttctttattgttgctaaaagaatacatttttttcagtaattttttttctaaaggtccatacatttacaaatagtccacataagccctctaagcttgaggtgttattctattttaaattttaagtatgagtttttagaactcttttctttattttggttttgctaaacatatagacttatctaatttttcagagtttttttttttaatgttggatgttttacacaaaccagttggtggatcattttggatcattgacatctactcaacttaaatactggtataaatattatccagaggaaactcatgataaacttaaaagtacatgatacacccatggaaaggctaaaatagtgacagtcacatacactgtaaaaatttggataaaactggaggtctcacatattgctggtagaaatgtaaaatgttacaaacaagctggaaacagtttagcgatttcttacaaaacgaaacatactcttaccaccatgtgatccagcaattgcacccttgggcatttctttcagagaaatgaaaatgtatatttctacaaaaacttgtacataaatccgcatagcaactttattcctaataagaaagtaatggaaacaacccagatatccttcagtgggagagtagttaaataaattctgatacatccaaataatggaatactactcagcaataaaaagagatgaactattaatatatgcaacaagttggatggaccttgagggcattatgctcagaaaaaaaaagtcaagctcaaaaggttacttattgtatggttttatttatatagaattcttgaaatgacaaaattatagagttggaaaatagattagtggttgccaggtgatggggacattagatgaggcgaaggtagcaaaagggagttcttttatggtgatagaacagttctgtatgttgattgtggtggtggtggttccacaaatgaatacatgaaataaaatagcatagaactgtgtatagacacacacacacacacacacacacacacacacaagtgaatacaggttcataaactctaaaatctgaggtctacagactagttaatagcaatgtactaatgtcactttcctcatttttatattacacaacagctatataagatgtcactattgaggcaagttgaaggaaggatacacaggagtttattattttttaaactatttttgagcttatattaatttcaaaatgaaaagattttaaagagtatctattgtgcaattataaaacactatgaaaaatagagatgtctcctcacacaattggcatttaaagcaacattttcagaagcttacttttaaaagtcttcagtttgaagtgatgatttttattttaattcaagcatgcccttgtgtaagctcaaaagatgtgatttgtgaacatgaaagcttcgactctgatcccctgggctccattttcttcttcttcaactgccctttatttgaccaggaaggatatcatttccagaagtactaggagacccacatttaacttgaacaacattgttctttcagattattaaggctgttcaattttctctgttggttgctaccccgagttggagactcttctgaaatgtcagactgagaaaatagtactggttccaacacaatgaaaaaaacaaatgaaaagctttggaatgaatgcaatcaatagcctttgaaaacaaagttaaaaagcaacaattgaatgctaagatgtataaaatcatcttgttcttttttttaatttgaatatcaatgtggccaagaaatggggaagcacaatagagcatttgattcaataagcacttaacaaatacccaagtcatcattgtaataccttatatgatgtgcatgttgtgcatagcacaaggttataaaatgcgtagcagtgaaagttataaaaatgaatgagacagtccttggcatccaagagatctcaaatttatatccccaatattggcaaatgctctaggttctaataccagaacactgagtgagaagcacagcatcatttaataccaatggtgagataaccaaaacccaacagattcaaacgtagaaataccttagttagcccaagtgaaaattgggtagtctttggagaaaagcatcagtcaggagagaaattgcaaggctgtagaaaataaaatcctgtggtaaaggtttgcaagttagtaaccatgcccagtaagtttgcaagatagcaaccatgccaataaggaaaatgtgtaagaattttaaatttcacattaatattgtctgaggaatgcaaaattctttttcctgttttttttttttttctttttttgtgaatggcttgggacacatgtgataaaggaaaattctgaaacagtgctgctcagttacgggtaaaacttggcactatctcccatccaagtactaacctggcccaaccctccttagcttccaagatcaggtgagattgggtgcattcagcatggtatggccttggacaaatttggctctatctacaaaatagcctgtctggagattacataatggcattaatatatccttaaaagaaaagtcaacagactcctcacctttatacccatttattgtttctgttttgttgttggaaaatgagttttagaattaatcgataggaaacccttctatgaatacctttataaagaaaggccaattatattttacttcatttatttgacttacagtattttactcactgactttctattgttgatcatgttgattctattttattcaagccagtattgaattatcaggaaaagtaaaaatgaaaaggatattactctgggataaaaaaaattaaaggatattactttggcatgaaaaatgaggtaggttaatgaggatgggtagaaggatggacagatgtgtgaaaaagcaactgtagaaaaacgtaaattgtaccatgtaggaaatgtggctgtgaactgtaaaagtctttcacctattctgcatgtttgaaaactttcataaaattttggaaagaaaatgcaaaaaaactcaaaaggacaactagaaattttagtgcctaaatagacagctttatttcctaaaataatttttttagtgattttgtcaacatactgggtaaaattaagaaaatgttacagaaaccaaaggcttgcattaagaatctcaaaattgatcctaggtaagggatagaatcatagagaaatagctatagtaattgaaagtatccatttatgtggaaatatttcttgttgttccatcaatacactggtgttatgtttcttcagcatctgaatgttcttgttacctgtgagctcaagtccaccactctccaagagggccaaatgatacaaattagatttttttcctcagatctagaatgcaagtacagcaatgtatagttacttgactaaaatatcaaagtgatatggaaccaaccaaatgaatatggcaacaatttttacatctagtcatgaataagagtagttttctgtatttgctttctaattttggtctccactatcttgtatgagttcattctcacatactactataaagcactgcccgagagtataattttttaaaggaaagaagtttaattgatgcacagtgcagcatggctgaggaggtctcaagaaactacaatcatggcagaaggggaagcaaacacatccttcttcacatggtggcagtgaggagaagtgccaagcaaaaggggaaaaagcccccctataaaaccatcacatctggtgagaactccctcactatcacaagaatagcaggatgagagtaactgcccccatgattcacctcccatgatgtggggattatggaaactataattcacgatgagatttgggtggggaccatatcctgtcttaaatattccttcctcttgaagtcaaattagaattcttaatgagtcttaaaaagcccttattggtttagaattgattaattgaggagccctgattttctgatccagggcaaataggatttcattgtcagtggatacgtagctcctctgaattactgcaaggattgcttctcacatttaacactggtccctgaaattttccatgaattttccagaagtgcaaaagctgcagatgcccaaagatggtaccttggcagttccattgcttctaagcaggcctggatcttagagatctcagacaagttgatattgatctttgaagaaacgttatgtacaaaggaaatatatctgccaacctcctttagaaacagggtcaaataagcagttggaaaattttctaaatgtgtcacattaaactttaataatacctacgtttttatggggcttttaactttgcaaactgctttcacatgcattatctcattccatcttctatggcaatgaaacagtgtctaggctttagggctgaattacaatgacatcgatatgaaaatgttgacagggacatgcaaaaaagttattactatgccaagcagaagaattcaacaggaattggatggattcaagatcagtaattacaaagggttaagattctgcttgtggtttatcactgctattttgtctttttttcctcctctttatccttcttatttttgattttctttttctttgcaataaatctgcaggtcagcccaaccccagggtgtatccgtgccctcatgaagatgctgtactgcccatactgtcgggggcttcccactgtgaggccctgcaacaactactgtctcaacgtcatgaagggctgcttggcaaatcaggctgacctcgacacagagtggaatctgtttataggtaagaagtgtttaaatggatccgagaacagagacgggacaacagcaagtgtttatggggcttgatgggtgggtcagaagttataagaaaccagacacagtggttcacatctgtaatcccagcactttgggaggccagtacagatggattgcttgagcccaggagtttgaggccagcctggacaacatagtgagattcccatctttacaaaaaataaaaaataagctgggcgtggtagcacacatctatggtcccagctgtttaggagaccgaggtgagaggattgcttgagcttcggaggttgaggctacagtgagctgtgattgcgccactgcactccagcctgggtgacagagtgggaccctgtctcaaaaaaaaaaaatgttatgatgacttttagagactaggatggtttttaaaaccatgtttagcaaattataaacattattttacattttcctaatgtttttactgtatgttatatgggacagtcctgttaaagattgtgcaacccagctatattgagctaactgttctctctgatgaaaacaaaagtaatcttgttgaagttccatgcactcccgtgagaaaggacgctttagaaaagaatcttgtaaaaaaaaaaaagtccactgtactatttcttttttatttgtattacctcagcatagccacacatattagcaaacaattctttccttgaactcctagaatgaaaatagatcaatactttggctaaaatatgcaaattttctatctcattctgtggaaaagaaggctttaagcacacaagcatgaaacagccttccagtctctagagggcaggaggcagggaggtggggagaatggaggggaaggtctctgaatcaaggctctgttcttgggttgcagaaatcattcaagtggttgcatggcccaaagacagttcacaaattgccatccaaggataaaaggacaaatttcataggcaggcttctcccaggaaaatacacaggccttgaaagagtaaatgtgttttctccccctctgtcaaatagccttcaaataaaagtactttcaattgcatttactgcaattacacagtgacaagcagagtggtgaaaatagcagtggcatttgtcagcctctgagggccttcgtcatttatgcaaacctctaaacgagcatgcacaagtaaagtgttctgacaactaagatttgcataggatagaaaaaagatgttagaattcagagaaactgaagctcactgtacaaagatgtgcttaggttaacaggcctcagctctgataatgaaacccattggctaattcaccattttgcttagaaaggccagaggaaatggttttatttcagaaaaaataaattgaagtgccgttacctctccccacagtgggaggacaaaatctctttgtatgatcatgagttactttatttgaaaaatgaaggaatttttaaaagttaatcattaagttatccttctgacacaaaatgacatgattctttactaagatttttgttctttgctaaaattgtggaggggttatgaatttttaaaaataaacttgatcttagaagatttggattttttagcaaagacagaatacccaactaatgctgataaaaaggtacactcatcaagaaatctaaaaagatctgcttattttaaagtcagattaaacctcgtagcatcatttggagtcatatagtcatccatatttttagttgaaatgccctaattcctagcacagttcagttggcttcagtcagcctgcaagttattgaagaagatgggcatgtgggttttgttacttagagcaggacatgattaagaatgagaatataggctttttaacttgtaagagcagcagtgacttcttaattggctttttgtcctcagtgcttactggctgttttaacggaaaacaaatccttatgctttcgatcaattgagtttcctagataccgatttgatgtgaaatggaatgtctggaaaatcactggattcaaaactaaaatttgaaccaactatgtgttgctggatgtactttaatgaaaagcaagcgtggtggttcgtcctatatgaacgtatttcataccctttcttcccgtcttttttttttttttttgagagggagtcttgctctgtcgcccaggctggagtgcgatggcacgatctcggctcactgcaagctccgcctcccgggttcatgccattctcctgtctcagcctcagcctcccgaggagctgggactacaggcgcccgacaccacaccaggctaatttttttgtatttttagtagagacgggttttcaccgtgttagccaggatggtctcgatttcctgacctcgtgatctgcccgcctcggcctcccaaagtgctgggattgcaggtgtgagccaccgtgcccgtcccctctgtctctttttttaattagtcctagatgtctttgagaaaattcttccagttttccttctttgggttctgctgtggcattgagaattgaccaccaatacagacttatggagaaaaatgtgctcttgctaatacttgtctgggtgtgaagtgttagttcacaaatttatggcatgaattagtcaaatgtgccaactccattttccacacagatacatctcagatgacagtgttacagtgttcataaatgcggcagcaaagatcagtgagcaaatcggtaatccaacaaaaattatatataatagccctctctctgggtagcacctgcagcccatcactttgggcttctggcatctcttcatcaaaaccttcactcctgttgctgtcagttgcatgtaccttccctgctagctacacaaatgtcccagtttgtacatcttatagatgtttttctttaattataatgtgcctatctaaaatgtgaacagtggtatgcaatcgaccgtcaataaaaacaagagtcaaactgggggcacatcctcccagtctttacaatgccacaaattaattgaaagtggttagtgactgtttagagttcagtcagtgtctggatcatgtcaaaagaaagttaagtgttttaagcattccagtaaaaacttctgtggtattccaaccactactgaagttctgtagttggggtgtgtgtgcgtgtgtgcatgcatgcgtgtgtgcgtttgtgcgtttgtgcgtgtgcatgtgcgtgtgcgtgtgcgtgtgtgtgtgcgtgtgtgtgtgcgtgcatgtgtgtgtgtgtgtgtgttcttcgaaaaaatcaggagtctatttaggatgcattttcaaagtcctcctccaggaagtttaactcagttccctgcacagaggaattgctcaaaagattcttaccaagtaactgttataagaaaaagaaactccatttttacatgaagaacttttctttgaaaacttccttacaacattgaaaaaatgccgctagacctattttagagtacttaaaaatcctcatcagcctcaggcccgccccttcacttgctttgtagtaagtagtgtatggggttccccaggataaagcacaacccagattccacttgctgcatccaaatgaatggtgtcttacgtagcacccctgagctaggcaggaccagaagaaacaggagagtggcttttagcctattgtcactattagaaactatgcagtgcggtaggagaaaaccctgttttaaggcattaacagtctctgctcaggcacttatcccaggtattgccgtattttcatacaaaacttatcccagcctagcttttgcatgctgcccaaatgcaaaatggttttcttgaaaaatgtttgtgttaaattaaaatctcctagagggagaaacagtttgtgggcagaactcgcttcagtaatatcctgtggttattttgagtgtttggcattgttatcaacgctccatagataagaattgttctatttcacaagaggccatgttgcagattacaactagctcatgaacacaaaagtcaaggctgaattacatttatatagctatagtaaatcttacatctactttaaaattgaggatgtgtgggacagcttctgcaaacatctggtaccttctaagattttatagactatgagaaccagagagagatttctaaaagatgttgccaatgaggagaggcaaaggttgatgagacaaaggcagggattctgtattatttcatactactttttatccctaagtgttagagaatgcttctaacatcaagtataaaagtgagacctgagtgtttttgtcccaattatgcaacctaatatttaggctaccccagttagcaaagaccctaataattcaactcactatattgggtaagctaggcatatacattttttgcccttagggaatttaacatagttaaaataattataacaaactatgacaaagtgttaggataacagaagcatggggtgctaagcctttactcagctgggggacttaacttagtcagcggggagtcagagaagccctactttgttaagtgtagaataaaatagcaaataagattgtattgaattggcattgtcaaacataattgatgttaaatagccacagcatatataattgttacaccaaagccctcagacagtttgtttcccgtatcactctcaataggtctagcatgatttgtcagtggttcttaaatgctcgtttgttttatttttgacattttctatgatcaagtctcacctgcccactactactgtcttgaactgatgagatttgtgttatttttcatcagcaaaaagttgagttatcttgatttagatgccctccaaagggtgttgtgggggaagccagcaaagccgctagtatttttaaatttaagccttgggcactcatagaccagacacaccagtgatatcaaactttctgggcttcttcttttcaaacttgccaattattaagttgccaggcagcccaaagactgaaaactgtcataagagtatcaaacatgaaacccaaggtgggcactgcatctgtggcaggccgagagaccctgaagtgggcactattcactgattctgtcacatattcattagtccaacacatgtttactaagtgcctactgtggactttgttttggtttaggcatgggaatggaatagagaacagataaggcccctgttagagaacagaatagagaacagtacccagtatatgttctttgaatcgaataatggacccaactgtacagagaaatggaagggaatattctaagaggctgttctattttactttgtaagtcttttcttttaatggaggtataactaattcagtaatttaaaaatcacatatccctgttgttaatggactcatgagtgcagggatggcagaaacaaatcagataatgtacctgattctttcattgtgacagctgctatcaagttgtaaattagagccagccacaaggaagctgtgttaggtcagtccaatgactaatgtcatgtaataaatggctacttggtgcacaaatgactttcttggaacctacaagagttgtcaattctcatggtaatttgtgcattcgtaattttgtgtttgggaaaatgttgctagataagccttatttgatattagaaaataaacatttattgtttctactgaggaaactcagattttcttttgtaaaatgtacaggactgtgttatgttgcattttaggagataaaataggcagaaggaacgatttcaagcatttgcgtaagatactgttctttcaaagaccttctcaggcataaaagtccataatataattctgacaagaaactcttttagttacaaataattccatagtaaatatgatatgacactggctgatattcctgaaataccatgttacaaaaacctctagaatctaaacatagaaaatgatttcctttaaaccaaagaaaaagaaaaacccaagagctgtatatagcagcaaactttcaaggcttcttcatctctactttatgtaatacaagagcctatttaataatacagtctagaaacgcaaccctgaaattgaggaacaaaagccaaagcaattattttaaaatctgttctgttagctagaggactcgcatttgcccttgagcattcgtgaaagcaccaggaaagacttttttaaaaaaacaaagaacactgttttctgtcaggtgaaatctaacaccatccaaccctctgtctttcttttacagtcattgactcaatatttctcatttcttgtgggcatttatcatatgttgtgttctcatgtaatgctggcaggatgcataagccgtactaactacttgctgagagaaagaaagaaagaaggaaggaaggaaggaaggaaggaaggaaggaaggaaggaaggaaggaaagaaagaaagaaaagagttggctggcacccaacagcctgtcgctggctacatttgctatcaattacctaagtttagaaaacggtttactctgaactctgcatatgtgaaagtgtttttatgtgatacaatagggttaatgccttaaggttggtggcataatgtgtgggtattcagcagatatagagacaggcatttcttaacctctgaacacttactaatgttgatcttgaggcaacaactcaagggattcacagaagcacaatttctattttgaatcaagcaattttcccatggatcaaaggaggcaacatacatcagacctaaaattgctggatacaataggcaagtcgtcattctaggggatgtgtgtgtgggtgtgtgtatttcctttacgcccaattccaacttttgttcatccatttatttctagttcctgtacactcaacttctatgcaattaataatagtaattgttccatttcttatttactgattactgtaaatgatactgtgtaatcgagattttcaagatgagatttatggtacaaaataatattggcacaaagcaatggtctgaaatgaggcatacctattgtgcaactaaaattcattaggaagcaaaatatttcatgtataataggaagtttactaaatatagatataaatatatattaaaatatatataatatgataggaagtttactaaagtacgacttatgccttatcaagctttttaatttctatgagaaacaacaacagaagaatttagttgaccaagagaaagcagagcacattaaaactattcaaggtagttagagaatttgcctttgaatttggaattttgcgttttgattttagtttactcttcaatgtattttctataggtagtttaatttatttatatataaaacgtacttgtttttagtaattgacatttgactttaataacatgttacaattttcactgtcatgttttcaagttcaagctatgacacaggtgcctgacttttgtcatgccaaaagaaaatatttgatgattctttacagtggaattaaatctattccagaaggccagaaacccaggcaaaaatcttaacactctgcacattagcccaatgacattcttagctattcaaattttaggagataaaaggaacatgtgatagaagaaattattgtgatgtagaactagaaagtaaggaacatagagctaagtaactggatcgttaaagaaaacatcaaaccacatagctattcacaaatagcaaagttgtaacaagtcccacggccaccataaccagagtccttcacgtggtgaccaatataatagaataaaggaaggcggtttacctcctgaggcatttcgattactttaaaagtctcaagattagcagctaaagtgaaaagccttattttaacccaaataatgaattaacacatctttgtgcaatgtggcaacattttattaaaatattttaatcatgaaagtgttaaatgatggcacttagacttcttttctgacatagtatttactttgaatatgtgtgtgtgtggatatatatatatttcgattgctctgaaacctcctttaattcatagttatctcaaaagtagaactgctaatcatgtctttatatttgagtcatttttgaaatgagttttctttttcctcagggttgtttctttaacaattataaaagagactgctgtaatctcttcatctggctgtctttgtgacttgtttattgtgaacaactctctaaggaaccaggggtggaaaccaggttagaagagacggtctcagtgacttattttagtggttaaatagatcttttccttttgttactctaaagagggagtgggtataagtattaatggaagtaatttaagcttttgggaagcttcatggtgtatgaaaacttatggttgtaactctttaaaaatatcgtgtccatagatacttggtcagatatccaggagagaatttaaattaaaatagagcatgaaatatgccttgtccttcaaataacagctcatatataaatcccacatgaaaaagatatgtcctcgatttttttctttgcatagatttaaataatttgctacgctaagaatttcctttattataacctctgaagaagtgaaaattagaaagagaaatgaaaagtaagtagttgaatatatggcattaccccaagcagggatatatctgtatgcatcacatttttattctttaagaggcaggaatcttctagaaacataacagcgataattagatgccaaataaggctgtcaatattcaccactaaaatctcaaggctcgggaaattagctgatttgaaaaagggcctaataattctactgggtgaaatgagtaaatcagcagatgtgagaaagttttagaagtaacaatggctacccatttggtcgcaagagctggtagagttttcagactgaatgaatcccggcagtgaccctctcctacctcagcgctacatttatctttcggattgtttcacaccagcttgaagagattagttatctcataggaagcaaaatctctcttttctacctgagttcattgacttcaggaggagggtattctcaaaatccaccacaatcgttcaactaaacagctctttgtagcccttggtattatcactggcacatgtgtatcctggttctttaaattcagtgcctctagttattgttagatcagtttcgtctttaaaatagttgagtgttccaaactcttctgagttgaacatacatagaaatgtattccatagtccaaagcctactgttatgactcaaccagacgagagaactaaaatcatcaatagtcctaagaggacttcaggaataattttgcaattattacagagcacttggaggatgaggatcaggcataggagcttacttataaaaggcttctgcactaaatgaaacacatatgtccattcattagccagccttgcagtatttttcaattaaatccctgtggctgaatttaaaatgttcggcaagttcttggtgacccagtttaacatgtgcctaataccacactttattaattaaagatccagatatgcgcttcccgagtttgtcccggagaaaatgtttaaatgtgtcttgctactcacttgcaaccataatatctaaattataaaattaagcaagagttataagaaattctattcttctatttctatggttctagatctcattaggaaaacattatataaataaaaaaatacctaatagtatttattgagcacttactttataccagacaatattgtgattactttaaacttttaaccctaaaacaaccttattaagtagttaatattatgatctccattttgcagatgggaaaactgaaaccagagaatttcagtgacctgttcaaggtcatacaacttgtaagttgcagttccaggttttggcttcagtaccagggttattaaccacggtaccaattaactcctgctgagcatttaggaagtaactgttaatctgtgactacaaggattgataagctatattggaagaaattgagaatctgatattgccagcactgtctaatagaattttctgtgatgatggaaatgttctatgtctgtgctaccagcatagcagccactagccacatgtggtggttgaatgcttgacatatgtctagtaagactgagcaactcaatttttcattttatttaattttaattaatgtaattaattaatgtaattaatgtagttgcatgtggctgttgaacacttacaatgtggctagtgtgccttagaaactaaattttttatttacttattttttccagttttattgaggtagaaataaatgacaaataaaatttgtatatatttaaggtgtacaatgtgatgagttgatatacatatacattgtgaagtaattaccacaatcaagctattttaattaaatttcaatcaccatatgtagctactggctactgtattggacaggcaggcttagaccattaaaacatctataatttgcttgacatggctcaacctctgaatatgtttcattttcctaaaaaaaatttcactggatggtttctttttgcttagacctagactaggcacatacatggtaaacacaccaaaaataaaaaccacataacctggacctgagatctgagaaattatcattttccaaagagatgagatgtgtgctttcaaagtgggctttggttaaatgtagaagacataggtaagagcaccagtccttgagtcactgcatgagtttgaatcctgactccaccacttataacctgtgtgacttagggaacataatttaacctgcataaatctcagttttctcatccagcaactggagataatagtacgtacctcttagcattgtgaggattaaactagataatttatgtaaatcaccaagggttaaggcacattcacagagcactgagggcagaagaaatgtgggctcctgtgcaggtgaataacctgtgaaggtatgaacagaaagtagaaaggaggaagcaagagagtaagcaagcaggtaggaaaacatcaagacaccagaaacatgtaagccaaacgcataataagggcaacctggaaaccagtggagaattatcaactaattgttaatcagtcagaactgaagtgacaagagtagaaatgcacttcatcaagcaagcttcttcttatccctgtttctggatttgccttagttcctgagatgcaagacccatcccagcagagatggccttacccctgctcaaatgaataagtgcttggtgacaccagggggggaaaaacagtggtaggaaggtaggaataagtatgatgtgctttggagcttgtgagaaaaccagcgcagctgaaatagacttacttgctgttgtgtacatggaggtaaggttgggcagaattggacagtggaagctttaaaagtcaggccaaatacttgaccttcttttgccttgtaggcaatgacaaggcacagggtttttttatccagggaatgtcaggatctaaatagtaatctggcagctaagtaaaagatggattcagatggatgagacttgtggtagtaagactagataggtcatctaagcatggcacaaaaggagaaagggaggcagcaataatggtagagttggacataaaaatttataggactccgggtctaaatagaggtgactgaaagaagagggcaaagcaaaaaatacatcagatatgactgagataagtgcctgagagaaagacagtgctgttagcaaacaggaagctagttcggggaatggcaaatatggatttcttctatctctttaggtcttgttggatttgagaaacagtgggaccaaaagtggaaacatccaattgaatactgaaaatagtagtgttctatgttcctgggacaaaagctgggatgtcacaaaccattggagggttttcacagcccagatgtggccaacgtaatcaactctgacagattgtacctggaattccccatcttgggctccatacagatggcctgcatttttcttccctgtgaaatcatactgcctttacccctaaatattaaacattcaacagcctgctaatcactgtgtactctcagaatgagcctttgtctatatgctccaacctctttaattaaatgcagctagaatgttaacagtgcaaatatgagaatgcttaacataatgatttaacggccatgcctcaatcgctctccaaaatatgtttttagactcagaaaccctttaataattatatttatcatacatattgacatttcataattgcagtcagttcaagaggaaattgattttctattggttatgactttttgcaattctcattgcacgaaatctagaattacgttcttctggccattaccaagttctagattttaagctgaagcatgaaagttgttaattttacaaaaaccttccccaaaaggcattcatttccttcactggcaagaatatcacaaagcagccccttgcttcattgcatgtcctgtggcatgattgtcaccaacgaaaacacaatatgtaaggaccaaggtaattattcattggtttctggacattaagtcccccaaggaacaacacaaatatacatgatgcagcttctgcaatgaaacattcgagataccagtgacgttttttgaatcccaaattgccaagttactgatttaagaatgccctagagtataaataatttccccaagcctccctagtgacttgtgtcgaatgccttctgcttagcccattaaaggtgaaagccatgaaatattatttgatttgtaacacaagaaaatgccctaaaaccacctatccctctttggaaagctgccagaacaaagtgagaggaaaggtcaagcctgagaacgatgatttcaggttgcagcatgtggccagatgaaaggctgagcctataggctgcattcagtcttccagtttcttcatagaggatttatatttatttttcctaactcacataggagtcttgggttttgagatcaaaatttcaaatactttaatagtggccatgcaatattaaaaaaatttaacaatgaattgtgttgaatggttactacgtgtccttactacatttcctttgaattcgatttggagaagctagtttcaggattcatttgatttacatgtggaattgatagatattaaaatccatttcttctaagtgcctcacaattgaaaaacattattttaattctgttgtgccatgcattgattcctatccattttgatctgtgatcactagacatcagattgcttgtgaattgccagtgaaggtatgaacatcacaaacctgctaaatcaacctttaaaatgtaagaaaagtttaatttagagttacatccggacatttataagatgcagacattgatagcttggaagcaaaatgataaagtatatgcctcattctgcaaatcagttacaagatggaagtcaaattattccatctgaaacctcttaattcagcagaggaatagccacttgagagctatgatggcagtttatggaagtgtctgtgatccttcttgataaatctgtatccatttacacagagaagtcatagtaatctgtactaattgagagagcaaggatacaaacatcaaattattgccttctagaaggcattaggggacttatttttaaatttaagcttgactttttattggctacctattatctgccaggtaataccacgtgtgatctttttatgcttccagaaataagaatgagctttaattagtatgtcatttttgcttaaagcatttctctgtttaatttagaaatcttaacattctcctgaacatacacaatcttttctggacgatcacttaaaatgaaacttttagccaagcctttatctgaatgaataaaatttcaaattagaagattcttacttaccaggggtttagtatatatgcattaaacttgacatataagctttatatcccagggactttggtaaagaagtagctttaccaattgttattctttattctcgatcttcctaaagtcaaattattttttagcatttgtttcaaaatgattttcaacttacaaaaaagttgcaaaagtagtacaaaatttacatatacctatcactcaccttattctaatgttaacaacatacatacgtaaccatatgatatggtttggatttgtgtccccacccaaatctcatgttcaattataatccccagtgttgaaggtggggcctggttggagatgattggatcatgttgacagtttctcatgaatggtttaacaccatcaccgttgctactgtcgtcatgatagtgagtgaatgagtgagtgagttatcctgagatttggttgtttaaaagtatgtggcacctcccccttccctctcttcctcctactctagccatgtaaaatatgcctgctttccctttgccttccaccatgattgtaagtttcctgaggcctccccagaagcagaagccaccatacttcctgtacaccctgcagaactgtgagccgattaaacctcatttctttatgaattatggtatttctttatagcaatgtaagaacttcctaatacaccatactacaacaataagaccaagaaattgatataatactattaactaaattacatacctcattttaatatcactagtttatcccctatctttttcatgtgtcagaatccaatccaggattccatgtgcctgtagatgtcatgtctccttagtcttctccaatctgtgacactttctccactttccttatctcttatgaccttgacactattgataaacactgatcagttacttttgtagaatatttctcgatttgggttcttctgatattttctagtgtctgctggtatttttcactgtagagttactgtattttatcccattattggtgatatgttttttagggaaagtatttgaagtctatgctaatatcctgtttctcctcaacctttcacctctgatattagcatccatcaaaggattttgcctgtagcagctattactgtagtatttgcatactggtgattttatatttccttttttccctctttatatattaattggaattcttcccccgaaaaagtggatcttttttctctcccaacttcttatctgtttagttatgtatttatatcggtatgagctcatggtcattcgttatattctatgggtataatccaataatgtcattatttattttgttgctcaaattgttccaggtttgtacattgggagctccttacttttgggtcctatatccttctgacatggtccccatcatttttgaagcaatttctcatttttaccattacaagatataccaggatcattttgtatttttcctgcatcagtcctaaaacctacctgttctccggggagcactagttcctttattggagaatggtattagaaaccaaggtctgggcactagacgtgctcgatgctactggagggtcattgctatgaagccctgtctccaaaatacactaggaaatatgtgtatgtatactacttcatacatactgacaatttatatttattatttatttatcaaatttatgactaacattgattttgaagattttcaacttacaaaaaagtttcaaaaatagtaccaaatttacacatacctatcattcacctgatcctaatgttaacaacatacatacataatcatactacaataataaaaccaggaaattaacattgctataatactattaactaaactatatacttcattttgtgtgtatattttgtgtgtatatgtatatgtatatatctgtctgtgagttcatactgatgccagctgaacaccacaaagttcattctagccttctctttccttatttgcaacatctttctccaacaatgagaaatccggttttctttatctgcaatatattaacatatttgttaaagacagaatgtatataagttggagttgctaacccatactcctttaagaaatatattgaccagcgagagcacagtatttctgtagagtttattttgcctttaggtttgtggtatccagtcaaaatagcttttcaaattacttaggttagttatgttcttagttacttaggttagtcatcttcttgaatgttgttatattcattggtaatagaattaggtttccttggtactgttaggattccgttttaagttctcctacatcttggtttattttaattatttctttattttggagtaggatatgaagcattactgtagttctaagtctcaaaactatacaaaagttatgtgtttagctatgtccccccacctttatccatactaacttagggccataatccccttctttctatccttttgccacccactctttgcaggttgatcaatctctttagtttgtggtttatctttcctgtacttcttttgcacgtataagtagatatgtgtgtatttgattatatttccttttttcttacaagaagggtagcatactgtagatattcttttatacttttctgttttcacttaaatttatgcctagtgttccactattggaatgctaatcaagtgggagttatttctatcctacagctcaaggtcatcgccaaggtctgcttgcaaaagttcaaaaaaattgcagcctcaggcataaatgggttaattgtagaagttattccagatcagttcataaagatcttccacattactaatagctgtgtagtacttcattgttgaatgcaccatggttaattagtattgtttccaatattttgctataacaaatatgctataatgattgacttaatgaatgtgtatttttgtgttgttaaggatgtatcttcagaacagattcctagaattgggattttagagtcaaaagataagtacatatgtggttttgttaagtgttatcaaattttcctctggaaggcttgtatcaatctgcattcccaccagctacttataagaatccctatttccccagaatctcataagacaaggtgatgtcagatttttagattttttcagataagaaatggtatcaagatctttttagtttaatttttccacctattcattttgatattatttaactgaacaaattaacacctttttttaacgtgccgtatcatataaaggatttttttaaaactaggatattcttgctaatataactaagaaaacttcataatgggctaaatataagagtgagatatatatttgtgaatagcctatgttaccacagcagataagtataggtacgtttatttttaaataatattttttaatattagggaaacattttcattgtttcctaaagtttcatgatgtatctggactccattacaaatgtcttcctgtcatagaattctgagaaataagtaggagcatatgaagaggtctgtaataacagcaattatggaaaagtaatttactgattgtataaatggaacagatttcaaatcgagtagatagaccataaaaagcaagtaggatattgaaaataaatattttgggagctaggaaattgctcattaaattcacataccaaatgtcaatattttgctaacgtttatataatttagtttcttagtatctaaaaccatacttttttttatttaaaaaaattcaaatagttgctaagatgatcaagtgtttgcagacattcttcctcttgtccacctggcagtatgaaacactgacatagaaaaacctttgttttgtgatcagtgaattaaaatacagcaagacaaagtgacttgcagaattatttctacattgagaaaaaggtagaacccattagggaatgaaccttggtgaaaatatttaaaacaggtaaggaactggctataaggaaaggacacagactttggttttaggcaaaaataagatgtggctgtaactcagccacttgttagcaatatagaaaccagaggcttccagcattcatggattttcaaaaaaaaaaaaaaaatgccctaccatgacacacactctctaccattgccatacccacatctactcaagcaaaaccttctgttagccctgtacgtttcagaagagaatgtccataatattagttaatgatattcttaacaataaattcttttcatgcattattctattgaaccaccaaaacagtcctaaaggaaaggtgtgattattgtccccattttacagaagaggaaactgagtctcagagagttcgagtaagtggcagagccaagaaacaatgctagatttggctcacacaaagtccatgctttaacccagagactatactccccagcagctctaccctccactcagcggactgccaacaaaaaaataggtttactgtgaaacagagactggagtaactgatctccatgtcccacccacagcaataaccatgaacttgctttttactggttcttgatttttttagaattacatgtataaaatgttgcacacaggccactcattctttcaacttggttctaaaatgtttccctaagtgatagtgctgaagcctgggccacattgctttgaacgtttgtagaattgcttttgcagaatatactctgaagtgttaccagcagtcaacactctgaggtcttacaagaagacctcactattgaacttgagctcactattgaacttattgtgtggacatgcctcagagaggagaaagaacttcactgtaccacccaggattccctttaaagggctcagaacagagccgggaaaatctagttcccaagcaactaatctgactaaatgtaatggaaaatgtaattttcataaagtcactttcccctcattgaccaatatgactgtcagagtggctcacttttatttcttataacatgaaattattattataccttatccctggagtcatctcattttccacttttctgcatttctcttatatttatgttgttttcctgcgtttgtgtgtctatatgtcatttaagttcagttttcaatgaggttacatttaaataaacctcctccacatgcccttgggcaagttgcttaagatttctgaatcttgtctcattagttaaaaggtacctgcctttcttagttgttaggactagaagtagtgtgtgtaaaatgtacaatataagcttgcaatgaatactaactatagttcgccactactgcgaagttggaggattatactccttaaaaataagtttaaaggtaaggaaagaactttaaatctatagtgttttttaggaattctgagttatattatcattactctatttgaatagaacgaatcattgcaaaagtctaatcaggaagccaagtactagtttctctacttcagtgtaccaaacaggtcccctttagtatgtcactgaatatttttaaatgtattggtattcttggataatgttaaaggatagtaaaatcaggaaaacagcactaataatttctaaaacccacaaatttccaaatgacaaccaattaaatattactaagacatttgaatatgctgctctttccaatgctctgagacgggatgagtgggagaaagggggatctcagcctttactcaatgccggtttgctgaatacactgagtagagaataaattcatgatctcaaaatcatcagtgacaccctttttctttcagcatccatctgttttcattcccagaaagggtcaagaaatcagttaaagttgcattccctgatctttctcctacaaaaaacaagaagtatggaagaaaaaaaaagatcaaggatcttaatgatccagttaaagcaaataatgtacagtggtttctggaatcatgcatgttgaaatatctccactcggatttgcaaattactctgggcacatgccaaagtagaaactacaaatattcattgtaataaagaaaaacggttttcaaggtgaaaatggtctttgccaaacagatttaaccagtctaacttaaaagcctctttaaattaccaaaaccagagcagtaaaatatcaacactacacatttatataacgttttgtttagtgacatttcttcattgaattctcaactgctgtggaaactaaccaagcctgtgaatttaagtgtttggccaaatctcacagcatctgactccagattcgcagttgatagataatcctcaaatctagttaatgcatttctgaaatagacatttatttcacagatttatttcacacacaaagggaagcaacacttgagaaatatttaacattttttttctctgggaaaagttggcaattaaaaaaaaaataactcatggtaaaaattccaggaagaaatagcaaagttaattttggttagagtcatctacaggaagaaaagaaagatacaagagctctgaggaaaacatatagactatgaatgagtgggaaaatgagatgatgcctagccttttcaaaccttcaggcataagaatacatgaaggacccatgacaaggaaaacagatagtattgagtgcaggaatgaagggttataaatatatttttgccgtcttgggaacagccataaggataaaatgataatgtcaaaaatagcagttgattaagaaatggcattgattttcccatactactagaggcacagaaataagaaaccaggataaatgaagttagtgttggatgacatagtaaaagcctgacttgcaagtaaaaaaaattaaaaaaagagagagaaatagttgaggatgagcagtgggcgccatttgcttccttgctgtgaaatattcacccatcagcttcaacgataattcattaatttattgaagcttcattagccatttcctttacacctagcactggattagccgctgtggggttcagaaaaaaaaaacgaagagacagaaatcctacattcggggacctcagaacttagtaggggacaagaaaaacattgtcattttggtctggtcgcaggaggcaatgtctaggtgtgcagcagattgcaggggagggcagatggtagtagggagatttgattcccttctgacttaattctcactgcttttttgtatcaccttcccactgtggaccccatggccctaacattgccctggaacggtacagcttcttgttcagtgtttatctgaacctacttctggatggcatttcctcctgtgtcttcatgttctctgctccccttcggccattgtatctatgaagaaggcattgtcaccatgtgccatggctcacccctgtaatcccagcactttgggaggctgaggcaggaggatcacttgaacccaggaatttgagaatttgagaccagcctggtcaacatagcaagaccctatctctatgaaaacaatttaaaaatcagctaagcgtgacagcctgcatctgtaatctcagctacttggaggctgaagtgggaggatccttagactcagggagctgaggctgcagtaagacgactgcatcactgcactgcagcctaggtgacagagggagatcttatctcaaaaaaaaaaaaaaagaggcattgtccctgtggtcactatctcctccctcctccccaaccccccactgatcctagcagtgttctccacatcagggactgactgattcatagttatgagcaatgatttactgattgaagagtggcatctatggattgaggacattgaagatacactgtggtaataacaaataatttgcctcagatacctgggacctggttgagcaaataagactgtgaaatcagaagacatgagatctgctttctaagacctcctcactgttcctcaaaccctccaggcatcatcacacctcagggccctcacacttgctgttccctgctcctgcactgctcttgccgcagaaatatatgtggcacctccagtcattccattgagactttcactcaaaatgcaccttcttagtgactctttcccctgttacttgatataaaattttcatcatcctccccaccaccatttattaaggagctcctctctttaatttatcacagtgtactttacctatctgtttgtttgggtattgatgtggtttggctgggtcaccacccaaaattcatcttcaactatagttcccataatccccacatgttgtgggagggaccaggtagagataattgaatcacgggtacagttcccccatactgttcttatggtagtgaataagtctcatgagatctgatggttttataaggagtttccctgttcgattggttctctctcattctctcttgtctgctgccatgtaagatgtgcctttcaccttcaccatgattgtgagggctccccagccacgtagaactgtgagtccattaaacctctttttctttataaataacccagtctcgggtaggtctttatcagcatcatgaaaacaaatacaggtattttttctccatctcttgaactaggggtttggtctgttttgttttgccatattctcagcagcaattcctggaacgtaatagatgctgtgtaaatatttgttgaataaattactgaataacagagtgctgttaacttctgctttcttctctgtattgtggatttaataacacttcctctgcctatctcaccaatttttgtgaaaatccaatgaaattgtgagagcgtgggtgtgttttgaaaactctatcgtgcttcccatgatactaatagtagcagtactgtccttgttatacattactcaacatcattataatcttccaatgtccttccaattgacatcctagaaggcttccaattgttccactgtgctgttgtagaatataccaccatcatgagactgtcaccagcaaaagctagcctgctaagcaggcacagagaatgtgcaccaatagacgttattgctagactcagacttctgggtgacctcctggcaccagcgctaaggtgccaggatggccttcagagagcaacatgatttttctactctccttatctctttagggagataggacaggagaagtagcagaaatttgccaatcctcttactgagaggggaaaacaggcttcctgacagctcttattacgttattacagttcagcctggtttctgggtccctatgccagtgaagccactccttcagtgcctaccagtaagaggcaatttgcaactagcaccataaatggcatttgtaatctagctagtagtgtcgtaaatgcatcctattggtcatgagctgaaccagggcaatcaaatgtccctgctagataatccactttgggaatgtgattagcattgtcttcattgacagatggcaaaagatactgacttccatcacatatataagttctgaccctaacaagtggtatataaacctaatttctcaaacttttttcaaggacttagagctctgtaatggaatattactagattgattgctgtgccttaataattagaaagtcttcataagctgcttacccttgataaataggattgttgaaacctccttgcttctggtgggctaataaggttgaagtgtcaagttttcaaatgcattataatcttagcacaacaggattcttcaaacctatccatcatctgccctcaaaatccactacagtcacatcttactttaaacaggctatcttgcacactcaactttttttaaagttaaggtgctgctttaacagcttggcaggctgttttgcatcacaagcttccacatgcatctaaggcatatactcttgttgctttttgaattttctctctggcaattactcagcttggtttgtgtttcccaagatgcagagcactttacgagagtatgtatttgtttccaaattccgtattgctggacgtgttcaaaacgtatccattaagtataatagcatatataatggaaagtgtaaagagatattcttaacgaaagagtacataataattgcacaaaattaaaggactcttcttaaaggatataattgtttctttcattaaaaaaaggataacaatcttgcacagattctgtggcactttcaacatggcttcaaggagatttttgtcttactctttagtttcactgcatagaatttgggttagaagtgatacaaactgcagaaacacctttctagtgaattttagaaattttaagaacatttatatttcttattaaagatagtaaagcatcattaaatatatgaaagtgttttgattcaacaatattcagtaaatatctagagtgcctgctagatatgctaccacataaggatgtgggaataccacagagtttctccatgtaaggtagtggaaataaaaacataaaaaagacatggcctctgttacacagagttcccagtctggtggggagaaagacgcataaacagttaaataaagcatcatgttaatcaggctgtagtctggctacatatgttgaaaatgctatagcaaaacagatgagtgtgattaatgttacctagataagggcaaagaagtctttttataggaggtagtatttgaactgggtcttaaaatataaaaggaaattgatcagggatttgggtcaggtcatgcattataagcagagaggacagcaagagcaaagaaatggtgcaatgaaggtactttgtctaaaaaatggtctaactaaaccatagcatgtagaggtgggttggcagggaaggaaaaggggtgaaaatgcctaacggtatcattattgaaagtttggttggggctaggttatgaactgcctcatatgctatgctgtggagttgatatatttatgctatggagattcaacttcatgttgtaggacgagggaaccatttattgtatttcaaactgatgcatctcctttaaaactcctctagagatttcaactcttctatactcctctcaatgttatatccctcagtttatgccttacatcgtttaacaattaagtctgtaccgatttgtacacggtgtttttgtttcatttgtttcatttttccccttagtgtcctcttccaaacttaattttaagcttcttgggggcctgccttagccaggcaattaattatgtgtcccttaatctcaatcaaactaaggtcaggagccccttattaaaggtcctctgttgaagctatgccccttgggactctggctcattgaactctcaggaagtcccttaggaaagctcccctttctgtactgcctttgcccaccctcaccaccttggggccactactctgggactctattctctctcaagtggcctcttacaaatacaaccatcctaggcagctgtcacatcacctcccgttttctcaagctcagcttctaccaaatatgcatgtcagaaagggttttagaggagctaaaatcagtgacttcatttttgaagagaatgactgtcatgggtaattgacagaattactgcatcttagccatagaagcattggaaattgtgcagaagctaaatggtttttgccactcaatatagttaaactctggaatgactttcgggggatacgtgatgaaagtagcgtgtttttctttaaccctggctactgaactggaattatggagggtcactggcattttttcaaagctctgtaggcaatttggataaacaaccagagctaaaactctggattagagagttagaccgacttttgaagtgtaacagggactagggttgtcaccttccacatgaaatcatgagcttttgggggctaaaagcccaaaggtagtaattgttaaaattatattttaaaatttttacctaattcttttaggtattacccaataaattcacaatagagtgtgaaggaagaaatagaagctgcagtgaaccatggtagttccttaaatctgaccccctgtccgattaactgagaacaatcacacttgtcccaacataattatagccacctccctttcactttcaaaagtattcctgtttgggcaacaaatgataagctcatcccatctatatatgtaactccaggtctgtaaacacccattttctgggtagttgatacttagggaaacaattagatatttcttttccacgatgattagaaggaaagaaaaacaaaatagtttcctaagagttaaattagtaaatcagtacagataatattcttacttcagagatatagatacttatattcagaaaagctacctagtttaaccaggtattttagtacatttatttttaaaagatattagctgaaatggatggtggagctgaaaaaaaagagaggggcttcaaaaaagcaaatttggacaggcatgtattggtggaaaaggtgctgaatgagaggaatatgaacactctgctaataattaaaaggattaaaagtcctagaagtcacctttcttagtttcttctaatgctttgttcaccagatggcattctgagtccggatataagctgttcaggtcctatgatcaaagaagaggggactctaaaccgaggaagtaaatcttgctagctctggaaaagaatacccgccccgccattcctaatttaaaacttgactttttggttagtgcatcagcccaggtggttgtggttagggccagtgtcacggaggatggctgattgtcactcgcaaagcccagcctctgtgccagcagagctgagatgtgaacctgaacagtggtaaattcatttagatcagtggagtcgcccggagggcctgttaaaccacaaagcgctgtgctccgctgccagggtttctaattcagtaggtctggggtggggaatgtgtgtttctaacaagtccccaagtgctgctgatgctgctgatactgggccacactttggataaccactgatccaaataatcccaccttttgacacctcctggcggccagctgctggcctccttagagcctcaaggtcagcctttccttctatttgaaaactcaacaatcatcttacctaccttcaagcccacctttgagaaaagagagttcagaagaggtcgtctaatccacgtggctcacaaagccaattatgccattatttgtttgcactttataaggatgcatttaccaagtgggttaggagacctgtgggaaattcactgaatttcttatattaatctgtcagtgtaaatcatgggggagtgatttcgactttaaagcaagtacttcttgtatgctctgtattagagagcttagagagctgtggactgatctgagtctcaaacccgaattaatcttattctctgcacacctgcactcacacacacatccacacctaaaaaaatccccattccaaatacacaaaacgtatttgaaaaatgactagaagtaataattaccatgtgtctcagaaggtttgtatgactagattcatatgccagctttattctcgtcctgtgtttggatattgtcgtctgacagggaaggaagctggtcttcagattgttgactgttagccccacacctaggtgagagaaaagcaggggctcagcgaagaccctgagggagctgagaatcagccctggtgaaagtgtgagggtctgtcttttagttaaacacagggtgaagcagttatatactttaaatgtatgttacaattctacaattgcaagaatgacaagaataatattgcaaactgtggtcactagcaaagaaaggaggagaaagaaaaggtaatcatctaggatagcactggccaaaaatcctactcaccaaagtgatttgcttagagcaaatcactacagaaaggacaacaaatttaaaatttaaatgtaaatctactattataataaaatgaaacgtgattattttaccagatttttaggtcttctgacctaaggctgtttagagtacttgaaaagaatagtttatagttcaaagagaaatgtataatttaactgaataaactgtaagtaaaccaaattaatgggtacactttttagcaaagaacctttatcacttggagtcttagcagtaattgttggatgtagtcaaataaagtttttgcaacctggaatttactgattctccaataagcccaactcagtagatttaactagttttgaatcatggatccctttgggaagtctttgaaagacaagtgcccttttcctaaaaaaaacaaaaagtaaaaaaatagccatagctacacagatacagaattttgagaatatggcgggtgtccctggatgttttgaaacccactgatgaggttccacttgaggacctgtccagaattacaagtggggaggctgatcttgaaggtagctgtcctgacttctgtctgatcatagcaccaccacctaacaggactctgactcagccaaggcccagcccctcttagcttcctcatctgctaaaaggaagagctggaccagaggactggtttggtccctactgtatctccaagtgtgtgatttgtcagtcatctgtgataaatcctgaaggctggttcttttccttttacttgtttcttctttcccacagccatttctagagttttggacacacatgtcttgtaacactctctaacccctttttttattaatttaggaacaatctctcccctttctattattccccccacttcaccaccttctttttctttaaggtctaacttctgatattaatcatttaaaaggaagagggaaaatatttttgaatgagtacccagtcctataaactatattagtgagttactcaaggattaattaaactgaataaataattaagaaattatgcaagcaaattcaatacacgtggagaatgtcactttgaaagcatgttcaggaatgatcatcttcctcttcccttacagactaggccttggaaagcaatagttggtccctgctgagtcaactccgagcctctgggtaggactgggagctagagaatgaagtcagtgtctgagaatctggaagatgagcgtcagattttaacagtataatcttgttaagatacacaaatctcttataattaccctcatgagtagtagatgtatatttaattactgaaaaattcagtagagatactaatgatcaataatggaaaaatccattagtccaacgataatttctcccataacactgaaatccaatctgaggggtcatgtagttaaaacataaagcatgtcttccaaatcagcaattcttttcactttcatccaatgacattattcatgataagacagaatcatcaaaagaggaatggctgtaagcctgttctggatgtcattaacattacctgaaatttcagtaatgagaaaagggtgcttatagttatcttatcattttgttgcatttttctatcatgaccactcatatttacatccatggcatggtttattgaaacaaagctattatattgagttgtaagggttttttaaaatctattcccttttgcctttgcacttaacatattcagaatgtgtgtttgccatttgaaaaataaactcaatgttacatagtgaatgaaatttagaggttgattatgttcaacttgttagctctatgattaatagagaagaattggaagaaagtatatcatatttgggaaataagagtgaaataccagcctactgttgcttacaagtgtaatcttatcatatgcagattgtttaaaatcactttttcaaattagttctattcgggagtgaaaatgctcagattattgaaaccttaattttatctgaagataattatccaatgttcattgagactattatcacagtcacgaaatatttgaaaatctgtgtttgctgttgcagtgctaactaggattatgttttcccatttcattagtttgtttaaaatggtaagtagcataaggtgaaagaattgaataaaacgaagggaataaaaatctctatttcttttaactatgctttattgttctccattattgggaaataaaagagaggaaataccttcaagaaaggacatttatgcactggaaaccaccgttgtgaaatatgtaccatcattatactgttttacacatctgtactttactgagggggtttaaataagtgcttgaatttgtgaccttcaaaagaaacagacttattggatgaaagagagttgacagaaaccaagtgcttctaagagagcacatggtcttaatcaaaaaaagcccagcagaaattaaacaggacagctgataaaagacagatcatttagatgtatagatttaaaaaggaaacatgctgtattcaaactcactatagattcatcttaagaataaattaatttcataactgtactcattatctgaaacatgcccccagagattctggtcattaccccaaaaccctgtaagggaagtttaatttatatcataagcatattcaaaggaatgtcttagtaagagtcccactaattcttaaagagctgggaaataaacctagactactattacagaaaacctttgcctttacggaagtaagatcataatgctcaggacttccccaaaattccatttaccttgttttagaaaatcagcaatagtactcaattgttatatatatttatttgattttataagcttgagaatggaaagttgggacatacatatttacggtacggaaatcaagatgatttctggccttctattttttccatctgccaatggagagacctagcccagtgccaatgttcacttacctttcaattgcttatttgctagctaaggattattcgtgcattcatgcattcatttattcattcaacaaatataacttggtgtgcttgaactgacctaagctaatttggctgttaagcaattgtcagggtcttttggtagctcccagaggttattttggtgtttattaagacaagtcccacaccatagccccctaggtggttacaatcaaagccaagcccagaccaagtttggacgaactacatttactagcaaataggaataaaaccatcaaagcctgtttttataagcctggggcagttcctctctgccctcggaagatttcagtggtttcttatgtgaatggctcactccaggcatagagagcaggaactggtgaaagcagactagctactgtcattgaatgatgaggttccttcccatgcatcgccttttattttgaatgttagggcaagagtttggtaggtgaagccacacatccaaattctgataagttagaagcagatacgttaggttccaataagttagaataaatgtagacaagtccctgaatgcttgctactcaacaatttcttcatcattctttcaatcatgatggtattatccaaagtttatgttctaagtgtttttagaattttaagcacaagggttagctagcattcttggctcaactctagtgtttacttgattaaaggttacaaaatgaaaaccaaaaaaagagctttacattttatttatagagtttttttttttaagaaggcaaaatctcttactcagcttaactttgaaggcttagctcaggattaggcattaacatgttgttcatgttgttcacttactcacacaaatacacttgcatccaggaaagcatttttctttttttttttttcagtaatcagacgctgttatttaggcaaaaataacaattgctgggtgtggactactatgtattgttcccaagcttgtgcatctcttgaaggagtgcctacatggaaggaaatgtttttctctcactttccctttctgcttctcctatctttcctcagcgtttaccctcctgcagcccctcatccttgtcttcttggctgagccacagaagtgctacttgtaacacccacagccagcctggaggtgccaacagggagcaggataaagaggttcaaggattggaatgggtttaaaacccatgaacacgaacgtgttctggtttctccttagtttcttagtctatttggtttgctgtaacaaaaatgccatttctgggtatcttatacacaacagatatttatttttcacagttctggaggccagtaagtccaagatcaaggtgctagatttgttgtcttgtgaaggcccgctgcttgctttatataaagatggacatctttttgctatgccctcacatagtggaagggaaagcaagttctctgtggcctctttcatgaaagagtgctaatcccattcatgagggctcctccttcatgacctaatcctcccaaaggccccacctcctaataccatcactttggggtttcattttcaatatttgaattttggggatacataaacatccagtctgtggcagcctctttccctgctcccagctgctaaagatctgccatccttcaggccagacacaatacccatgcatctctactcttagttctctgaccacctcttctcaaatatcatctcctctctttggttttcaaatttattatacagaaaaaacaatttcagcctactaatgataattttaaaaaatgtggagatggaaagaacacccttaggtctcccaacactgtgattttaacctaacaaataacactcaaatgtacctagttaaaattgcaatctgccctgtctccaatcgctggtaccatgctcctctgcttcttttatccatagtacatatcatccccaaacagtctatatgatttacttattctttcttttgaatctttattatctcccacccctgctgaaatataagctccatgagtgggaggatctttgttgtgttccctgataaaccccaggtgcctaaaacagtgactggcaggcacatagtaggtgttcaggaaatacacgctcaattgaattaaagagaattcctaaattagtttcaaatactctcttaattgttcatttcacttgccacttaggccatttaaggcctgagaaattgcagtgggctctaagaaaccaccataccctaaaaggatgataaagtatgtactttagtagtagttagtttcactacaaacattccattgtgttcgagcttccagtagaactcaaaagccaacaagaaaggtgcaaaaataaatcccaagttgcatctgaagactatctttcataattaaggttttagaggtcatcactcaatcaagtataatcctgcattaatattaaagcctaatatttaggggtaataatagagtcaagtgtcttcctgggagtgcattaataccatacaaacttttttaatttgccaaaccgtctgattaaaattattaagtagctctcttttgcaaggtgctgttgaaagtaattgtacatgcaacactcacggagtattttttcatcttgtaaaagggtaagttgctaaactttgattaaaaatcagacacagaactagatatatctgacattgtcacatatactattgagcgactttaatcaaattcagcattattatctttttatttgcttttactctgcctgcaggtacaataaagtgaaaatatgtaagcaatggagcatatttatattactagtctgtgtgccaggtgggttgtaaaataaatgtaattgttttcaaagattgaaccagattagcatggattaacacattcattttggaatccatggcaggaagtattctaaacatgccttcaaacagcccttgttactctgtttatatcccatcttagtactacaaaatcactgccccataaaacagggagcattttaactgtttatttttatatgaaagaaacacaatttattaaacaagacaagaaagcagttttctgccatattgaaggccagatttgcagtgatttgcactctgcctttcagcagatgaacaaaagtgacagacatggaagccagagttgtggctgcaataaatattcataactgctcctgcccaaggagcaaagggaggggtctgaatttgcagcacatggttagcagaggatgaatcaggactagactgtccaacacacacaggcatggaagccctgggcaatgcaaggctgaaattcctcaccgagaaggagcactgtgttactgggtgattttgcagaatcttgactcatgggaggtgaaatctttcagatatgccctgctgatgccattatccctcctctctaaccttaaaataaacctgcttgagaaagtgtattgttgatgtatgacatccatcggggagagtcagccctgggggaaaaaaaaaaaacaaaaatgtagtttctgatgcacttcaagacccaaggtctactacaagaaacctacccaattttgaaagaaatcagtctttggtgaattatgctcagtgaagctaaaagaaatgtgtactgtagagtttctctggatgatgctgggtactggcaaatctcgattctcttactccagtcctaaggatctctttattttacattgaaagatgctgtaattcatttctatatttaatgcagggatcttgcctactgtgaaatttagtgtcactcatgcaagaaatctctatcaaatttcccaaacaactggtgagtgaagaaactaatatttttttttcgtttgttttgtccactaggaaacttacagtagcaaaatttgtgtcccagattatttagtaactatgtgagatcttaccctctacatttctgttttttttgttttgttttgttttgttttttctttttgagacggagtcttactctgtcacccaggctggagtgcagtggcacgatcttggctcactgcaacctctgcctccggtttcaagcaattctcccgcctcagcctcttgagtagctgtgactacaggcatgtgccaccatgcctggctaatttctgtatttttagtagagaccaggtttcaccatgttagccaagctggtctcgaactcctgaccttgagtgatccacccgcctcgacctcccaaagttctgtgattacaggcatgaaccactgcgcctggccttaccctctacatttctatgtcctatttcctctccgttttcatcctaatatcgtaccattgtttatttagcttgatttttaaatctttattatgtacatatttttaaataaggctaaattgtttatggaagacacacattcttcaacacatatattgactaatgaaactgtaaatcatatgaaaaactggctaaaattgaggaagtttgcattattaagcagaggatatttaagcttcttctgttggtcagaatcatagatatttgaacatcactcagtaccttacatatatagagagtgagagagataccaaacatttctgaaatctttaaccggatgaataccctacagtgatggactaatatctaagtaatttagtggggtgaaatactaccaattttacaagagaaataatgcatggggatgtttttcttccagccgctaggcacggggtcaggtgtcattctcctgggcgttgggtcactatgtgaggtttggcccactggtggccgacctgtttgttttcagtggtgtaattggtcactccagagatgaatacttagaaagcattagattttagaccttcactgactcttccagcttgccagaacaattgtgagtgagacatctcttcaagaatgaaatcatttccccctgcccagctgccatgagacactcatatgttcaacaaatgtaaaacatgcttgactctgcctgaggaagtagattttgcagtgccagactttgtttgggaatccctttgtgatccaaacagagaattcttcaacaaagtatttggatgttgctgcaagggagggctgttatgttttactatgtagctatgcttagctgtggtgtagaatgctagggagtgaaaacaacagattctattgcctgagactgctaacataggaattttttttaaatctgattatgaaacattattctcaggataaatcactttgttagtgctttgttctgtgcttggttttgtttgtttgtatttttgtctacattgagttttctcacagtgtcctgtggagaggaccatgaagtaatatattcaaaaacagataaaatagcctaagtttgtcctctctcaaagcccgagccttcctagctcatctttcatgctaggagaactgattattcacatcaggaaaacactgattcagtactacaagcaaagaggggtgactctgaaattgttttctccagagttgttagctagactaatacgaaatatggataaaggaaacttcacatttcagcattacattcagtttgtttatatcattatctcatttgcctctaattctttcaaaaaaaagatgccgccaccagtttttttggagctttcatggttggaagcattttcttaagggttagacttaacaccatgcaccaggaagagctgagtatattagctggataatgtgcatcataaagcatatgccaccacccttgtcttggtcagaggggagtgagctgtcaagttagtatggttagtacgtagatgagaatcaacacaccctggtcttagtctcagctttcactcctactgtgttacctcagctgcataactgagcttctctgggacacgtttatgacatatgtaaatgaggaggtggtactaaattatctccaaaatgtttctaagctcaagctggctattatattcacatttcagttcgtctatctaaaacatacttaccttgattaattagcctgttagaggaatgtaataaaaattatgagctttttcttctcatttaatccccattttcctctatcaccatttgtccatcccattttcatttcaacacacttgaaaaaggcactaccctcccatctgggataccagctccgtagctcgaatggggtgcagcatggggactggcccaggaagtgttttaattttagacagagaaagaaaacctgtattgaataaagcccccagttgcccaatatgtgtcttaacagggaaacttgttcaagatgaccaggactcatcttgaatttccaaaatggccacactcatgtttatttcagagccataaagcaaagtccccaaagcctgtctgcctgcctcaccagaacctttgaatgcagtcattctctgcttgttttttagaactcacacttagcattggattaaaacactcaaatctagggcattaaaatcaccccttttcagcatatgcatcttgcaagatttatcttctcttgcctgaatccctgacacaaaccaaattgtggattatcttaaaatagacattgtcataatttattaatcatcctttaaacctcccaagtactcttggtatcttctcaaatgctctcattctgctatgtattcttcttttaaatgaatctttacaagtaagtattgtttacttctcatttaccttgtaatatttaaacatggttgtgagacttcacagaaaaaggatcagggaattttagcattttcataaacacctaagtaaatgtggcttaagtgacaccaatctttagaaatatgacaacttttgatctttatacccattttttttttgtgatgtgtcacctcagtagtaaatcctcacacggctttgtagatgatacacttgtaaaacgcatggcatatgctttgcctgttaatctttcctctgccaatttgcaatggaaaaggaataatcatcagccaacttttacagtaaggaaaccaaggcagtgtgatcagtcccaggctaacaagtcaaagggcaatggagttaaaaatgaatgctaggcactcagtgctcactctatgatgagagtatgctgcagagccctgagatgaaatccataggcatggttaactgacctttaggaagtttgatggctcagtgggaggtcttgcatggtattcctgtattcatttcaaagaacagctgaaatgtcattattacatgggacagaaataatgcaaaattaaatgcattttctgcaactgacaatattaaatagtgctgtgattttactgttctcatattttctaacaccgctctataaattccttaacattcatgtacagaatatgataggtagaacctctgaattttgactatctagcaaaggttagtgcttcacttgactcagaaaaccaaaattatagtcctggttccaatgtttaccaggcccctagccttgggcaaatgacctaatcttattacaccccaccatctttctctgtataattaagtaatgatgtgtagcatcttgagatctgattaatttattcattcagtatctactgagtgcccattagaagacaggcactgttaggaatgagaatgagctaggctgagtatccttcagtcttccagacagcctgaattactcactcaagtaacacttccatctctgtgaatcagcaaagagttaaacaaagttgaatgcttgagatatttcattaggtcttttgaagcatagttccctgttatttcttaacctttttatttgctcttaatcttatttcctacacatgatcgagtttggtttctcagatggtgctcagtgaattaaaatagacagtataaattaattttgtgaataaaattttatgagacactacatcaaatacttcagtaaaatcaagatatattttatacccattgtagatattcatggtctaatcttgtaattatgttttttaaaattggatttgtacagccttattatccaattattcaccccatgctgttcataggtacagctatattccttaatgttagttcattgtatttactagaaagaataatgtcagaagtaattttcatgattgttctactttctctactgtaaatatataactcatgtacactttttcaatattatttctttagatgaaaaaaagagactatcacatatacagtttttccccactacagaagattgggtgttagtaagccatcattttatacattttgtatcattttgtacatcaatgtacttacatttagcattcaactgctaataaaaggaacatttttaagtgttactcaatctaaagataacgttgtcctcactaagtcagttctccatgctctatggagattgtgagacccagagaagaagcctaaggtgcatatgaccaagtcagtattttctcataaaaagttttgagtgtctctcctatgcttggcattgttaactctgagaatccacaggtgaatatgacacatccctttccgcaaggaacacacaactttatttaactaccaaccactttccctttataaggtaggtataaaagctaagtatctgaatataagtattaattctctttcagagaaagctccctgagagagatgcttgatacttttaattcagttccacttggcaaccttgcatggaatacaactgggtagttttaatattttctatgaatatgtgttggtgcatctttgcgatcaccaaaacattacattttttaactttcaaggtatttttgaactgttatgtaaattaaggcataagcacttttaggtaataagtaagtttaggtcactagaccttctttgcgactaatgaggaatacactacataattgtcagattcttcttaattgaaaaatacctactcaaattccaaagttatcagggactgaactcaatattagggtaaatatggaatatataataactgattatgtatcagattgaagcttgaataacttattcatacatcataaaattgtggattagaagtttaactcagtcctttgttttactgctgaggaaaaggagatctacagaagcaaagatatttgatcaagatacgtgaaagaattgaagctagaatccacatctcccattccacatctgatattctttttattatgccgtattctgctacaaaaattaaggatggtcatgaaacataggcctctctctgtctgtctgtctctctctctctctctctctctctgtgtctatgtatagagatgcaatatggggtgtgcttaatattcactggagtccatgagagatagatagatagattatagatagatagatagatagatagatagatagatagatagatagacagacagacagacagatagacaggaaagagggagaaaagagatatttgtgtttgtatccatatattctggcaatcattagaatatgaagcaaataatatgtgtgtggctaaaaaatgtgagtagagagtatgtttatatgtttgcaacagcagatatgaatcagtaccaccttagtggtcaaatggatagggtggaagcagaactcatacaatcctctggttttctagccttagcaaaagataaggatactaatgaatatgcttaaatgtagagaacaaagatgatctaagttcacctcagattcaccattgtgttcaattttatgtaggaaagatggactcctcagtggtggcacttcatgaattatttttaaaagatgtacattgataaacaaaattaaataaggtgctgttattttttgaagctctggatatgtctgtattggttggttttcatgctgctaataaagacatactcgagactgggcaatgtacaaaagaaagaggtttaatggacttatagttccacatggctggggaggccttacagtcatggtggaaggcaaggaggagcaagttacctctttcatggatggcagcaggcaaagagagagagtttgtgtagggaaactccagtttttaaaaccatcagatcttgtgagacttattcactatcacaagaacaccatgggaaaaacccgcctccatgattgaattatctcccaccaggttcctcccatgacatgtggaaaatgtgggagttaaaattcaagatgagatttgggtggggacacagccaaaccatatcattccacccctggctcctctcaactcttatgtcctcacatttcaaaaccaaccgtgccttcccaacagtcccccaaagtcttaacttatttcagcattaattcaaaagtccacagtccaaagtctcttttgagacaaggcaagttcctcctgcctgtgagcctgtaaaatcaaaagcaagttagttacttcctagatacaatgggagtacaggtattgggtaaatacggccattgcaaatgggagaaattggccaaaatgaaagggctacaggccccttgaagtctgaaatccagcagagaagtcaaatcttaaagctccaaaatgatctcctttgactctatgtctcacatccaggtcacactgatggaagaggtgggctcccatggtcttgggcagctccacccctgtggttttgcagggtacggcctccctcctggctcccttcacgggctagcattgactgcctacagcttttccaggtgcacagtgcaagctatcagtggatctaccattctggggtctggaggacagtggcccttttctcactgctccactaggcagtgtcccagtagggactctgtgtgggggctccaaacccacatttcccttctgcactgccctagcagaggttctccatgagggacccacccctgcagcaaacttctgcctgggcatccaggtgtttccatacatcttctgaaatctaggtggaagttcccaaacccccattattgacttctgtgtacttgcaggctcaacaccacatggaagctgtcaaggcttggggcttacacactctgaagccatagccagagctgtaccttggtcccttttagtcatggctggtgcagctgggacacaggagaccaagtccctaggcttcacacaacatggggaccctggacctggcccataaaaccatttttttctcctaaacctttgggcctgtgatgggaggggctgcagcaaagttctctgacataccctagagatattttccctattgtcttggtgattaacattcgcctcctcattacttatgcaaatttctggagctagcttgaatttctcctcagaaaatgggattttcttttttagcacattgtcagactgtaaatttctcgaacttttgtactgtttcccttttaaaatggaatgcctttaacagtacccaaatcacctcttgaatgctttgctgcttagatatttcttctgccagatacgctaagtcttctctctcaagttcaaagttccacagatctatagggcaggggcaaaatgctgccagtctttttgctaaaacataacaaaagtcacctttgctctagttcccaacaagtttctcatctccatctgagaccacctcagcctggatttcattgtccatatcattatcagcattttggtcaaagacgttcaacaaatctctagggagttccaaactttcccacgtttttctgtcttcttctcagccctccaaactgttccaacctcttcctgttacccagttccaaagttgcttccacatttttgggtatctttttagcagtgccccactctactgctaccaatttactgtattactttgttttcaggctgctagtgaagacatatccgagactgggcaatttacaaaagaaagagatttaatgcacttatagttccacatggctgcagaggcctcacaatcatggtggaaggcaaggaggagcaagttacatcttacaaggatggcggcaggcaaagagagagagagcttgtgtagggaaactccagtttttgaaaccatcaagtcttgtgagacttattcactatcatgagaacagcacaggaaagacccacctccatgactgaattacctcccaccaggttcctcctgtgacatgtaggaattgtcggagttacagttcaagatgagaattgggtggggacacagccaaaccatatcaatgtctaaatgcagagaactcagagatatacagtctttatcctttgtcactttgttttttgctgcttaaaaattgtattccactagatggagaacatgttaattaaaatattgattgtaattgtccttttgagatggaaatgggtctgggaactatgctacgtgaggtaccatggaagcatttaaatatattttccccaaagagcagactagaaagagaaactatgagataattcagtgttgaatacttaaagtctatcctttctagagttactctatgagaacattacagcgagacatattttgaatcaacacaaggaatagttttctaaccttttaagacttgtctgaaagtagtctgttgctaatgagacagggctctctactactaaaagtttctaatggaggtgacaccttttctgggtgattctgcaggaattctttaaagcagatggcctctagtgcgtctcaacaatgagtctataactctgctaagacatcactgagcaattataccaacaagaatacaaaggaaatctaaaaacagaattggtgtttggtttaattgatccagtagaataattgtggcttcccagagtgctgtgttgagaaggatcctgaggtcacctctgggctcattatgattgagcattgtaattgattaatgatgctacacagggaaagaagtgaaggaataatttcattctgatacacatgcctggcatgtgccatcttgaccttaaaaggtaaagagaaaagtcttctctccattttccagcatttgattattcattatattcctttgttctttatgcacctaagcatatttggttaactcagttttgaaatttcaatgatgaatagtctttcgtgtagagggtttttaaaattaactgaaaattatacatttataacttagaataaagcatgtggtgtatattatagtctcttttaggatgacatgatttgattaaagattataatgaacaatcagaggatttaactaatccaaattggccatttaaattattgaaaatctatctgtcttcatgttttgggaagctttgtgtctgacttccacatgccctttgttctttttgaagtttgcctggcttaaagaaaattattcaatacagagctcaattacaaatgtgctttgacaatcaggaggctgtatctgtggttttatctggaacttcaacagaggtgataaagaagttccatggcctggaatataaattcatgcatctacaaaacagtaatgcctttccttagtgtaaaacttcagagaagacaaaatttctgagtgcttctggttcagaaaagcagcaatacttacagaattgtttttttcttactcagatcttcttgtcttaaaaaatatgcagtgaagttcatgtaaattttttgttgtgcagccacaataaaaagttacaaataaaaaagtggtagctaacagtattttgccttttgccaaatatacaagtgtcacaggacacccaaagtctaatgaccttgagaaaagtataaggcttgaattttcatacagatagactttcctaaatgactttttgccataattacacacagttaagcatttattcagcatcaagcacaactaatgtcttttcctaccatttatttccccttctaaacaagtttattttagtcatgctgtttagtgaattattttcctctgaagacgtgtagacaaactaatcaactaaagaaaacctaaaaactgaggagtcactgatttgagttttttaaaaagttaccatctaattgtgcaactgatagtttacatgtatctattttgaacattttatatataacctatgcacaattatcctaaaataaatatttaatgaagatggaaaaccataacacaaatgtttcaaaacataacgtcttttgcttacaatttttcctactctttgggtggcatgataaagccccttgtttttttgtttgcctgtttgtttgtttttgagacagagtctcactctgtcttccaggctggagtgcagtggcatgatctcaactcactgagcctctgcctcccgggttcaagcaattcttctgcgtcagcctgccaagtagctgggactacaggcacgtgctgccacgtccggctaatttttgtattcttagtagagacggggtttcaccatgttggcaagaatggtcttgatctcctgacctcgtgatctgcccgcctcggcctcccaaagtgctgggattagaggcgtgagccaccacacccggccgccccttgtatatagacttattctctaccttttaaagcactagaaaagcaacaatgaatattgcaaaggcaccagttcctgttctcaagatatttgtggtctgcaggaacaagacaaacgagtcaaatagcaatgacagggcaaagtggcatgtgcttaatgtactttggggtccataggatgttgtctaatccagactagaggggtgatgcccacggccttgcaggagaatggcacttggacaatatgtgggagcaagatgaaaggtgaataaggtcaggagagtggaaggcatgcaagagaaagaaagaacatgtgcaagagtcctgaattgaaagaatactgggccccattcaagaaattgcagatagaggaaaaaaagattatctttatgttagagagaggcagagagtcatgtctacacctaatcattttccaactcacacacaaactctccagacagccctctccctccttgacatctgcattgaatggccaaaaataagagtgccagccctgcactaaaagaagtagtttagtaatgattctgaagtaaagcagtggtttgattctgatccaggaataccatcgttattactctctcctaaagcattcacagatgaaagcagtgcagtcatgaaatgtgcaagcttctttacataagcttcttttgtaaaaaatggttcctttgatcccatctcacaatctacttaaaataaaatactttcaagattttgcagtgacagagctcagcacaaaaatggagctaccataatgccagcaagaatataaaaatttttaaggggctgttggatatgtttccatttgcctgtactcagctctaggggtagtactggacataagcataaataatttgccattttaatgtcctccctctgcagcaggaggagatctttcccaacatgaacctcgggttatagaaaagagtcattgtggataaaggtgtcagattacacggagattctgctgatgagacctgtttcacaggtccaagtatcaggtggttctgtgcattcatcctgtggtctttctctcctggaccgctaggagaccaaaggaccctctaggataagcctttaaataatcttgaattttaaaaaattaaaacaatagtaataataaccttgaatttttcactagagctttgtttaactttaacaacaacaacaaaaaatgacataaatggtgcttgggaaaatgagatcacagtcaaccatccaaactgcactatgtcccatctctttgacacttgggaaatggcactattagcaaaaataagtacgataatatcgtttaaaaatgaaggtgaagccatgagttactatttaagcaaaatctttgcatctggcagagtttctgttgttttaggaatcagtgtgtattagagaaccatagattagctgtgcatattttctcagaagtacaaatcccttcagtccaatagtaaatactgagcataaaaacatcatactttatttgacaaaaatcttcaatagcctccatgcattttttcagaatagcaatcatcatgggaaagtagagattaaataattcatattcaatagctcagtaaaaaaaaatacttttcaaaataggggcaaatacgtttgctcattcctctgtttcaagagcatatgtggtgtaaaattttcagaagactattatgtgcagcatagacaaggttatgttttaaacatgacaatgaaggtttaaagatgattttcaacagatttcagaaatcacattgtatttaaactacttgaaccccttctgctaacttacagctctaagaaattcctccccttcaggatgcctcttctccatgttgtaccacttgaattttatcacccttgagtatttgttcttacactagcaaatatgttttgtgtacccatgacttcagatagaaaagtcaccaacagttgtcctttgatgcacagtgttgaagacggaagcagagcagacaattaccccaaatcacctggctttcagcacctcaacaccagctgcctccctaatattttggaagcaattaggtagaggtctcttggaatttggtcaccaaaatgactacatttctgccttgtaggaagatgatctacataaccatgactgaaacaaaagttttatctcctcatcatttatgtattctttccttagttaaatgttgattagatcacagtgagtctggtgtaacatatgaatatggtacagtcaattaacatgagggaaaatagacattttataacctctttccagaactgaggtagttatataaattttttaactgggcaacaaataaagtggctggcctatcagatgtttttactcctagaccttaaatttttttttatactcattatgattataaatttgtataaacccctaagttacaacacatgggaaaaatatctttgtatttatcatgtgatagtagctatacacaatcatctgcattaatggtgtgtgaagtcataaccaatttatgaatgtaataatacagtaagctttaaaacatagagtcttcaaactttagcatggtgtgtgtatgtgtatgtgcgtgtgcacgtgtatcagctttactgagataatactgatatataaaacactgcacgtttaatgaacacattacccttgaagagtttggacatatgaatacccccatgataccataacccaatcaaggaaataaacatatttatcaccccccaaaatttccttgtgtccctttgtgttttattttttgcagctttttgtgtgcaggtgtgtgtgtgtgtgcgcgctaagaatattttacatgagatctacccacttaataaattttaagtgcacattaccatactgttaattataggcgatatattgtacagcagctcttaagaacttactcattatgcaaaactgaaactttaaacccattgaagaacaactccccaatttcttcttaccatagaccttggcaaccgccattcattctattctctgcttctatgagtttgactatttcaggatacctcctataagtggaatgatgcaatcagtatttgtccttctatgcctggcttatttcacttagcataatgtcttcaaggtttatgacaaggtttatttttatgacaggatttcctactttctaatgctgaataatattccattgactgtatatactacatctctttatctatccatcagtccatggacatttgggttgttatcttggctaatgtgactactgctataatacacatgagaatgcagatacctctttgcaatcttgttttatcaattcttttggacatgtacctggaattggtgttgctgaattatatgttagttccatttaaatattttgaggaacctccttactgcttttcatagtagctgtaatattttacattcccaccaacagagtgcaggggttccagtttctccacatcctacccaacacttattatctttgttttttttttttaaataatgatcatcctagcaggtgtgaggtgataatttactgtgctttcattaaatttccctgatgactagtgatgttgagcattattttatttacctgtttaccatttatatgtcttctttggagaaatgtccattaatgtcctttgcccatttttaaataaggttatttgtctttttgctattgagatgtggttgttccttatatacattggatattatctatctatctatcttactatctatatcatataaaaggtttgcaactgttttctcccattatgtaggttgtctcttcactctgctcactgttttctttgctgcacaggaacttttagtttgatgtagttccactccatttttgctcttgtttcatgtgctttgggtttgatatccaaaaaattattgctaatgccaatgtcaagaagcttttcctgtgtgttttctcctagttgttttagagtttcaggtcttatgtttaagtgtttaatcaattttgggtgggattttatatatggtataagatacagtcccaatttcattctttttaatgtgaatgtccagttttcccaacaccacttgaagagactatcttttctccactgtgtatttttggtacctttttttgaagataagttaatcatatacatgtggttttatttctggaatctctattctgttccattgatctatatgtctgtctttatgccagtgtcatactgtttgaattactgtagctttctaatacattttgaagttaggaagtgtgatgcctccagctttgttctttttcctcaagatcactctggtgcttctgttttttttttttttttttgtggctttatatgaattttaggatttttattccatttatgacattgggattttaacggggataacgctgaatctgttgatcagtttgggtactatggacattagaacagtaacagtattaagtttgctaatcaatgaacacgggatatttttccatttatttgggtctttaatttctttcatcaacattttgcagttctcagtgtacaaggttttcacctctttggttgatttattcctgagtattttatttttttgatgctattgttaatgggattacttcttaatgtttcttcagatagctcattgttaatgtatagaaacatgaccgattttttaatgttgattttgtattctgcaactttactgaatttgtttatctcaacagttttttagtggagactttagagttttctagatataaaatcatgtcatttgcatatagagacaatttaagtttttcctttccaattggaagccttttatttttttttcttgtttaattgcactggctaagatttctagtactgcgtttaagataagtgataagagcattcctgccttgttcctgatctcagaggaaaagctttcagcttctcatctttcagtatgatgttagctataggcttgttatatatggcctttattatgttgaagtacatttcttctatacccagtttattgagcatttttcattataaaagggcattaaattttgtcaaatgccttttctgcatttatggagatgataatatgctttctatccttcattcccttaatgtagtatttcatatttattgttttgtgtatattggaccatccttgcatcccagggataaatcccacttgatcatgctacatgatctttttaatgtgctattgaatttggttaggtagtatttcactgaggatttttatcatctatgtttattagggacccaaaagacatatatagaacattctacccaacagtggcagaatacacattctttctaagtgcatgcggaacattcttcaagatggatcacatgttaggctacaaagcaagtcttaacaaatttgagaagattgaaatcatgtcaagtatcttttctgaacacaatggtataaaagtagaaatcagtgacaggaggcagattggaaaattcacaaatatgtggaaatttaataatatatttttgagcgaccaatgggaccaagaagaaatcaaaaggcaaatccaaaaatatcttgaaactgtgaaaataatagtacaacagagcaaaacatatgggatgcaacaaaattagtactgaaagagaagtttatagcaataaacacatacattaaaaaggagaatgatctcaaaaaacctaattttctacctcaagaacctagaaaaagaacaaactaagcccaaagttagcagaaggaaggacacaataaagattagcgtagaaataaacaaaatagaggttggaagaataatctaacaacaaaactaagagttggttttttgcaaagataaaattgacaaactaagaaaaggcagactaagataaaaagagagaagcagcaaataaaattaaaaatgaaagaagagacattaaaaattgatgctgcagacatactaaggatcattgcactactgtgaacaattacacaccaacaaatgggatgtcctagaaagaaaatgaataaatttctggatacatacaacctaccgacactgaaacatgaactaaaagaaactctaaacagaacaccaacaagtaacaagactgacacagtaataaaaaacctctcaacaaagagaagttcatgaccagatggcctcattggtgaattctactaaacatttaaggaagaattaatgccagtccttctcaaacccttttaaaaaattggaagagaaaggaatctttctaaactcattttatgagcccagcattaccctgataccaaagccaaacaaaaacactacaagaaaaaaaaattttaggtaagtatatttttataccttacccatatccatggattctgttatctgcaaattcaaccaactggggattgaaaatacttttaaaaaataagaaatgacaagaaaaataatacaaataaaaaacagtacagtataacatctatttatgtaacatttacattgtaatgtagagatgatttaaagtatggggaggacaggcatagattgcatgcaaatatatatgaaggatttgagaaatggcggatttttatatttcacggatcctggaaccagtcccccaaggataccgaggaaggactgtacctataaaattttcccagaacattttgctataaggctacattagatagaactgccaattaaattctgcgatcctttccatttcagaagtaaacacagtgatatttcagagatttttaataagatagtttgaagtgtgagataaatataaagacagggccatgctgttatttagcagtactaatagatccatattgaaggtgtttttcatatccatcaatgtttgtagagtcattggggtctctgcagatgatgtatttgagttcgttgaggacagttatttcacccatggtgagcttaatgcaaaaatgtttctgcgaggttgctttacactttaatatttctaactaataggacatttcaagtgtatgtcccatggttgtacatatgtgtgaacctatattcctcctgacagcctacatttcaaaaattgtgaataacacaggcactacttcctcagagttccataaccattgtaaaatctgtctccatcattgctcctcacattgctgtgcaattatttctttgtgtctgtttcctacatcagacttttaagctacctggatgacagtgtctagtagtatttatctttacttccccagcttgtatcacattgcctgacacataagagtgctgcaacaaatatttgctaattaaataaattacatggttgacacatttggtatccagactgttgagagagcacaatgtcctgatggtttttgttattttaatgagtcataagaaatgccataaatgataccatgtgttctacactttccctctttctgggacaacataatgcaattatttacaagaatcccaaagagatttcatttctcatagaaaagaaaaccagagaccagtcatttgagattcatcatcccaggattcaattttagaagagcccaattccccaacccccatgtgaaactttttaagaaaagacagactgccttagtgtctggaaatttaaggtttgtgaatctcagctcctagactgactaaaacatttatttcttttgtgacttcaccttgtcagtgaaatttaaaagctgagaatttgaagaaaaagctgataagtaattttaattatatttgggtaaaaattgcattattagaatacataacacagagagatctactccaagctattaatctggaaaaatcatttaaagacattaggattattattcattaccttagataaacaaaataaataaataccagtggcaataggaagaatgataatcaggttaatattttttttcattctaagggtatgtttaactacttgggcaactataaaaaatgtcatagactgggtagcttaaacaacagacatttatttctcacagttctggaggctggcaaattcaagattaaggtgccagctgacttaattcctggtgagggctcttcctgacttgcaaatggccaccctgctgtgtcctcacatgaggaagagagagcaacttctctctctgttcttacaaagccactaatcccaccatgatggcctccttatgacctcttctaaccttaatttctttcccaaaacttgatctccaaccacaatcatattggtgggtcgagcttcaagatatgaattttggaaggatacaaatcagttcataccaaaggggaagtatttcaccattttagttttgtttagctcatcaatgccaaagatgttcttttagagtcttctgatgaacctcattgatagcagctagcaatgtaacagaatgtttaggacagtaacaagttctaagggaagaaaagaccatgggtgtctgtggtagctgctggggaaaagtgttaacctggaagattctgggcacagtccctcaagcaataggcttatcaccaggtattgctactaatgctggctagctctaaaagactcattaagaaattaaagaaatacctccaacttcataatatttgtatcagccaaccattcaattcatttctaaaactgttgtattgtgtttatcaaaccatgtttccagcagtattactaccaccatttaattgtcaatgatcctaaactatttttttaccaattctctggaactcaaagacatattatctcttcagttactctcccactggtttgtcatgaacactgaaattcccatatttaatgtctctctttaccacaaaggagtataacaacaatggctttgttaacttgttaagagaatgtattgaacgactactatccataaaatattactactcagaattacaagaaatggacacaggagagagaagtttaaatgggaaaaggagctgaaggagagttcagatttaagtggcacctcattgcaagcaggagttctacaaaagcactccatatgtaggcaaagttgacattggaaaggaagaagctggaagtcctggaaaacaatgtggctagaaggaattactcaggttgcaaagcccaattatatatatttaactatcttgctaagtccaggcactgtacagtaaatggctcccaattataccgcacagatcctgtctaccttttgaatctccttcccaactactccatgtctatgccttctactactttccttttttttttttttgagacacagtccccctctgtcacccaggctggagtgcagtggcatgatctcggctcactacaacctccacctcccggattcaagcaatttttctgtctcagcctcccaagtagctgggactacaggcatccaccaccacgcctagctaatttttgtatttttagtagagacggggtttcaccatattggtcaggctgttcttgaactcctgacctcagatgatccacctgcctcggcctcccaaagtgctgggactataggcatgagccactgcgcccggtctactttccctttttaaaattctcttacaaaaaaagatgagactaatgagacttgcatatccttactctcctacaaccaacatgtcttcatgtcctcaaattcacactttactctccaagccctctgtgtctactcaaaaccacaattaagacttcctacctgggttccttccaccacctcttcatagtttccctatttcaggccccagacacacttccctgaaaatactgtgcgctcatgttttcaatccaaacttatttctttccactctcccaaacattaacattacaaggtggccagtttcctcgctatcccttgtgagtcccctttagaaaggagaaggtcttccccttttcctctctagagatcttatcctctctaaacttaaccaacgcttcagatagtgacatctcaagtgttgttagagaattcaaagacataacttcaccacccaccttccgcagggcccagcattccagtggccctcagtcagctctcccctcttctgccctactacatgccttttctcacattttacactcactgactgtgttgcttgtgaattatttcctagcatcttccattttcctagtttatttgatatttagaagtagaggatgtatcctccgtgaaacttcccccagatcctcagcaaatcctgcaacgtttcatctgtagacccatcctgtaaacagtcacggacatgcagtttatcatcaattcgtctctagtaattctatgaattctgggccagtctgtccacccagaatgtagtattctaaatgctggatcctgtatttcttctagaacttagcacagagtagaatgcttagtattggccatggcatatctgttcacgaattgactcatgatctgtcagagattttcacctaggtccctgctggaatgtcccctgctcagaggtacttctctgacctatcactctgcacctttatcctgctcaaggtttttttgttttcttttgttttgttttttgagacggagtctcgctgtgttgcccaggctggagtgcagtggtgcaatctcgggtcactgcaagctctgcctccctggtacttgccattctcctgcctcaccctcctgagtagctgggactacaggcgcccgccaccacacccgtctaattttttgtattttaaatagagatggggtttcaccgtgttagccaggatggtctcgatctcctgaccttgtgatgcgcccaccttggcctcccaaagtgctgggattacaggcatgagccactgcacccggccaggtttttcttttttaatagcacttatctctactttgctatatgttaatttgtttattttttattctctgtcccattcccataaaaatgcaagtttcataaggtcaggcactttgtctttatcactgctatagccctggagaccagaggagtgcctagcacttgatagacattgagcaggtgttgaaagaatgagtgaatctattcaagatccagttttctgatagacaataaacaattgtgattttgactcaagtcctagttcaagcacataagtgtagatgttatatatcattaagattaataaaggactagtattaataaacacttatgtgacagctttaataggaagacaggatatccctgcattacaagggaagttttaatgagtaactgagtcctgtcctcttacttttctgataaaacacaggacccagatatgaatgtctttctaccaatctttgtctactgacatgagaataaacagagcacagggctatataatgcttgtcagttacctaaaacaagaatgtaacgagagaaagtggaataaggaataacttaaaccattttatccaaacgaaaatggctttcccattcattaccaatgacttgaacctcatattactatgtactggctatagtccttccatctcctgggaagctaagatttataaagtgtgcttcttaacaaaattatttcatgccagtatttagttatcattgttaatgaaaatatgtgtagcacttttcgaaatgttctgtggacatttttatttactgcacataaatccagagaaacaatgatctgttattgccacttcttcctttagagagttgcatccaaggccaaaaactgaatcattattagaaaacctgctgaacccaaattctttctctatgtgcttctcccttctacacagtgtttcagttccttgcctagtaatgcaacttcattatatatattctatttgagaaaggaggaaatggataggaaaacttttacttagccatgattcatgatagaaatcaattgaaattcatatgaaccattatcacaagaatatgaatttatatccccaggtggacagttatgaaagtgggatttatatgcaaatgaattcaaatgtcagttaaatgctccatattagggtaagcactatttgtgataaaaaaaaaacttaatacacaatacatggaggcaatttgtttgttttgcgtgtcctgagttgaaaggggaattctcttttccagatcttgggaatctattttcccttcttaagttgataaagtttaagtctagagagtttagttaacttgctcaagatcacaaagcttatttggtagcagaagaaaagctggaaatcaaatattacactttttgtgcagtgctgagtcacttgaagatgctatgttgaaaatcaatcttgaaggataggtaacaccacaaagaggcagaggagttggaaatctcatggcaggattataggcagtgaggagaatggtttggcccaggtgaagtgagagtttatgtcaaaagtaaaattggaaagagataactatatcatggatcttatactttatctagtgagcaatggtataattcatgtataaaaagagtttgtggctgggcacggtggctcacacctgtaatcccagcactttgggaggccgaggcaggcagatcacaaggtcaggagttcgagaccagcctggccaacgtggtgaaaccctgtctctactaaaaatacaaaaattagccaagcgtggtggtgtgtgcctgtaatcccagctactcaggaggctgaggcaggagagttccttgaacccaggaggcggaggttgcagtgagccgagatcacgccactgcactccagcctgggtgacagagcgagattctgtctcaaaaaaaaaaaaaaaaaaaaaaagggaagaaaaagaaaaaagaaaagaaaaataatttgtttgtcttggccttgtttttgcttttgagcaggaaacatcatgagcaaagcagtgttttggatgacccaacttgcattgccagtttttgctgagtaagacaaggtataacaaggaaggcgagagatgggttaggagactacctgcagcagcctctttcgggatataataagagtctatgtacacataatagtatcttgcatttttatgaccttatttttttcaaacaacttaacttcttacaaatacgattatatttaatcctcacaagcctgtgaaaaaggcaggagtaatcacagccactgtatgagacacagaaagcagcagcctcaagaaaataggtaacttgttcccactgctaatctggagtagttgaactgagagttacatctttaacgtatgtctgaaaatccagtgcccttcttactatatatgttgctctacattctcttaaataattatataatggaaatatttatgtaaaaaatatacactgagttttcattagttacccatctgtttgacttcaatttatataatatatagtcaacttactccttaactctcaaagagtaacttctcctaatgggttattgaagaagagaatatcccttctgttctgtaaagacactgaatattcatgttcttttctctttttttctttttttcttcccttttgattttattctttttttgtttctaggttagagattcaaatagaactttctctgcttccgtgaatttttaaaattggtttatacatttgacaaagctacttacatgcatattttattggaaaaaaaggtttagaaaagaggattacataaagattctcacactgcatgcagccaacagcatttgtgaagcactttttttcagagctctgtcttgagtgctagagtaggtgacaaaatggctcaagtaagagtgaaatgggttcaccttccccggaaacaggctgagagagcctgtggctaaaatgagatcggatgagtggaatgaaatactatctggaccttccaggattgcacaccccagccatagcaccccaaggactggggagaggcagatcacattcaaattaattttgtacatgactaaaaaaaaaaaaatctgtagaaatgtgcatggtttcctaagtaaatatgggtcttagaaattataagtggaagcacatgacttagtgaatagagttctagaaaccaagaacagaagtcttgttcttagttctttcaccacttcccaacacagcattaatgatgtggctctgtttcctcaagttgaatatggcagatcctcaggctatcttaagagacatgattgattgtaaatcagataactgtattttaacactgattgtataaaatgtaaaaacaccactagaaaaccaaaaatctcgattttttaataatctttttaaaaagctttttcaggataaaagaaggaaaaggaactatttttaataaaacacagtttttctcgtgaacaattctaaataaaacgacatgtgtctttatttggcagactatcttattagtggttcagaagtaaaactggtagttgccttgccttaaaaactggccactttagttttttcaggaagcttaacgttatgtgaggcgctgtggaaaattagagaaactatgacttttaattattaactagacaaagaggtaagatttggttaaggaaaagttctctcagtggtgctttatgaaatattgtgaagaaagctccaatcccacattatttcatagatttaaatgggatatttgatggtgttcatacatgctccctgttggggaaagccgatgaatgagcagatctaagaaattctgcctttcatatttggagatatgccaagaatcagagggcggagacctgcaagccattataagcatcaaagcttatgtgagctgggaaacagaccagaatcaggacatgtaaaacaaggccagggtgattaagtcacctctaaggtgtaaaatgaaagctacgccttaaaacaggagcaaatcagaaccaagaatctagttcttagccaatgcaaagtagagaacagaagcactaccacaccaattcaagtatcattgtttgatcagctacttgaaacaaaggaatacaaactgatgtttattaagatcccaatatgtttcaggcactgttacctcatccacagaatctcatcaagtgtggacggcaatcctaacaggctattgataaagataatgactgctcaagagagatttagtaacctgccaaaagtcatttagttaacaaaccataaaatcagatcctgtatgacttcagagctagtggttcttcattacctactgcccttcaatggggaaaagtgaatgaatgagacatgttccacagttctagatttaattatgtaacgacatcatagtcatctttgagcttagcttgctttggagtccagcactactttgagtcatggatcctgtgaacctgagagcctgataagatcttttgtatcctttggagaagcactgagcagcaatcatttctttgtggacatgggtaccagcctacagaattccactgtgtagagtatattggtctccattcttctctggcttttgaaccttttaaaactactgctatgagcattttcctaatgctggcagacctcttgctgaggcacagatgtttataagttcctctgtgagttcttttgctgtactaggacaggatcaatttcataaccgttcagaaatccaaataccagaggctagcaggaacctaagtctgtatttcccctaggagctctagttcaatattcactaattcaatgttgattgtgactttacacaacacaacaatgacaatgaaagataattgacttacataattcagagcctgatacatggtaaatgctaggaaaagggaaactataatgcttataaggaattataataatttaattattcttgcatagtctttgcatggacatattaagttttaaggatgttcatagaaacatccttaaggagaaaaagtggagccaggcatggtggctcacacccgtaatatcctagcattttgggaggccaaggcaggaggatcacttgaggccaagagtttgagaacagcctggacaacttagcaagaccctgtctctatattaaaaagaaaaagagagggaagggaagggaagggcaggggaggggaagggaggggaggggaggggagaggagaggaggggagggaagggaatttaacgttattagctactatagcctcttctctccattagcagcagccaaacaaaaaccaggcctgattgaatcaggatttcatgttgaatatcactatcagtgctgtcttcttgtaatttcaatatggttttagactccaacagagtatagcaggatgttggaaaataaaatctggggacaaaaatccagaaagctctactcattgactttacacaattatgtgatggtctcagtgatcttgggacttgattaggtattaagcatttttaactgcctgggggtcactgatataaaatctctatctgacatataattgattttgtcgtaattgatgagattatcgggcatattcgttcttgccagtgaagtcaagaactggaagcacactaggttcaggcttaatcggttttatgcagctgtgcttgagtacttaataaaggacatgaaagttggcaccaagaagattctctgagaaattcctccaattcaattgatttagagcatgattaaaagccctttgtacagtaatccaggagctgctgtatgctaatgactgtgctcttaaagcccgtgagtaagaagatgtgaaaatgatcaccaaacctcttgcagactctgcactgtgattgggctgataagcctgagagagagatggattaggtcagagcccctaccaaggaaaccttcaatctagccaaagactttcaatgacatcgcagaagagagagagatgtctgtgattttgatcatgcaaggctgctcataaccttttggctgtgcaattttcagcctgggaaatcagatagaaaggattcttacatcctttaggaggctggcagccttggtatcaacactgtggcttctggcttgaaagcaggggctcttctgagatacctggacaaagcctatgtaatgcacatattttcttcctaaagcacatcacagctttcttgagcttaggaacactacatagcactttaccctgtatttgggtgaaattgccaaaaaaaaatgcacacaaatgtgagaaacatggcactaactgtgaaaaggacacttgttaacattatgagagctgaaacaagaaggtagaacttcactttgttcaacttaagctaggaatgtgtccattgggtgactcagatttttttctccaatctacgccggtgcatgtccctgaataactgcaagtattgagttggggattacaaataaattttagcaagcaggcaaatttgcaaacacagaacctttaaatgagattgactgtgttgaaaaaaatagagaccacacgttaggtatacctcaagaccagcacccataaccatatagccaaaactaagtcatcctgattttcctgaaatgctaactttattcataaatgaaacaaaatgtaagctatatgtgttagtccattttcatactgctatgaaaaaatacccaagactgggtaatttataaagaaaaaggtttaatggactcacagttccacatggctgggaaggcttcataatcatggcagaaggcaaaggaggagcaaaggcatgtcttacatagtggcaggcaagagaatgtgtgcaggggaactgccctttataaaaccatcagatctcgtgagacttactgtcatgagaacagcatgggaaaaccggcccctgtgatttaattacctcccaccggatccctcccatgacatgtggggattatgggagctacatttcaagatgagatttgggtggagagacagccaaaccatatcattatcatttctattagcatgagacagtgaaatgaaatcaatcagctatagacaagtcatcttaaacagctctccttgccttcaaaagaatgttaatatataatagctcatcatgaaaaaggtcaaaatactctctccttcatgctttataaactgggctgtcactgctgtgagtggggcttcttaccacctatagtttcaggtctcctgatttgcaaactgttcttttgtataaacttgtacagttttaaaatttgatctaattttattttataataactgtttttaacaaacattacttaatacttacatcaacttcacaaaatggatattattatgatgatctccattttatggataagtctgggtgggtgaggaaattgatcaagcccacataacaagtggaagaaccaagattaagaccccagctgtctgtctctatttagcacacaattactctatcactgtcacccctcacctgccaatatattgtaatgtttgaaatgattagatcatgtggcattagatgtggaaaattagaactgttcatggctattaataggacctcaaaattgaaagtgaaagccaattcatgttgcttgggagattctccgcattttagaggcttcatagtcacaaaatgtcagtcaatgggtgctaatgtgtttctatcatttcatcaagattcatctattcactgcaatgtagctagaacccattttttgcaatgctatgaaatactgaacaagaataaatatagaaatgttttatcaaagataatatttttggtttcaagttgactgagaaagtaataatatcatctacttaccagtttacgaaaatggtaaaaatgtaaacagagaaattcaaactagaaaagccactccaggggcccttggattcttgccatttctgtaccgggatataaacttgcaacttggaacttcagttttatttaactgaaacaaacaaagaaaactgagaggattctgatcttgttatttctcttcttaaatgactttagctaacttgtgggaatgggctatgctttccactaatctgattctacttttgcaaagaaatcaataaagtatttcaaaattataacaaagataatatgttgattcacttttgggtaacaaagcaggcagatatctgtggagttctgcaagaaaccacacaacaaactttgtattagaaatataatcagatgtagccagcccaagtcgacaagcaattaattttgctacttagacctctggagtcagtgatccatgaattggtattcactaggtggttatttaaatctaatctttaaaacttggtgcagtccctacccattaaaatatgaaagatgatgatgaccagaagatatgggtgtctgggatcatcagttttaactggaattatagagtcactaaaatgaaaagaacataagagtcataaccccttttaattcctttcctcactatggtaactggtgaagaaaaactcacagaactcgagatcaaattctgtgtgtgtgtgtttgtgtgtgtgtgtgtgtgtgtgtgtattttaaaggcagcccaagcttattttatttattttccagctttattgagatataattgaaaaaaattatatatatttgcggtgtaaaatgtgatattttgagatgcatatacaatgtgaaatgattttcatgattaaggcaattcacacatccatcacctcacatagttacctgtgtgtgtgtttgcggggtggggcggggggcgggattggtgagaacatttaagatatactgtcttagcagatttcaagtatacgatagattattaactataatcactgtgctctatattgtagctccagaaattattcatctagcataactgaaactttgtaccatttgactaacatctccccattttccccacccacttgcccctgccaaccaccattccattctctgcttctatgagtttgactttttaagattcccatataagtgagatcatgcagtatttgtctctctgtgcttggcttacttcacttaatgtactctaaattcatttatattgttgcaaataacagaatttcattctcttttaatgctacatagtattccattgtgtatatataccacattttctttatccgttcatctgttgatggatacttagattgattccgtctcttgggtattgtgaatggtgctttaatgaacatggggagtacagatattttttggagatactgatatttcctttagatatagacctagaaccgggattgctaaaccatatggtagttctatttttaagttttggggaacctccacactgttttctacagtggctatactattttgcatttctaccaacactgtagaagagtttccttttctccacatcctcaccaacctcatcttttgtctttctgataatagccattctggcaggtatgaggtgatatctcatgcctattttgatttgtatttccctgatgattagtgatgttgaacatgttttatataccttttgaccatttgtatgtcttcttttgagaaatgtccattttttgcccatttttaattggattatttgttttctggctgagttgtttaagttccttatatatttgggataggaatcccttattagataaatggtttacaaatattttatccatttcttatattgccttttcactcaattgattattatcttaactgcagaaagtctttagtgtgatgtactcccatttgtctatttttgcttttgtttcctcatcttttggtgtcatattcaagaaatcattgccaatatcaatgtcaaaaaatttttttcctctttttccttttaatagttttatagtttcaggtcttacatttaagtatttaattcatttttgaattaattttttatattgtgtgagataatggtccaaactgcatatggatatctagtttttctagcagcatttattgaagatactttccttttcgcattgtgtattcttggcatggtttttgaaggttaattgaccttaaaagtgtggatttgcttctggctcttattctgttctgttggtttacgtatctatttttgtggtagtgccatgctgttttgattaccgtaactcagtagtatattttgaaatccggtagtgtaatgcctccagctttgttcttgctcaagattgctttagctatagtgagtcttttgtgttttcatataaattttaggattgtcttttctatttctgtataaaaatgtcattggagttttgatagggattgcattgaatctgtagatcactttgggtagtagggacattgtaacatatatttttaattataagtgattctaaagaatgaacacttgctttcaggatgcagaagttatgtgaatttattgtttgatgacctgatggcagaagttgtaaagtgaaaccatctggatctgatcagcacatctaatcctagggagagctcactgagtattcagtgtacatgcagagttcctacgaagtttaagatgatgctagcacaggaaaaaaacacaagaaaattggccctgcaatctaaatgtattcatttgaaaatgcaatatttcaattagatttgaaagagagtcctattactgctgaaaaatacttaaggaaaataaattcagcaacaggactctgcctttttcgaaatgaattgtttagcttagtgctaagtttatatgagggtatgagtcaaatttacagggacactggatttagtcacagagattgagggtgttactttattatgtctaaaaaaaaatgaaacagctgaagtctttcttcctacttagaatcttcatagagtaattgtacagctttaacaggctgtacaggagagcaatagtgctagataaacaaatgataggtctctaatagtttgaaagcttaatcaggtagctttaaacaaaagtgtattcatatctgggtatcagtgaaggaaggtctgtaatggaaattactggcacctcttgcttctcctattagcccagcagttccacaaatccttataaatataaaggtataatattacatataaaacctacacatggtttgcttcaaactggtaagtcacgaaagaaagatgcagacatgtcttcccattggtgatgccatttcccactgcctgttatcaggaatgttttccatccatttttttccaagtttgcctcaatatatgaacactgctttataaaaggaaaattacagtaagatgtacttgtatttcttattagctcagctttatgattgtattgtaattattggtttagtttttaagaaattgtgaaccaggaagttcataagataatcagagctctgtgtcactcatacagattactttttccttcatttaattttcacttaaatattttatatgtatgctttctagtgtaatcatttaataaagactcatagaatgcttactatgtaaatttgctaaatttagcaaataaaatacaggacacacagtcaaatttaaatttcagttaaacaataaatatgtttttagtatgtcgtaaatattgcaatattaaataattcttcattggctatatgaaatataaatttaacttggcatcctcctttctgtctggcaatcatattatctacaggaaaaggatcatcctaggagctcagaaggatacaaataaaaatttcgtttctgtactaccttgaaagaaatatgtctatagattaagataggaagtaataataattccccaaggtatatataggtaaaatcgaaggacccaaagagaaataagtatttggaaaggaatgtatttaaatccgtgagtttttaaaattttgctaacatatgctatataaaaaagagtagtaggaagtaaaggtgaggttgggaattataccaggcccagagatttaaaactgatgctctggataagtgtcttttgatagaaaaataatgggaagcagtaatgcaaatcacagatgtaatttataattctctagtagccacattaagaaatgtaaaagaagtaagttaaattaattgtaataatatgttttattcaactcaacgtatccaaaatattatcatttccacatgtaatcaatataaaaattgttgatgcagtaattctttttaaaataactattcaaaatctgctgtgcattttacactttcagggtatttgaatttggaccagccacatttcaagtgatcagtagtcacgtgtggctactgactgacttgttgaatggcacagctcttgagagtaaggatctgctcatagtttgttaacgaaagagtcatgggatcagagtggagcttcagatttgcgatagtattacatgagatagatggagggggagaaattgggcagggagagaacatttaataggctattccagtaatgcattaaattgaaagaaaagtcgacctattatggtaaatagaaaaggggatcagggaacgtacagatggggatgatgtttactaatgcttattatatacactattttactctcaggcctgtgtggacagaagtagaaaacagaggaggcattgcttctgatcactaagaatgccacccaaatggagaaagccacacagcagtcaaaagatattcaaaatgcatatattaatatgtaggggaaataagcaaaagttttgctggaaaggattcttcctaaaatttttcactttttcccagtttctggagctaaacacagaaagattagttttaatagaacagaaatgtcttaaacttggtttggtactgacaacctaaaacacagaattctactttaaaatacagaattctattttatgggaatttgtaaactgagaaaaacaatttttagtattacaggagcagagaagggactacattactgaacctgccgtggaatcagaaatttaaatatgtttcaggacgctttttttttttttgctggaaaaatatttccatgcgagttgttgggaaaataagattctagctacaatgcttcatacacataccttttaatgaatgaatcctgcccttagccgggctcctgtgtataaaccaatatatttgagaggctctttattgtttcagagtctttctcatccattatcacatatgatttttttcccaataactcctgagacacagcattgttgcctacattttttagatgagaaatgagactgagaggaggagtaacttgtcttaaatcacagagctcacggtccaggtgagaaataaaaatcccagacatttgtatccaagtcttaatctttggtagtacaccataatagatgggaagactaataaattgggaattagccatgtctctagttataggcaaacagaatattcacctatatatagccatgtctctagttacaagcaaacagaaatctaggtgaatattctgaggtaaatggtctcaccagttcacttccttctggttttttctcctacacactcacacttgttcatcttcatgtctaacatttaagaattcatctgctcttggctgcttaaatctatgaatggaacatgtggacatgtaaagccatcaactcagaaaaatgtagttctcacagtgattcatttgataaatatgttaatacctattatgataaataggttaacacctattatgataaataggttaatacctattatgcacttagcacagtgcccaacacacagtaagtgctcaagtttatctagtatcattaacatttgaggtaaaggaaatgccaaattatgtaattaatgtgtgtgaaagtagtttaaaaacaataaaacaatgtacaaataaagatattattataatgaggcaattgggcagggcgcggtggctcaggcctgtaatcccagcactttgggaggccgaggcgggtggatcacgaggtcaggagatcgagaccatcctggctaacacggtgaaaccccgtctctactaaaaacaaaaacaaaaaaattagctgggcgtggtggcgggcgcctgtaatcccagctaccgaggaggctgaggcaggagaatggcgtgaacccgggaggcggagcttgcagtgagcggagatcgcgccactgcgctccagcctgggccacagagcaagactctgtctcaaaaaaaaaaaaaaaaaaaaaagaggcaagtgattatttaatagacatagagtttcaaatttgcagtatgaaaagttctggagatctgtctcacaacaatgtgaatatacttaacactactgaactgttcactttaaaatagttaagatggtaaattttatcttacgtgtttttgtatcacattaaagagaaatgcaacacagttggggaataaattattagggatttggttataaatcatgttattgattaacatattatcagttatcctttcccccagtagccatcaaatttgcactaaattctcttgctctgttcttccacagtcattttaatttgggataatcaagtgtcacagacctattgactactacaaccattctatttgtagtcattaaaaatattgaaaagaaaatagaatcatcgctctgtaaatagaaaaccacaccaggaaattgctctcattcaaaaaacactgctaatatgagaaacaactaaaagcactgacacaagttctcaggctctgagaaaaaatgtaagtagatgagagctcatggtccaagtcagaaataaaaaccccaggcatttgtatgaactcatgaaaatcagacatgctgcttattaagaaatgtaatatggaaactcttcattgctatttaattctatttttaatgcatttcataggattcttgtttcatagctttggccgtatgaggccatgtagtttaatatagactggaaaagagtcagatgctttacctataggatgacaagtagttagacatttcagatacaaatcattaattaatggatatttgacccatgtagaccaatactgttactttccttagcctatctagacaattgtaaaacaatgtatgcagagaaagaagcaatgtaaattgctaggtacatagtttctttaatattaataaattttaagaatatttgtcaaaatcaatatcatccttttcttttgctatctaccagagctcttgtaagatgaaatgcagacaagagcatgccagggacccagcttgttgggaagcttctgattctccattaaataggtccatttaatgtggaccataggacttcacattggtctcctttaatatgttggattgtttctttagtgtatgcccctgagcctgaggagtttataaatgatcttctgaataggaaaaaatgggagattcaactttcgtatgctgtagtctgatttcctaagaggcaggtatttaattttgctgaagtgtcctgatccacattatttgactaaatgagaaagcaaaatatttgacgggacaataagagtattatatatatattatttcttgacattttgcactgatttgggattacatctgcaattttttgctcaatatagtcagtatgtatattgtgtggggctacacccatagaaataaatttatatacccatgatcctaagagaagtctgaagccgttagcagtctacatgaatgcatgatgactgcagtaacatatatttatcccacaagtgaggagagaattgattactctagagaactaaagccataactaattcacagagactctttcttatgatgaggataaatattctgtgtcattctgacccataaaatatactgtttttatagcagactcattgtaataattcatcttaaatgtcttatggacatattttcctatgatttccaaataggaatcattggacgttcttgttttcaaaataagtttagggattaaaaataataagtagctttaagtaacattgttatacttgcttcagaaataaagagatataatgttgtgtacattatatgttcccttcttgatatttatcaaaaataacttattggtgcacattcacgggtattttgcatattcacagttattcatgggtattttttgcatattatggcttgcttcagaaactgaaggtgtatataggagactctatttgcaaatgaacaaataggcaataagctaatcccccagtgtgacattttacttcaggtaaaaattacttcctatttcttctcatctactgctgcgccaatttgaaactagttttttattaaaaggtaaaggtatttgcttacttttataaatgcattgacacttttttgagtctattataaaagtttgctattttatctttttttattggaaggctgatggaagataggagtacactgaggatcttgggaccgggctcttatgaaagggttagaacaaaccattttgcttttggttgatgtaaattatcaggtggcttagaacatatttgtgtcttgtatattatgtttaatgttggcaagaaggaaagattaaagtatgattttaaatggcatgagttagaaatgttggtgttgatattttcttagacttgtggacttcacttaattcttagccagcattagaattaatagaaactgcagatacttgagggtagagggtgggaggagggagaggagcaggaaagatagctattggctactgtgcttaatacctaggtgatgaaatagtctgtacatgagtacatgggtttacctatgtaataaaccttcacatgtacccctgaacctaaaataattgttaataagaaactgcagatattcgttgatataatgttccatatttacagatgaagacaatcagactcaaataggttaagctgcccaaagtcacagagataattcaacataaatgaagaagaaagctaagcaaatagagtttttattctttttgtttatttgagggaaatggggtagcaaaggaaaaaatcaaagtagctgtatgaaatttttgaatacgtagaatttcttcacatttcagtgtttaatacattactctaaaggggcaaacatactattttcctttatctaaatgaagccaagattgttataatgtccagaaatataaagaaaaggactggaaagatagatattaggttctgcatggctagatttggggtcacttcaacaaagactggctttttaatagtatcagcccacatctcccagtcctagaaccttgcagagcttcctgtggtttcgcctttggagttcagtgtttggatggtcaccttcaggctagtactttctagggatctgaacttattgagctgagtcacttggtttggtccaaatggtcacttgcaaggccggttaaaatctatgtttccatctatctctgaattagtgggtgatagaaagtagcctgggtgaattctttaattcttttacttattgactgttgactcttattggcctttttctgtatatagcaataatgctaatgataataatttctttggaaatacgtgaaccattcttagtcctcagagtatttctacaagaccatttatgttgattctcaccataacagtttgagagtgtaaacgaagatatactgggggatattacagtcaataggttgaaagaattacaagaggtcattcatttattaagcagctgctaagcactggtcattgcgtcaggcaaactggttaatgttgaagccaggacagaacctacagtctgtgatctgggtctcacttctctcagcccttctctcccttttctcttgcttctctttctttctgcccatgcagtgcagcagctttccctagggcctatttaccaggcttctgttttaaactatacattatttgttctcagttcaaggttagcagatcttgtccacatccctgtgggagaacctaataagctcaggtgaagcgcagctcaacattgggaacaacagtaaatgtttgcaccattaaaggtactgaattgttccatgttatcaacagcagcctttcagtcatactcatctgaaaaatgaagcctctctgaaaatcaccacttgaacttatgtccatggactgtgatcacctgtagccctatctgtaagccatctgaagtccagtgtctgtgttgtatgtgatttcatctcagtagagtgcagtttagcaccttattttgtcatgtatagaactctaatatattaaacaaataataaaagtggaactccctcataaatgatttagatattctccttatatgaaaggtcttatagtaacagataatttgttcaacagcaactgtgttttgaataatgcagggaaagaatgcttcctccattttgaactgatgatgaatatatctgtgagtgaaaaagcaataataaaaggtggatcctggattcttctctatgccatctctaaaatgtaaatgtttgttgattaaatgcatcttatttgggaaccaaaaaaaaaaaccaagcaaatattggttttcatgagtcatgtgctcatattccaaatgcagaatagaaagtttatggaaagactcaaatattgctgtttacctttattatgcaaaacactgtgagttgttttttcttcatttgttaatgcaaaaacactgatttaaaaaaatgagacaatggaatgagcaattatcaaatggtttttgcaaaatgcatttaaaatctactttttaaaaatgattcatttgaagcatattaaaaggtacacataataaatatattattataccattatataataattataccattatactagtggcttcatgctacgcttactatatgaactggcagcagggaataaaaatttatcttggtgcttcttatctttttcttttctggtaattttaagtcactttctgttgttattctttaataaatagtctaggtaagcagccaggactctcccaaagctgtgtttaggtaggaagaatacatgttactgacaaaagtgtcaagtgagttagttaaacaagtcttggacatttccatcccctattctataatcctcccctgggtgcctagccctgtaaccttatgtggctctccaggggcctacttttaagaccttcccccaaacccactcttccaatgcaaactttccttcccaaggctttctgtggtccattaaccaacatgggcctgttttctgaccctttttttttttttaatttcatcctggacctagctaaaaactaagccttgttaataagccagtgatgagttcctgcattatgcatcctcagtaagacataaatgtacattataggaaacagccttatgatttttatcttatttatacttgctttgtgtgtctatttaggaaaaaaagataatataagatggtacgatattcccagtataacactatgtatttcaggtgacagaaagtagagttatgttttcctttttaaatgaaaatagaatattaaaatgagagtcagaggacctgagccctactctcagctctgccactaacaggctttgtaatctcatacaacttaattagttatgtatctcccacaagatttttaatttctttttttgttattattatactttaagttctagggtacatgtgcacaacgtgcaggtttgttacatatgtatacatgtgccatgttggtgtgctgcacccattaactcgtcatttacattaggtatttctcctaatgctatccctacccactcccaccatcccacaacaggccccggtgtgtgatgttcccctccctgtgtctaagtgttctcattgttcaattcccacctatgagtgagaacatgtggtgtttggttttctgtccttgcaatagtttgctgagaatgatggtttccagcttcatccatgtccctacaaaggacatgaactcatccttttttatggctgcatagtattccatggtgtatatgtgccacattttcttaatccagtcaatcattgatgggcatttgggttgtttccaagtcttttctattgtgaatagccccgcagtacaaatacatgtgcacgtgtctttatagcaccatgatttataatcctttgggtatatacccagtaatgggatcactgggtcaaatggtatttctagttctagatccttgaggaattgccacactgtcttccacaatagttgaactagtttacactcccaccaacagtgtaaaagtgttcctatttctccacatcctctccagcacctgttgtttcctgactttgaatgatcaccattctaactggtgtaagatggtatctcattgtggttttgatttgcatttctctgatgagcagtgatgatgagcattttttcatgtgtctgttggctgcataaatgtcttcttttgagaagtgtctgttcatatcctttgcccactttgtgatggggttgtttgatttttttcttgtaaatttaagttctttgtagattctggatattagccctttgtcagatgggtagattgcaaaaattttctcccattctctaggttgcctgttcactccaatggtagtttcttttgctgtggagaagctctttagtttaactagatcccatttgtctattttggcttttgttgccgttgcttttggtgttttagtcatgaagtccttgtccatgcctatgtcctgaatggtattgcctaggttttcttctaggctttttatggttttaggtctaacagttaagtctttaatccatcttgaattaatttttgtacaaggtgtaaggaagggatccagtttcagctttctacatatggctagccagttttcccagcaccatttattaaatagggaattgtttccccatttcttgtttttgtcaggtttgtcgaaattcagatggttgtagatgtgtggtattatttctgagggctctgttctgttccattggtctatatctctgttttggtaccagtaccatgctgttttggttactgtagccttgataaactaggtattgattggacatatctcaaaataataacagctatatatgacaaacccacagccaatatcatactgaatgggcaaaaactggaagcattccctttgaaaactggcacaagacagggatgccctctctcaccactcctattcaacatagtgttggaagttctggccagggcaattaggcaggagaaagaaataaagggtatcaattaggaaaagaggaagtcaaattgtccctgtttgcagatgacgtgattgtatatctagaaaaccccatcgtctcagcccaaaatcttaagctgataaacaacttcagcaaagtctcaggatacaaaatcaatgtagaaaaatcacaagcattcttatacaccaacaacagacaaacagagagccaaatcatgagtgaactcccattcacaattgcttcaaagagaataaaatacctaggaatccagcttacaagggatgtgaaggacctcttcaaggagaactacaaacggctgctcaacaaaataaaagaggacacaaacaaatggaagaacattccatgctcatgggtaggaagaatcaatatcatgaaaatggccatactgcccaaggtaatttatagattcaatgccatccccatcaagctatcaatgactttcttcacagaattggaaaaaactactttaaagttcatatggaaccaaaaaagagcccgcattgccaacacaatcctaagcaaaaagaacaaagctggaggcatcacgctacctgacttctagatttttaatttcttaagggtagaactgaagcacataatcccagtactgtgggaggccgaggcaagaggatcacttgagccctggagttcaagaccagcctaggcaacatagcaagaccccgtatctacaaaaaataaatttaaaaattatctggatgtagtttgttgcacctgcagtcccagcaactcaggagtctgagatgggaggattgcctgagcccaagagtttgaggctgcagtgagccatgatagagccactgtgctccagcctgaacaatagagcaaatagagcaaaatatcctgtttcaaataaaaggatagaattgatgttcattcatatttatctccaacagtgattagcataataccatttacataatagatcttcaatatacagatatctcccatgattttcaggcaaatggagaattaaggtggaccttaggagagaagtcaaagccaaaaatgtaaatttttgtgttatcagcatagaggtataacctcaggacctttgaaatggacaggctgaaggaaggtgagagagagcatatgggaagtgaaaacattaaattcaggaactttggagccacaaaagtttagggcgtggttggaagaagaaaagaaaattaattagattttaaagcacaacaattaaatagaaagcaaaccaagatagtacaatatgtggagggcaagagaggagatcatttggaatggtgaatctttaccgggacagttttgccccctaggaacattcagcaatgtctggaaacagaaacacaacccagtgggtgttaatgcccactgtaggtaggggccagggatgctgctaagcatcctacattgaaaagggtagctcccacgaccaagagttatccagctatcctacattggaaagggtagctcccacgaccaagagttatccagctatcctacattggaaagggtagctcccacgaccaagagttatccagctatcctacattggaaagggtagctcccacgaccaagagttatccagctatcctacattggaaagggtagctcccacgaccaagagttatccagctatcctacattggaaagggtagctcccacgaccaagagttatccagctatcctacattggaaagggtagctcccacgaccaagagttatccagctgaagatgtcaatactgccaagtgtgagaaatcacaatgtgtaaggtcatggtcaacagtgttagatgccctaagaatctgagaaaaggttacattatttggtaattagtggtgacttttttgaaaaagtttctctacattatgaaaggataacgttggtgaaagtgggtagcgagacagagtttacaagacatgatgatttctgagaagttggaaagtaaggtggaagggttattttgtttctaagaatcaaagagacttgaccctgtttccatattaagaagagttaagagagtgagggaagtgagggaggatgggaaggagagagggagggaaagagattaaaagtgtgaaaaagagacgagcaatgcatattatttccttataataataaggaaagtaaaggttaagagtgcagaaaagagttggagaagatcgttttgaggatgaaaaaggaagggataggtaaatgaatggaattttaaaatgcagagatactggagaagttcacaaaagatgacctttctcagtgaagtagtaaagtataaatggccgagattaaaagaggagagattggcaactagaaaacaaattgatagcagtcttcctggaagatggataaggaataggctggtgatgactgaaagttttatggaatgatgttgaaaactcagctgactttggaaagcataagtagtgggttcagtcatcacatttaaagtggttcctctagaaatgcctagtagacaaaagaaaaggaaagcaaacacagatgttcagccggactaagggtgaggagttggcaagacccaactgtggtatcagatcaagggcatgaaaggagcaaaaaaagacgcagttgaaagggtgcaccgtgttttggggccgggtcatgaggactctcagctcagaggaagggaagctggtaaactggggaacggagggactgaagaagtgaaaatattgcagagggcaaatagctgatccaattttaggtgatgaggagaataaagttgtttcactgtggggaaccttctgcagtaaagcggcataaaagttgccagaaaggaaaaaaatgtcatttttccggagtctctgtttttaaagttaggaactgtccttgccttcaggcatcttaaagggaaaatattctgtgagttatttctacatttgctggcctgtgttgatcattttcttcagatattcacaactctataatatgtaggcaatccattctttttgggctcaaatatagacttagtccagaatctatacttcactctactccttactagataaataacctcaggcaagacatttcaccaacctttttctttttctatttctttctcttttttttttttttttccacctgcaagatgggactcatgagttctagcttccgaggctgtcctgaggataaatcatgtacaactataaaatatgttaggtttaaaattagcaagaaaaaaacaaacaatcccatcaaaaaacaggttaaggacatgaatagacaattctcaaaagaagatacacaaatgaccagcaaacatgtgaaaaaatgctcaacatcactaacgatcagggaaatgcaaatcaaaaccacaatgtgataccaccttactcctgcaagaatggccataataaaaaaaattttaaaaaatagatgttggcatggatgcagtgaaaagggaacaatgtacactgcttgtgggaatgtaaactagtacagccactatggaaaacagtgtggacattccttaaataactaaaagtagaactaccatttgatccagcaatctcacttctgggtatctacccagaagaaaataagtcattatttacaaaagatacttaaacatgcatgtttatagtagcacaattcgcaactgcaaaaatgtggaaccagcccaaattcccatgaatcaacaagtggatgaagaaactgtggtatatatgtataatggaatactactcagccataaaaaaggaatgaattaatagcattcacagcaacctggatgagattggagactattatcctaagtgaagaaactcaggaatggaaaaccaaacattgtatgttctcactcataaataggagccaaactatgaggattcaagggcataagaatggactttggggactcagggaaaaagggtgggaaggggacgagggttaaaagattaccaattacgttcttgtatgctgcttaggtgacgggtgcaccgaaatctcacaaatcaccactaaggaacttactcatgtaaccaaatgccacctattccccaaaaacctatggaaataagaaatttttaaaaaatacattaggtaccaggtgcagtggctgacgcttttaatcccagcactttgggaggccaaggcgggtggatcaactgaggtcaggagttcaagaccagcctggccaacatggtgaaaccctgtctctactaaaaatataaaaaattagctgggcatggtggtccatgcctgtaatcccagccactcaggaggctgagacagaagaatcactcgaacctgggaggtggaggttgcagtgagccaagatggcagcattgcactccagcctgagcaacaagagcgagactccgtctcaaaaaaaaaaacaaaaaaaaaaagtttttttaataatttaaaagattcatatttttctattctcatctgtattagtggcctcactggtggccaatcttctgcctgacttaccacctgttattcttcaaccagcagaaaatcctattctgcccgagttttatttttcaaataagatcacctttattatgtttcccctttctttaaactacagtgtttctcctctaaacatcaaatgtaaaagctttacatccccttgggaaaattgcttaactatgtgaaattctgatttcccctcacatggccttgcaggatgtttgcaataagcagagatcgtttgcataaagggcctagcgttatgactgtcatgaatgagtgcccagtggatgggtgctatggcagcagagattttacaaggatgacagaattcttgtaacaatccccaaacctcatttccccaagcataactttattggattcttggtaatctatcacttgttattattatcatggagactaatcataaactgatttatggtttcaatcagtttttttctggtcctcactagatggtatatttcttaagacagaaactaggtttaaattctaaactatatttcaagactattttagtctacaatgaagattcaatgactacttatcctaaagtatggcatgacagacagcatcataccacctagatattaatgagaagaaaaacaaacgtcttaagtagttgtcgaattcagtaagcaaaaacgctactatttctggaaacagggtctgctattcagttacaggagtcttttcgaatgtagtcagtatggtacctacaaaccatgatttgtgtgtattatggacaaaaattcatcataattctaatagaatgattttaaagccaagtcagcttggagtatttatacagcttgtatttacttttgctaaaataattgaatttgtaacaattataaggctgcccagatctctttagtgatgagtattgattattacactcagaagctttccctcattaaaaataaagtgttctagtcattgtggctccatcaacagaccttagtgtcattgttacagtaatcatgtgcttgatggatatattgggacctctttaaagcttcagttgtaacataatgatttgcaaagctttcaaaagttaattatcttgagtgtcccagataaaaacaaatgtttcatcaccctggactaaaaaaaaaaaaaaaaaaagaaaagaaaaaaagctgtagtgataggcaagggtcaccataggaagagcatctgcagaagtcttaatgacttcttgtctgtgattcagagtccagtgggatacgagcgtagaaaattattcagatatttggggtgacaaatatctgagtaaatgtgaaatcattgtcaaggagtagtggaagatgagatcaagaagggccaggttatagaaaaccatgacttccaggagaggcatgtagaattatggagtactcagtagagaacacagatggttcctaaacaggggactaataccttaatttagaaaaacctatctgcctattatagtaagtgaagtagagtagagggtggaggactgtgtgaggttgaaaatggggccgaagggagatcttgaggcaagtagaacagtaggagaaagatttgatagatgcctggcaaaaattcataagggagtgatcctttaagacagaatggaggaggggttagaaaataacagaggagatttttgaggtgtatgtggctatgttaggtgagtgatcaaatgtaaggcagggaaggctggagtcaaagaaaacattgaggcttgaagtttgggtaatgtttaaataattaatggaattagttaaattaaaaataaatcatttaatagtaactgatgttataaaagatttagatgtgtagaagtgaaaatactagcagaaaaaccaaatagaaatattcatcagtgttaagctatatattattcgacagtacatttctctttgtgaaaatgtacaagaatttttgtttatttatttttaccatggaattactggctcataaaatatgacattttcaattttatttgatagtgctgacttgttctctggagcagttgtacaaatataagtttcccttagctctttatgagttttacttctccaatgcttgttgtgttacttacattttgaacattgcgctaacagcatctaattagatagcatttccctgattgctgataaaaatgagcatctttttcatatgtttaatagtaattcagagtccctgttctctaaatatcctattcatattctttgcccattttttctattatattttgttttttctcgttgttattgtaggtgttctttatagaatatgatgctactcttttgcaagtatgtttttcccatctgtctcttttaatttcacatatgttcctctgtttctgaaatgtaaatctgattatattgcctaggtaagggagggagagcattaggacaaacacctaatgcaagcaaggcttaaaacctagatgatgggctgacacgtgcagcaaaccaccatggcacatgtattactatgtaacaaacctgcacgttcagcacatgtattccagaacttaaagtaaatataataataataataataataataataataataataataaacttcttaatttaaaaaaactctatttactcatggacattttatcctacaagattcacctgatatgtcagtgctcctgtgaattattctctgatttcttatgtgaaagatctgtctttcctttcttcttccttatgtactttgtactccataatatagaatcattatagcacttctgacaattgatcgtattggtttatttacatgacagtctagattgtaaactccttgatggttttcttcaccttagtactcccagaagctggcccagggtccaggatagaatgggtattcagtaattgctttttgatgtgaattccctttgaaaaaggaagataccatttacacttacttctgagagattttcacctttttgaagccgtggaccctgtctctctcactcatactcatattccactatgatgtcaatcctcacataagagatgctgaattaacataaccatgatctccagctaatcaacacacttgaaccactgtttttctttactcttcccaagaaaagtaaacatcgtaaagaaaataattttcatctatacatctttaaaattgtcattaaaaggtaaatatattcactagacatttgctgtaacttttagaaaaaactaaaatgtcgattacagactttggtattgccatgttttttaatgaagatgattaaaataactttggtaaataactccaaagtaatttagtaagtttctactcaaaatgtatttgagattcaaatatatgcctagagggctaccaattcacaaaaatatattgttatttcatttgctaaagtacagttcttcaaattcttaacaatctaccgccttccttgtaatgtgctagggtgacctaatttgttggcagcctccgctaggatgtggtagtgaggttgatctctggaattcgcacacacactcattaaccagatgcagatggtcaaataacagctatcagattgactcactttgaactccttaaaacttatgttacacactttgggtccaagttccctttccacagcatcatcttaatacctaaaggacagtgacagcctggaaaattgcatattcttttcttttagaatttgcttccaagctttcttatctttgctttgctgcatatttttaaggtgttatttttttgttaagcatcagtgctatcttaagtatgactggcacatcttttatgtggctctgtagcatcacggatgatactttttggagctgacactcttcttattaaaagtgccattttattttctttttatttttgtctgtagatacagattgccgaaagaaaggaattttctttttccttttttttcagttaaactactgctacctaatacctaatttttattgatgatagcacatgcaaaaatggacgttaatgctctgctagctcctcctggctgtggtgattggagttgggcctgttaattagttacccacactcacagaggatttgattagatacttaattctctttggcaactcttagagcctgtcataaaatgttttttgaaagaaagtgtgctcttttcacataatttcattaagaactttttctcaggccttggaatacattggcaatctcaaataaagttcaaagaacaccattctgatggagcaggtcacttttctaattttaacctaagatctttataaactccacgtgacagacttttcagccataaaatgttacccattgtctgtgttctatgaataaaaagcacaagtgggaatgctacagttcacatttgtgagctgctgagtcttgagtttttatttttaaatggaccctcaggagccaaaaaaaagttaagttaatcatactctcagttcctagctcattattatcatccattcctgcaagtcttgtttcatttccttcttcttacccagtactcctatttcccagcaacccccattcactctaatgactttgatgaatgtccttaaatatgtgtgcaccttgtacaatatgcagcattgtgaagtttccatgttttcaaggataataagctttccagtgtcaataaccttgtttactattacttgaacaaactgcagctttagctaatgcataaaatatgtaaatgaaggagccataggatgttagggaaaatattcaaatccagccaactaggaagtgatttcttgtttgtgaggtatttagaccgtgctaggtggcctttattaaacagtgactataggccgggcatagtatctcacgcctgcaatcccagcactttgggagcctgaggtgagaggatcacttgaagacaggagttcttgaccagcctggccaacattgtgaaaccctgtctctactaaaaaatacaaaaagtagccagatgtggtggcacatgtctgtagtcccagctacttggaaggctgaggcacgagaatcacttgaacctgggagacagaggttgcagtgagatctcgccactgcactccagcctgagtgacagaacaagactctgtctaaaaaaaaaaaaaaaaaaaagcccagtgactattacccattcacccattcatagaactaaggtttttaccttagctttatcaaaaaaaaaaaaaaaaaaaaaaaaaaaagcaagatggtgttcttattcccattttctaaattaaaaaaaaaattctaagaaaggtaaagtgaccagccaaatggcacacacctaaattttggttctgggattaaatctacatgtgtagtcttctctctcaaaaatggaatgtttcttgtctttggaaactccaaggacaaaaagatgtcttaaagagattgggaaagatttgcttgaggaaggatcatatggccttggctttgaagaatagatctaatttggtcagactggtaggagaaaggctcattgtaaggaagcaggcgggggtatattcaacaggaaacagttttccttggctgagctgcagagatgaccattagaaagtgggaaaggcagactgaacctaaatcattaggcatgatctattaggctgggaagtttggttctgtctaaaaaatacagaattttatcttgtaggataggttaggatagtgggtggggttgggagtaaatttattcctcaggtgtacgtatagaagtttaagctatgacatacaatgactaaccagctatattaccattgaagcttacatattcctatctggtttcaaattttacacaaccaaggtgaaaaagataagaccaagaaccaaaataatcagaagagaaaatattaaaaatgatagttactgaggtcttgttagaagccaagcttaatgctttccatgtattgtctcaagtaatcttcataataattctaaatggtagtactgtttttttttccattttgcaggtttagaaaacgagacataaaagtaagatggctgactcagagtcaaaaagctagttcatggccaccggccatgagaatcagtgtgtgtctgattctcaaccattaaactctattgtctccaataagtaaatggttaaatgtgtgataagagccaactagtttaaactcaaggcagtgttgggaatattttatctgatttcaactgagaaaatagaaagtgtacaagtgctctccaaggaaaccaggccataggtttatagaatgaaatcataactttgaaggatgtacttcatcctctccaagtacttaggcagatagacctgtacattttaatacagtcatgtggctgcaaatgtcctccagggggccatttagctatctcctttttgcacctaaaggttttgtaaagatttgaaacgcactggtaatgaggtttatgtcagaggcaaggggttggtgggggggtgtcaaagctttagtattatgtaggttcaactgttacaagggagatggtcccagctgaattttttaagcaaggggaaataaatctcttcaaacaaagggactgctttttctttcattcaacctgatttctctgcctctgggctagtctttcattttacgtagtcacagagaacagactcattgacccttcctcaggtcccaaaccagctagtcatgaccagaatttggtgatctgtaatccaggtagaagagatgtgaggattttgtttacgtgtacactggtagctcatagaaacctgtgtattctaaaggagaaattcctggcccagtaactggaattcctaagttctcaacacaaacctacgaacatttctatgtggatgcttgatgaaggatatttataccatttctactttcttaaactgtaaaaattagacattttagctttatacagtttgtgtagtcctatttataaatcacattatagtaaataagaatattttttcagtttacaaaaatagcttaatatttatagaagtcctacggtgattcttttcactctctgaattagttaattttacgtatcaagatttcttaatgaggggcctgtattgccccatacctatttcatagaaatattgtaaggactcaaggtttagaaacccctaattttctgagattgatatgaaaatataggataattataaataataagtatcagcattaagtgctttagtaatttagttataatttagtaatttagttataaattagacattttaacaaattgtgtttactggggagagaagacaaatagttaactaaatagttcctggatgctgggaacttcatgtatcttaactcctttaatctatacagcacccccatttaccatatcagtgcacatgaatgaaatgcctactacattctggaagttgcgcttgatattggtgttacggtggtgaacgagacagatacagcctccaaactcagaaagctaaagaaccagagaaaattaaaagaagtcccaattgtcatatgtaaaggtgcacaaagggttggaaggggacaggggaccttacatattaacatttcattctgagcccctgaacacattgagcttagaattcacatgcataaaaggtgggcaggcttttatggttaataaatatgaccatgtatggctgtccaaagcccttggtttctttcctgtcatattatcctgcctccttacaataattgatcatttcccagaagataactttccattttaagcattgaaacaagtatgccttgaataagcaagtgttcacattagcgcttacgtttgtattctacgatggagaatgaactcatggtctttcctatttccatcttccctgatgatgattctgtggctacagttgcctagacactgccttcaaggatatttgagtgaagatgacagcaattaaaaggagtaatggttttcaaaagcagttgttctaacaagctgctgcccaggttaggtgagcatgttaacatcaacttctttgtcaaccttcaaggcactgtcataatgagttgatctcttattattattattattttaatgaaaatgagacataacagagtttggggttcttttcccccccaaatacagtactatgtttctgaagcccatgagattacttgagcattggagtatttcaattacccttgcagtgcactaaggagcagcgacgttaatatcttgttaattccataacaatcattgttccttacttggtatccaacatagctgcacaagcattctgcctaataataagactgctttcttcccctaaatgatttataatgcacaggaaaatcactcattatggactccacctcactgactctgcttttagcaccagacacatagtgtggcttggtcagagaaacccagggcttaattataattccaaaggtgttgtatcctgaataataattctatgtcattaacaaatggaaatcccaggcaattatttgagtaggtgaataacatcaagggtagatgttataaccaacttttattattcctgaagaagaaatgtcactcggaatttggcttctatcattggtcttaattaccatttacaatatagggcttagagaacaattacctaaatcacacatgctcataaagaatcatgggaagaggaagaagaggtggtcaaggcaaatcaagtcatcctgtttattggactccttcatttgttggctcagaacatatttaccaaacacttgctctatgccaggttcagtgttaggacctgcagacaagaagagaacaaagtaagtggtagagaaaggaaagaacacttaaacttcagcaggcaccatggaccaacggtcaattctcagttctgcctataggatgccccattttaggccagcttcccatttattgcaattactcattggggcaaatgaataacacaaatacatctggtttttcataggtgaagatgatttctgaatatagatttggaggttattggcatatgagtaggagcatgcttggaaaattattttcctgaggacatgtaatttggaaacattgaaaactttttgaaatgaaggttgtaatgtttgagatatgtttctgctttaacatatccaaaatgatttctaaagtccatgtaaaaggaagattttaatgtaaaattgcctattattagattattaaaattattgaatatggaagaaatatgaagaagaatggtgactgatgtggtttgtctgtgtccccacccaaatctcatcttgaattgtagttctcataatccccaagtgtcataggagggacccagtgggagataatggaatcataggggcagtttccacatgctgctgttctcgtgatagtgagtgagttctcacaagatctgatgattttataaagggcttttccccctttgcttggcagttctctctcctgctgccatatgaaaatggatatgtttgcttccccttctgccattattttaagtttcctgaggtctccccagccgtacagaactatgaatcaattaaacctcattcctttataaattacccagtctcgggaagttctttatagcagcatgagaatggactaatacagagacgatcaggagagtcttagatattgacagatcttcacttttgccaatcccaaatcatttcatgtgaacatatggcgtttctccttctctttttctatttgccctgcattattcttttcttgtttctcatgtcttgtgtccctgttcaggaaaactcatactttctcttttagtcaaggtttctattgctttttgaagtttattctcccttctttagctatagccacctttcttgaactagtttaagttcctgccttgatttccttcagtgatgagaaaatttcctgtctctaagggagttcaacagagtcaggctcccatatgttgttctagcagaaagagaaacctactatatgccaaagaaacacttcctgtgctttacttctgcttcagagagtgtctctgggcataagcaggctcctcgactaaacctccagtaagaagtgtccatcagcatcacagccataactcaaatctagatattcaaattcctggcctgtatatacattatgtatgtgtgtgtgtgtgtgtgtgtgtgtgtgtacacttgcatatatgtatgtgtatatatatatacatttaaaattacaatatatgtgtgtgcatatatgtataaaatcagaattcttgttaatatcctcatatattcactcatttattcaataatattactgagcacctactatatgcaagccactattccaggtcgttggtatctaatgcacaaaacaaagcctgagctgtgttggagcttacattctggagaaaaaaaagggacaacaatgaagtaaaaagtaaaagatgcagtatgtcagttggtgataagtgctctgaagaaaaataaagcagagaagggagcctaggagagccaaaggaggggtaggggatgtttgctcctttaaatggcgtggtcagggaaagcttcactgacaaggtgacctttgagcagacaactgaaggcggtgaaggagcaatagggcaggggttgtgggggaatagcattacaggcaggagaaacagcaggtgcaaagcctggagacaggactgtatttggctttgtccagacccaggtaagaatcgtttctccaaattacacaacttggctgagggcagtgggcaggagaagcaccatacacagaaaacactgtgaccagtgccccctggagttgtgcaatgagtctgcccttgcaaggacaccagtgtggcttgagtagagggaagcgagccagatctcagagtgccttgtagacctgtgtaaggactttgttttactcagcagtatgctagtaaatgtttaacaatcagctcttgggggaatgaaggggaagagatttgactttgatttgtagcatttgtcaattgctatagtggaaacagtcacaccagggctgagactaagcaggacgttgctgaatgtggagctgggaagggaagtgcagcggtaccaacgctcatatagtatttcttacatatagataaaatagatgtaaatagctgcaagagcatagatgatatagtaaagcgtaataggaagggatgagttttgagaatgagttacctatgttttaaatataatgtatataattatatgtttatgtaatttaatttttaagaatggctgcgtttctcaagcttgcaaaatttgtcagctctcttgagctggtatgagctggcttcagcacaccactggatttcctcggagtgagggctcataagcagtagacatacaccaccagactgtagaaggatcgcagtgctgttctgaaaacaggtgataggtggtcaaaggcaggagcagggagaccagtgaggaggttttccaaaacctttaggattcagcagaaaacatttggacaaaccctgcacctgcccatggtttccctcccaagtagcttaagagcatgagagtatgatcctggccttagtcacttaccttaattcctctattcttaaaggccaggtttcttccggttaatgtttctgaaatcaggattaagttgggatgcatctagaaactgatcatgtacacttaatacatatggtttcttttttttttttcccctgaaaagctggtatgaaatcaatgtgggtttagcaactgatagcattttacaactgagaaaacattctgttttgctttgtgaaccacagaattgatcgtagtattgtttgtgcccccacaattgaatacaactgataaaggctttggaatataaatatagactttataaataaagcctgaggaaattgagagtgttttagtaggaaagacaaacactaagatgtggggaaaggtgtaggaggaatcaatgaatcaggtgttcaggagagccagtgagttcttctctgattaaataagatagacagccatctagggatgtgatttaaggagtgctacctccctttcccaacagccggcaaagacagattatattcccactagttcagttctctgggcttcaagcattgtctctgggtgatctctgttaaaatgtctgagagtgacccaggaggcaaggcacattcacagagggaccattaaaaagattaatgggagggaaacacccaaaggaaatgaggctagaaaatgttaatggagaatcaacgctgggtacagatctagtgcagagtctttcagagcctagtcatgactaaacctctttcaacaggtccctttgacttcagcaagcttacaccaccatgtgctgttggggtaccatacctctgccacaccactttcttccattgtaatgactgcttatcttcattcttgtgttcccagagtgggccctgtagaagcacaggaataaagacggttggcattagttttacacaaaacccacagattaattctacctttattgttttctctctagccaaggataattacttttgtatattatcctatcgcactttgcagtttttataatgtcacatccaaatctcagtttattaaataactcgaaacacaaaagtcattcaataaaaatgtttttcaagcagtaattatcccttaggaagaaaagtttcatttctataactggtaaaaataatttaacgtgaatataatggacattggatgattatcatctttgaaattaggatacacggcaatacttaacgatatattatctgttaagcgttatcaatttagatgagggctggaagccaacatgattgtgaacccaaataaaacatagacacagagatatttgtaactatccagttattaggttagtcatccagctgatttttttaaagattatcatcagtacttcctcttaatcttaaaatagagctgtacattgcacctctccagggtctgtggatttctattgaatcagcattgttcatgttcaagattcttcacactcagtaatacaggagtccttgggctactgtgctcctcctacccaaccactcattccatgcttcagcacaactgttctgatatgagtcatatctttatctactaggattcagcataagatttcatttggaaaaaagagtcttggtgctaccgttaaacaattttaaaactactggtctagtttatggggcaccctaaaagatagactatgtctgaatggaatagtgcttggaggggtaagaaataatgtgaaaggtccttcttgcaggattattatatataaataaaaaaaagttttctatttgtaagaggtataaaaatgaaagccacaattttttttaaaatatagagaatacacctgattttttggaaactactgtgtgccatgttttgtgttgggcactttgcaggcttttctcatttaatcctctatgaagtctcatttgacttcattttatggagcaggaaaattagatactcagattgttctgcctgcatctaaagtcaggtccagtctgactgcgtttcaaactcttggaacctctgacatttactcaatattttaaagtgtgtattataaataactgtctccctgaggtgtgttaggtttggctttgcccaaagttagtaattaggttggatgaccagtcctgcaactccagcctgttggccaactttcctatttgatctgagactcgttacagggcagttttggcatgggtaagaaaggagatgagaaatagatgaaaccacactgcaggattaaacctgaaatgttatttggtggaaaaagtattcccaggctaaactctagttctttcattcactactctgcacacgtcataaatcagccagaagagagctatttccatattttaaattgctgcaaaaatctctccaacttcctcattttgcagataaagcttcaacattatatgaagcagtgtatgttgaattttaatgcttacttcagaaatcatacttactcactttgtgtgtttttgacgctcttcttacatgcaaccatgacctaatttgtttgcagaacatgtttacttctgtagtggtttattattaaaatgtttctaagcttctgtcttagctatttagaaagctaaagaaagaatccctgttgcctttgaataatgtattggcccttgctaatatcttactgaaatagctcaaacccagtttaaaaaatcatttcataatattttagccattctcatatatgagttatattataaatgtcataaatcttttcaaaatgttaaaacttaaaaaaactgtgagacatagacaaaatactattagtaaatatttaagtatcaatatttgaaaacgttacagaaatatgctttaaaaatatctacaatgacaaaaatatatgagctagaaaatccttaaattaagtctgagctataaaatgtagagccatattaaatgtcactttgcattcaatttgaaggaaaaaattaagaaaccaaaacactttgttaaatacaaacacttccccaaaaaatgtttaactcttaatcatgttaatatatattttaatcctattatgaaacaggtatatcaaacatatatacttaagttactggatatgtaaacttaattcatataccttgttctttaatagtcatctcttgttgcataaggcatcttatatctctctctattcctagtcttggttactaagatatgatggtataaatatcatcatgagataacatcttatttatcatttttcagaaaccaagagttaaaaacttcccaaaatgccacaaatctttgagctcttaagcaactgtgtgtgtgtttgtatgcatgcacgcatatgtttgtatttgaaaagggagtgggggagggggtaagatagttataatgcatgttgtgatttattggatactaatcttgggaacacaagattacatttcaaaggtcagctttgcagtcatgaaaaacaaagattctgcatgtttgatgctaatgagccctgtttatccagtgtgtgaagtaagacaaatattagattaaatctaaatcacagaatgttcttattatagatagaagcctttctgggagcagatgtgctaatactaaatagaacactgctataaaatgttttcctgaattactgaagtaaataagatacactaatgaaaatggggagggggaatcatttataaaattaaaatcttgtaaaagcacaattagaagagtctactacctttaaaaatgtgactttatagccccgtatattcctttgaaaaataaagtccttcctaaaaccatgatttccaagtccatgggtttatttaggtattctttaagcacttcatttttacaacatgactcttgattgacatcccattacttacatgccattcaaattgttctcagtttcccatttcctactttttcctttcaattttgtgaattgtgtgcatcttggtcattgggctcatttattcattcaacaaatgtttccaaaaagcccatcatgcactaagtctaagctcagcttggcacctgtgatgcaaagataatcaagtcatgattcctgccttcagtgaactcatcatatgaaaacaaagaaagaagtgatgagtccatgtggacaaatcagagaagactttatggtcttggagaacaggactttctaggcagtaaagggggtgaaaaagcacacactgggggatagaggagaggtaaacattgacatttgggaggaggtatagagtaaaagggggaaacgggtcaagagaaggctggcgaggcagaaaggaggtacactgggaatgccctctcgctcacattcaagagtttgaacctcatttcacaaggatctcagagtccctgaaaggtttttaagaattcaatttgtagagacagagattgaaagcaaggacacaagtcagaatttctaactgtccctttaaagataatatgaataatataaagacacaacttgtcttcttccaaagcctatcatttttccatttctccccaaatggaatggcaagaaggaaccctagaggtggaactaactcatcaggagaaactgtactttgccaggcaatttgtgtgataaactgaaaaacaagcaagcaaacaaataaacagaaaaggtaaaaaataatttttttttaccaagccattcataaattaggaaagaatctctcctaacagtattttctgtattttttcacttaaccttaaatacaagagtggagctaagagccatccatgtgtctctgataagtaaattacttttacaagacactgtatctgtgctccttctatatgtgtgtaccattttttctatgtaaaagatagttatgtaaatttctattttatgaaccaataatagcaatgtataaacaagacaggtgtattttatgacaatgtcttgtatgaaacatatcatttgtatctcaaaaaaaggaacctgccttaacagaaattccttctctacaatctagatgctttaagtatcagaaatagctcgtcttatgatcctatgaaaggtgccatgtgcattttttttcccagactgaggtttctatctatatcatgatatgttcagttcagtgagaagcattcaatttatcaccaaatactactgcttttagggaaaaaggcttttaaaaatatagttattcattttgaaaaactctctctttctgaaaaccactagaaagtcaaataatcttatcttcctgatcgtgttcacagccttggaaatcctgggagcaaaccacccaggagagacctgcactgctggcccagccaggctgattctgaacactgactcatgttatgtctctcaggtgttgtcaaattttaaaggccaatttcttgcctttttttttttttaaatacaaaatagttaaatgaagtcagcaaagaaatgagcgtggagcactgctgtgtacccaccaatccttaaaagttacattataaactccagacctttcatacacataataaggttcattaaatacttgttgaaaaatatgcattttatgaaataagtaactaaaaaaccatttctgtgcaatattatatcttacacaatgaatatcagtaacatctcatgtaaatatatctccatgtaaatgaatatatacattattttatgtgtatggaaaattttaaacaattaaagaaaaatataaggagggcatcatgataacaaccaaggcgagattaagactactcaaataaagcaataccaactgggcaccagtggctcatgcctgtaatcccaacactttgggagaggcagaggcaggaggatcactttgaggcaagagttggagcccagcctgggcaacatagcaagatcccatctctacaaaaaaaaaattgaaaattagttgggtgcagtggcacttgcctgtattcccaactattcaggaggctgaggtgggagaatcacttgagcttaggagtttgaggctgcagtgagctctgatcatgcaactgtactccagcctgagtgacagagcaagaccctgccacaaaaatataaaaataaagcaatactaatatacttttatcatgcctgaggccgatttcaaatttatacttaacagtacaagcctttgtaaaaaagtgaatatgaaagtggcttttagtgactttctaccaggaaaaagttgaactgccaatttgttttcaaagagttgaggttctctaaaattaatttctggtttatcaaattatttccatgcatcctaggcatttaatgtcatcttctcatcaattaatagaagggtaaaaataggaggagaaataagtaacaggggtaataggaggagtacaaaaaaatcaaatattattacctgtttgcttcatttcttccttaatgtttttggacctgtacactttttctgtgtatattgataacataagaagttggctgagcttatttctctcttgaggtaatagtattcacagttaaatccttatttttctaaggaaagttgtgttgttctgaaaattgccttcaggcagccattagctagggactaaatatctatttacagtattttatagaaatgtttttggtatatagattaaaagtgaaaatctctaatattttattcacttttgatttttttaaatcctaaaattatattatctcttaagaaaaatatatatgtactagtcatttttcaatatggtaactttttttcctactctaaatctgggcctaggatgtcacaactgaactgaacattgaaaattcagaaactccaatatgtatcattccataatcaccctgtattgttcactcttaagagtggtttgaacctatgaaggagagtttgcatccatgtacatggttgatagagtttggatatttgtccctgcccaaatctcatgttgaattgtaatccccaatgctggaggtggggcttgttgggaggtgtttggatcatggggacagatccctcatggcttggtgctggtcttgtgatagtgagtttttgtgagacctggtcatttgaaagcacctcccctcccactctttctcttgctcctactttcgccatgtgatgtgccagctccgcctttgccttccactgtgattggaagcttcctgaggcctccccagaggcagatgtcactatgcttcctgtaaagcctgcagaactgtgagccaatcaaacctcttttctttataaattacccactctcaggtgtttctttacaacaatgcaagaactacctaatacagtggtaaaaatcccaaagccaagattcttgtacatctggaccagccctggtcattgccagttacaaatgggcagataatattttgctaaattattgctatttcaattgtaaaagcaagaagagtgccagggaactgctagtcagatggccacatgtggatgaggttgccacaggtgactggtttagtgttaccaggtcagaaaattggtgtcatttttaaattcgtttttagagtaaggtggaggaataatcatttctagctcctgaatgttcctatctgctatccaaggcatatcaaggtgtctagaaagccaaattaggaattagaaggtgcttaataaggaaaggcttaagcaaagggagttagattgccttgtagacaatgttatacagtccacagtcatgattatttctgctcccctacagggaatagtaatctattttatatcatgatgtattctttccaacacttattaatcagcacttaattctcaaatattagaatttatcttctcttagattttaaaatcagtgtgtttatttagaaggaaacactttagacttttgatgaaaatttaggaaagatttattttaccagtaacactcatcatcttttgggtgggtcattaactaacttagatgatggtctgtaaagtaggaaaatttttataatgactccacagacagctaagtaaataatgatcacttgcaagctgatttggttgtagttgtgtactttttaatagagagcacaatagatcactgtatctgtcaggataagctagttgtattgtgataatagacaacttcaaaatctcagtggcttgaaacaatgcagtttcttttctttctagcattacatgcctaatatgagtcaggtggggacgctacacttgtgtcctcactttggatcctaggtgacatagcagttgctgtgtggaattttaccagtcattctgactgcaggaaagacagagctctggctggtcttaacgggcaattaaatgctctggcttggaagtgacagagtgttacaactcgctggccaggacaatttacttggccctatctaaccacaagagagccagaaattgcaatgctgccatgtgaccagaaatgaagagaactggaaagatctggcaaacagcattgtgagcctcctaatcatttgtgtgcatttgccatcaccccttatgttagcatatctttattcagaaggtcggagaatcacaaatgtgtcaaacaatgtcagttactaccatgatcatttattttagatcccattcttcctccataactacttttttccacacccacgttactcaaatacaaaaaccagtatctctaagcatttttctgaaattcaccttaacttctttgaacctcaatttgtttcagtaacaacaacaaaaaaggctcagactacagtgtctctgataaattttaaaattttatgattacattgtgaagttattaaattgtggcatttatagtattcagttatgtaggtatttataatgtgtgtttagcacattttaaaaacatgctgtagttactcagtatttagaacaaacaatataaattgaaataatgagaaatctcagggttatcctaaaccaccacttgaatggaaacagtaatggacaaaccataagctgtgctggacaactactgcctgctctcagatcccttcctctcctttcctctactcgcctctctataagcagggaattacatttcccagggtcccttgttctttagcttctgggtcagttaagccaatcaaagggacttatggaagacctgtcccaagcaggagagaagctggaatattttttcctcctcactccatttcctttccaagtctccagcagtaacagcagcagtagcagcagtaacaactgtgtctaccctgtggttctgcctcccactcttctgtgacccaatcccccaccagagactttggcttgtgtttttgggtaatagctcctcctgttatcccataagccctagcagagcgagtggcttcctttggtaatgtctgggtcatcgttctaacttctgtttggtttctcaactcttctgtcccctgtgtaactatttccctgtattaaatactttctgtttgaaaaccactctgaacctggagtggtttctggttttctggctagatcttgactaatagaatagcccactatgaaactgaaagattccttgaaaggttatgttgactcaaaggccacataagcaattttctttttaaaatgaatgaggtcagtaggataaatggaaagtataatgaaccaggcagggtctgtatgttacacagaagatcatattacacaaatatgtttatattcataccattttgcagattgtttaaagtgtaagatataccttttttccatgtaaatatgaaagttctgtttcgtgatggaatcatattcattgcattgatggagcaagatatatttaatgctctcatactgattaatgtttaggatctgttggacttttgagtactataaataaaactcagatgaacacacatgcaatatttgaaggatttaaagtttatttttttcttttttcaacagaaggtacttctaaccattttactatccaaattaactttttctgtatcaaaactaaccctgtccaccaggcctcctagcttttttattttatcttagcttcctaagtcagtcaggcaattgataggatccaaaaggaacagttgttatattttatactcttaagtctctacagtgaagcaaagggaaataaatcataattcagaaagaaaagtacaagagtaagtaagtgttaataccatagcactgtgttagaacaaaaaatgtatttagtttgcttagtaaatgcaaaaacccagcctaaaccagcattctaagtgcagaagagaacttcaagattgtcaagaggaaaggagaatgggaccaaggcttccaatttttaattttgaaagtacagtaggaaacctctttggaaactctatttagctactattaatatgaagtcaagtaacacccaggcagctcatctcagagaatctcaaaagtgcaagactctctgacagttctttttctgcaaagaaaatgaccatgaagtcattctgctttattaagagtcctcataggagtagagaaaagttttaataagcttatagctactctgacagtggagtagtaaatactaagcattacttcataggaagaagtaagtataacaccttcacaggctgtttttataacatatggactgttaagtacttgagaaataatttgtttgtttttgcagctcatagtttaatgtaatgaagcactactgagttgaataactagacaagaaactccttagttatggggaattatattctgaattaatgaattgcaaattgtaagccaatccaactcctataaatattatgaggaaagaagtagcagtcttacctacacagattttcaaggcaaagttattctgtgatgagaaaaagatttacaacataattaagattcctaaaatataagtacttaagaagaaacttaccatatgtttaaaattatccaggactgcatttatgatctgtgataagtatatattttctggaatgccgaaaacctctttaaaggttttctgttttatttttatggctttattgtgcatttcgcctctagcaatttacaatgggctttaaaaattcaaaaaataaaataaatattttcattctgtgcctgtgatagttatttcactttacagagaaaatactaactcattggtaaaaatacaaataacttaaaatgacagatttaataaaccacattctgggaacattttgttaacacagctctatgatatgaaatacagagcttttttcaagtttgaatgtcaattaatttgagaaatgatggtcttgagaattgtcttcaatttctgtatacgggagatcattaagaaaatatgtaatcttaatgggtcatttcttttttccaaaaactgactttagagttcaaaaacagagatgacacgataaatagggaaagaggccgtgagtctgatgttaaaattcttgaaacctggcttcatcccataataattatataaccctggccaagttatgaacattgatgattctgtttcttcatctctcaaagacgtaaaataagatataacttgccttcttcaaatggtgggcctaaggatgagggtagctaatacaaatgaaagggttttaaaaataatttatgtggttagcaaaaatgctatacaagaaaagaaaaataaaggatttcatagtcaaatagtttaggaaatcttagattattgtgcacatgaggcagagagagaaataatgacagatttctcagacacttcagtaaagagagaatagattctgcctgttacctcgtttgaccttggaaccctccctggctccatttcctgtcacacatctggagaacactggtggagaaaggtgattccagagcgcacggaggccatgatggtttttcacgtagggtgttaaagagcgaggtacagaagactcaatggagcaaagctaccacagaattgatggcactaataacttcttgagggtgattctagctgagtgtttcctgcttgtttcttataaatgtatttggtacaggatcagtgtagttatatttccctgaagctatttcttacacacgatggcttcagcaggtttgaggccaaaatgccataggaatgcacatgccttcctcagattttgcctctccattttgaatgtatgcaagtcttgaaaatcctcgttattgggacccttctgacccctgaccacagccttgtggtctgacagacgctgtagcctcatggaacagggcattttctccacctgtggacttgttttctgtattcctaaagggaagaaaataaagaatcctcaagatctcttccttgttcaaaaatatgggccaaataatagtacaacattccctccccagcctcctgggtctttaatagttgccctcacctccctcatctaaattagtcattaaagactagagcattatctccaagaagcctatatgaaaggcacagcatttaactggcatgaaggccattttatctctctcctaggtattgattagtttctcagattagatcacggtcacggagtcagatgctgaaataggatccaccaaataccgcctcaggacccagcccatggatagacttcctaaagttaaaagacgatttcagagttagtctagcatttaataagtatagtagacagtatacattagaagacaattgcaaaaaataaaaaattataaggctccagatatattaatgttttgttttttaggttttatcagattttgatgttcctgtatggccattgtaaaatctactgacaacttgaaagcatgtctagcttctgaaatattattcctatggaatgttgattctcattctgggaagaagagcagtcttttctgtcattcactcagaagatagttattgagtatttacgatggtcaggtgctgcactaagaaaaaagatagaaacaagaattagacaacgactatatgactctgtctcgattcccatgtttgtgaaccagcaagtacatgcccaccatacaggtactgaccagtgacaaaaaaaaaaaaaaaaaaaaaaaaaccttaagtgcttttaaaacacatggctctaaataaaataaaattctaactcttaaaatataagatgtgaaatagcaaattataaaaagtacagccacaatataatgacttaaaaacttcccacttaaaaaataaaaaatcaaattaaaaaatcagaacaaacagggaatgtattcattttatattatacaagatatcttggcagaacttaataactgaagacctctgtttccctttgcaaaatgaaaatagagagcatagggtaaataagagcactgagaaattcagctttccaggtatgatttcaccatccagggctttactttttttcacattgtgggtatgtgcccttccatgaatataacttggaagtggagaggatgagaaagtgaatttagtatgcctaaaaagaacacaacagcatttttttttttttggtctcagctgaatgttcaactcattaaaagaacaagaaacatttcatggattactgatagcagtacctctgtcacagacaggaggccagatttgagccataaatggagccattgtgtgcaataacaaaggtgagatattcatcctcaaaactgatccacctcctgccaaagacaggtacacacaatgaatacacaaaaacagcctagtttttttcagagagccacactaaaaaacaagttattaggacattaatcatcagttgaaaacaacattccagaagaaaacagcaaaatcaacaaaaatatgtgtactgctgatatgcttgcaaagctcaacacaccctacaatgaggttaaacgctaatatttctgaaactaatctgtgatttctttttcattatcataaaggcagtgacaaattggaaatggttgaattcatattctcacctttgaatgctgaattactaaatttagttaaaggctgtgagcattagacagagccttaatgattgggcattatcaccacttcagcccatgaatggggagtaggggcctagaaaacctaattaatggcagtgccagaagataacacagacccctgctccaagttcagcattgtctcctttacactgtactattctgtctcttgaaccaaatagatcctaggaagggccacatttccagaatttggcaactgcctggaaatttagatcccccagaagaatgtgtccccctcatgctaaatgcctcagttttgcctattaaagtattttatttattctttagaacactttatgctcataaacgtgcccattagttttacaaattaccacattactcataaatgaggtgtcctcctaatatagcacataacttattgttgcattttattggaccatttataataaaattatggaatgtgttaaataacccttagagaaaaaacatattcatcatcttagcagagacctaagtattgcattttttctaaggtctttgtagggaatctatatgcagaatatcatactattcctctaagaggactttcgggtttctatttaaggtcactcctcccatccttttcactagatttcctataaaagtctaagtcacctgtaatgctcttattttcacaatctgaagacaaatgatttacttcttctaaatcacataagatctatttgttgtttaagttagcaattaaagttcagcagcaaagtctgaaatcacctcttctccttgtcacccactcgtaacagaaacattggcactaacacatgtgaccttcagaatagccgttgcctctcataaaatctaacagtgttttcttcagaaataaggactacgaagccacagacctcaagtccctttgagactcattgacatagtacttatctagctgaaaccaagggtgccctaatcacaggacacctacaaaatttcctttctttctttttagcatttacagacatgggctaccggagctgtattacagattagctttatctaatgtaagctagtatgcaaaaaaaaaaaaaaaagttaaggcagactgaattaattatatctgagatttgacttacacattagatgattaaatatgtgcatttgaaaaaaaagtccctgaaggtaatcttgttactttaaataattgtccagggccttttggctaaagtgactttccccatgtagcttgcttgtgttatcttaatttttcagtgtcttaattttgcattttctttatggctctactttcaatttaattcagaagcatttattgagagccaaatgggcagagaacagtgctagaacctgcaggggaatggaaagttgaaaagtcatgacccacccacccgtcagggttgtctctgtcatgtaggacataaatccacatggctaatgcatcagccattacaccaataactccagtccaaatccagattaccagtacctattttttattataaagggaatttatcgaatcactactgaattagcaagaatcaataaattaggaaaaagaagcccttgcttgcagcatagcatgaaactaagacaaacagctcatctccaacgcaaggtggttaagcactgagccaccactggccagggatgccacagaaacccaggaaaggagcttagggccctcagaaagagttgatttttgagttagatcctgaaaaattacaagttagctggacaaagaagttaagcagcttccaggcagaagaatagcacctctcagcctgcagatcttcctagttttttgactatcattgagaaatcaaatttcaaaaatcatttaggaaatggataaaaggtaaccaaattgtattgtcatttccaaataagcaattagtttcatgatttcttaaagcaaaggattaacaccagaatgtagaaaagggaataatcttagaataaaggacaattctttaacttgaataagtttagcatctttttttttttttttttcttcatttcacttcactggcaatccttttcatacctagtactaattactggaccgacttctgtgaactactgattggaaaatagagtctttgggggagctgcaagcagttcctagagaatacagtacaagagagtggcgataagaggccaggcatggcgataagaagggtgtgcatggactggatatgaaggaccttgaatgctgtgttaagaagtttgttcttttgctgggcgcggtggctcacgcctgtgatcccagcactttgggaggccgaggcaggcagatcacgaggtcaggagatcgagaccatcctggctaacatggtgaaaccctgtctctactaaaaatacaaaaaattagttgggtatggtggtgggtgcctgtagtcccagccactcgggaggctgaggcaggagaatggcgtgaacccgggaagcagagcttgcagtgagccaagatcttgccactgcactccagcctgggcgacagagcgagactccatctcaaaaaaagaaaaagaagaagtttgttctttttaattctaaatgcagtgtagagtgattgaaggaattttaaaagggaatgcaccatgagattgtgtttcagaatgattatcaggacaacagtttgggaaattaagaaaacactaactttgcagatagggagaaaataggaagagattaacagattcaaggcaagaaatggtagtggccatagtgggcgagtaaagatggtaggaagtatagacatttgagagatttcaggagtttacatcagtaagactcaatgactgattggatttgcgggcaaaggagaaaagacaagaataatggaagatatcctaaatttctgactttcacaataaaattaataggtggcagtgtctcaattatttctagttgatcaattgaaagagaactgaggagttagagaaatttgattttagatcgcttgtacatgacatatctgtaggacatcttggagataatatccagcaattgaatacatgattccagggtttggggaaaagatcttggctagagaaatacattcagaagccagtagaggggtgatcattaaagccaaaggagtggataagctgtgtggagacaatctattattgatgagaacagggcccagggtgaaattttgtccagctgggacatttagaaaataggcaggggatttgtgacaattgctgcaattgctataattctagcagagtgcaatgaggatatagagaggtgagagactctcaaagtgatagggtctgagctgagccttaaggagtgggatctggaacaggcaactaaaagcaagaaagactttccaggcagagacaagggaagatgcttattttttgttgttgttgttgttaacaattataaacatttattaagcaccaagaatatactgtgatggttgctatatgaaaacataattatcaatatagtatccctgccattgagcttacaatctaaaatgaaatacaatgctatgagcctacctaaaaacttccttaacttagaaatggctactttggcaaatgagcaaggcaaaatgacctattattcaggtgcagtgttttaacctaaaacagtagtgctaggggacttgttaagagcacagattgaaagaagggaggtggaggggccacatcagatttttaatctgataaacttaggataggctagaaattgcatgtctaataagtttctaggtgataatgatgcagttggtccctggacaacattttgagaaatactttcatttaaaaacaagaagcaaacaaaatcctcctttccatatttaagaggcattcttgagacctaattgtatagtgtttgctaaatatctacatgtacaggttgagcatcccaaatatgaaaatctgaaatatgaaatgctccaaaatctgaaacattttgagtaccaacataacattcaaaggaaaggcttattggagcattttggatttcgggttttcggattagggatgctcaaccattaagtataatgcaaatattccaaaatccagaaaagtccaaaatctgaaacacttctggttctaagcacttcagataagggatattcaaactgtatttgccctgtctatataaactttaataatcacctcacagcccttgtaccagattgctgaaccaaattgtttcatttatctttatatctcaaagaacttccattcctgtaatcgttccagtcgtctttatacttatgatgcttcataaattccacctcttatcatgttccaggaaaggcataaactttgacctgggtgggatggtttgctttgtcttctttgagacactttcaagtaccttcttcatcttttcagccacaaaagtttatcatcaacctcacatacacagttagttcagagctgatgttcttgtcaagatagtaaagctcatctgccatttttacgtttattgatcttaccatgtgaaattttactataagcttaagcctacttaaggtatcattattttttattttctggaagggctgaaaacttgcactacgggtagcacagccagacaccagcctgtaacaatgacaatagcgacaaggatggcagaagctctcctgtactgagtacctaacaggtacccaataatgtctgtcattaggggctgcagagatgaaagacatgttcctcattctgaattaagtctccgtctagggcaatgggcaggaaaccagataacttactatataccgggataaggaatgtgattatggtaagggaatagataggaggggcgcctgtcccatttagggaagagatccaggcagacagtttccaggagatgacactggagctgacttttgaagatatggtaggagttagctgggggaaaaaaaaaagcatgatgcatttgctggagagggtgatagacaggagataaggctgggatcagatgatgaaggacccgcaaaacctgtaaactagataaggctaaatccacattatgacatgactcatatgcagccaacaatggtattttgtttgggtgataggtaccctaaaagcccttacatacactatgcatgtaacaaaattattcttataccccatacatttatgcaaataaaaaatacacaacagttcagaaaggaactacaaagaacatacaggcataactatagtatttgtcctgtattaatatccagttcccccaccttaggaattggagacctgtcaggtaaatgaagctaaataaatatctccagattggggctccttggatctctcatttcttctgtcatcttgcttctgcctcatctgccaagtatcttgtagatctagcgcaaatccatctaaagacttgcctttattgtgatagctgaaatggatcctatcaaggtgatgggaagttagacagtaccccacctgtctgcaattgctcagacatttagctttaaccatggtcctcatcagtgctatttcctgtattctggctgctgcttttgctcattttctgttggacagagttaggtaatgctggtatatgatgaggttcattctcctctgatgatgttctgcaaacacagcttctactgactagcaagacccctgcctgtttccttagtcatatctgatcattccaccagctgtagcttcctggggctacagtttaacaacattgttttctgattgttgttaacattgacacatagtaagagctactgattttttctatggaaatgtttattttttatttgaccccttcccagaaccctcaggagaatgtaaaagagaatttatattttcattcattatatcatcatgagaaaattgtttttctttttttttttaataagcccattcaggtttatatttttcttttccttttatcaaattttctttgaatgttaagagtctattataccgaatagtatattacttcaaggaattcaggaaataaaagacaagccaagaagcaagtgcagtacaaacctttgagtgggacccctttgaatggtatttacataacataagatgtagtaccgcagggactggaagttcctctgtgttcattagtgtgttatgctactacaatttgcatttagttttaatttgaattagtaaatgtgaattctctcacaatacactaaactagtttgtgtttgacactgggggcctggataaccaaagttgcatatgccatgtttaaaatatgtttagaattggaaccagtagtaaattgttagtgaaagaaaaaattatgaaactcccatttgtcttccatgaattgtgttctgggaactgttggaagcattcacaagcaatggctcagttaatcctcacaaaaatagctgggaactgtaatgtccctgtcttacagatgaggaaacttaaattcagagaaattaagaatgatggagcagagcagggattgaaatttagacccgaaggcactgtcttcagcaattttattcagaaatgtggctcctttaactagatggctgtcttccaggtcattgtaaacctccagagggaaggatagaattaggcagaactccaagctggcatcgtggtttgaggctaccaggagcaactttcatttctttggattttgctttcataaatcagagccattttcaaatctgccagtgccacctttgcacattgtcaagggaaaggacaaataacaaagctagtaaaaaatctttcaaatgatataatataaatatatatttatattacggtaatatataaatagatgtaggcatgtgttaacaggaaaaataagcaaacaaaacaaaaacaaacaaacaaaagacctctttaagatatgtaaagaggcttattctgagccagtaggaatgaccatggcctgtggaaacacagtctgaagaggtcctgagaaattgtcaccaatgtgggtgagttacagtttggttttatgcatatcagggagacaggcgtgcaggcaaagatataaatcaatacatggaaggcatgcattggtatcgcccaaaaaggtaggatatcttgaagcgggggcttataggtggattcagagattctttaatttgcagttggttaaaggaggaaagctttgtctagaaatttggaatcagcaaaaaagaatgcttaatataaggaagtctgttaaccaatacactgagacagagtgacttgtaagggtgtgtgacttaacccttgtctggcatggcgttaggtcctgtttataactcggtctcttagtgtcatgaagagtccatttcgttagtctgatgatctctattttaatattaatgctggtcagttgtgcctaaactccaagaaggaggtatcatgaggcatgtcccacctccctttccatcaccaccaaggacttcgtttttcaggtttctctggggcccccttgaccaagaggggtccgttcagttggtggggagcttcacattttaagtttacaaatatctagttaataattgaaaaattaaagcagagaaaagtgacaataacttatcctctcaaacatgtaaaatggagaaaagaatcagaattttttttaacaatgatctgttcactaagactcagtttcattgagaatatgcactgaataaccaaaggaatagatgttcaatgcactcactgaataaaggggaagaaccaaacactctttctagcatgttgcccattctggtgcaggttttaaattgcagttggagaattctcgttagaaactatttatttccctttacttccctcccttgttggtgtgaccacatggatgaaaactgaccttttttttttccgtgtgtgtgtgtgtgattctgtatcctctttctgaaatcttattgaatatcctattgcctatactatcattcaaaattaagtgttctagaacatgttgctgttgctcttttatggtcaactctggtgggaatttagaatctgtccatgtgccatgtgaagacgcatttaaaagaatacacacctatatacacgtgtgtaattggctgttgagattttaaagaatatataaaacttattattttcttttggccttgtttagtgataagagagaaaatccacaagttcagagggagatttcgaagtgatgtatcaaaatagatgacatgatttaataggtaattttaatttaacaggaaagtcagatagcttatcaccatacacatacacacatcttttgatgactatgaaaatagtatacgttctagtaaaccttttggagggttctgaaaagtgtgattaaaactttatccataatctcacaattcagttaacaccacttaatactttaggattttccttttttaaaaacagttattctgctttaaacagctaacccaacttatatttaaatggagaagagaactttttagctaaatgtagctgaatggatttcaaaacaaaacaaagcaaaacagccttctttgagttattgaaaccgggtgttgtcttgcttttcctcccatacttagcttacagaatattatctatatataatatacatagatagatataaaatatagtatttccccagtcataacttgatgtatattcccaaaaaatgtatatataggagagagatagagaggaacattttggtcgtggacggctactttttttttttttctttttgagactgaggctctctctgtcaccaggctggagtgcagtggcacgatcgcggcttacagcaacctctgcctcctgggttcaagcaattctcccaccttagcctcccaagtagctgggactacaggcacgtgccaccacgcccagctaatttttgtatttttagtagagacgggttcaccatgttggtcaagatggtctcgatctcttgacctcatgatccgcctgcctcggcctcccaaagtgctgggattacagacgtgagccaccatgcccagccagatggctggctaccttttaatgaaaaaaaaaaagatatataaaaacaacaaaatataattaatatttctcattagtttattttcaagattaggtgagattgtctccctttgtagtactttgtaggaagtttagctgtgttatttttcgttggactttttattaccagcaaaaagagaaatggtttagtgtgagagaatcattcataggttttatttcagttttaattcagacttatttgaaggttttgacagagagtatttctatataggcagtgttatctttccaaagtatttgatttctagaatctagatttttaatatgatagtcaaaaatcatattaaattttttgtcactctttagaatcatgacattcttctcagatacctgattattaactttgtattatgaaatcagaaaatgcagaaagatgccatttatgtggttcccattccagcctgaaagagagtataaagggatagcagctgggcacagtggctcatgcctataatccctgcactttggaggccaaggtgggtggatcgtttgagcccacaagtttgaaatgagactgggcaacatggcaaaaccccatctttacaaaaaaatacaaaaattagccaggcgtgcacctgtagtcccagctacctgggaggctaagatgggagaattgcttgagcaattctgagcctgggaagtccaggctgcagttagccatgatcactccactacactccagcctgggtgacagtgagatcttctcaaaaattaataaataaataaaattatagcaattgaaagtaaggctaacttgatctggacatcagcgattgtcacgtggtttcaacacattatagctttataggcgcatattttgttttcactgaagcgaagttgttaaacgtttgattttgtcctaatggtgaaaagaagacgtttcctgaaggagacaggattgcattatcattacaaaagtatccagcctctgtcgcacactcttttttaatagcgctgttgtcctatttgcatatgtaagaaaaagactgagagtcacccagcagcaagcaagtacctgtaaccacagagggcagggtctgtaacatcagggttgaaatggagaccatattgttttttaataaaagagtgaacagtcattatctttttccaattcatgaccccaaaatatacgcagtgtggatttacttccatgaatggtccatgatggctgctgtccattcgtacaacctggcctctactctttgcctcttaggtgcttttaaaacacacacacacacacacacacacacacacacacacacaccagaaatggaacacccatttttcaagactaataattccaagcttatctgttcagttcttagttcctttgtaggaaaagatcattctttgggagtgtgtgtgtatgtgtgtgtgtgtgtgtgtgtgtgtgtataagacagagagagagagggatatctgtgtgcaaacactagtttaactaaaggatatacttttattttacaaagacttgtctaaaatacctgttcctgacatgcaaacaaaaatagataatttgttcttttattcctaaatctatttaatttggtgtaattcagagtgatctttgaggatagaaagataatgcccaactgaagttaatattcttactgcctggaataagaataaagaattttagcagttcttaaaatatggagcagagcattagaatacctgcttttatgaaaaattttatacatttaaatttatataatgaaaatctttaggaaccaggccctagttaaacaggggaatcaaatatttatattactaaagttattaacaaaactttggagaccttattgcttatgggcaaaagcacagagtttgaaatattgattagagagtaagttctttaggagtcctagattttattttttcttgcttactgcctagagcaatgcctagcacctagcaaacactcaacaaatatttattaaatgactggatggatgggtggatggatggatggatggatggatggatggatggacggatgatgaatggatggatggataaaatatattaaaatctatacttggccatttacctaacattctatataaagcaccttctacatggtaagactcattattgcatttgttgtcattattttttacattagtataatgttttgactttattgaaacttatcaatttagggtcaaattatatccttatccattaggccttttccaataggccaatggtaaagtgtccaaataattttattttagaataagtaggaatgtcagcagtcatatagcctagctacttcaatatattgatatttgtttgggaattaaaaaccaaagagattaactgatttgcttaaagtctcatatgtgtacccccagaatctaaaataaaagttgaaaaagaaaaaaaatggtagcatgagaagtgtaagctttgtatatatgagaagttatgtccagatgattctacattaagtaacttactcattaattcagtaaactgttatgacgtgttcccataaatgtgtgaacttttccaagtatgggggaattcaaagatgagcggaccctaagctctaggagatactgattaaaggagtcatacttataaataagtgaatatgtaatttaacagaagggaacatgtgttatggtgaatgtataaacaaaaggttgagtgaacatgaagcatgaagcaactaacccaatctggaggtttgggtagagaaaatcagtattaagctgcaactggacaggtgacaggaggatcaaatggacttctctgtgtctgcaatgaaagaagtctgagctaagattttatttagaacttattaaatgctcataaaaggatcagatgaataatttaaatgagcaagtaaccaatgacattcattcaaaactgcgtaaacttatgcaagaatgcatgttttctgatatttctgctttgtggaagctcgcagtgtgatccataatcatgtcacatgctattttcacctttgatactgtgagatccttgaaggtggagtcttcatgttatccacctttgtatcctgaacactcagcagggtgcctggtgcattgtagatgtgcaatatatgttgttctgaattgacttacacccaccaaccactatattaaaaatagaaaataaaagaaaaaaaaacaagttgtgtgacttcctctagacacagttgtaatttactatctaggacagtctcaccaatcaagtatttatctccagaccttgagaagataatttaccttcaacaattattattaataccttttaccaacttgggactatggcaaaattgaacttatgaaaaatgcctgtcttttttcatccttggaccaattatagcgttcaaaaacaatctttttcaggtttccagatagcagtgtttttcaaatctcaggttgcaaacattgaatcattttatcaataatgtgcaagatagagacatgtccaaggttactgaaccaggatcataaatcaactccttgatgacatacctcacaagatttaaaaagagagatcatataacactttgcagatggaaagtcccataccagttgttgtatatcaaaagtgataccaaaaggcaatttcttagaaatatattaattatgtgattgaccagatccgaaagcatttagataacttggggataaaatgagcgttgataattattttaacattacattctagcaatgcatgtttgaatttgctgaataaagaaataggtttatatatttccactgttaacagaaaagcaataaaatactgcaagggaatttttcatttgttcttgaaatctgcttctaatgttcatttcactcccactaaaggcaggttattaccttggatttcctaaaatcagtgtatgctttaaaagtgaatattgagaattgtgggtactactaaatttaaaatacagaatgaccaatgccagatgaccctgactaaaataaactagaaaattgaagtgattataaagatcatttgcaggtcaaaaaataatttccccctcttagcctcttaagtccttcattttcctatctcctgattctgtctttcctatctcaactctccttattttcttaattctttgcacatagaaagattttgcttttcctgtcacctctgttagatgcatatacgggtactccaaacaccttgcttgataatttcagcttggcatcatcattacaggatgttaggctctatagcctgggtcaaatctcagggctaccactcactagctgaatgagctttagcaagttatctcaatgctctaagcctccattttctcataaataaagtatgagttgtagcattgttttgaaggttgagtaagatgatgcatataccatgcttaccaaacttaaaataagcataaactgttgttgttatcatgattaaccaatgcctcttccttctggtttagtgtaaaaagtgtggcacactgaactgacactggaccaaagatcagatcacttaccctgaggccctggctctgtgaccctgggcaagtcatttattccagaactctggttgtctcatctgtaagctgggaggcatagacaacactacattaaagagcccttccacatgtgttctaagtgaatacatgctccacatttttactcataacattcttgtagatcactggaattgtactcatttatcataaaagttatataagatataggaaaaaaagtggacccatgaaacctggtcatgtggtcagagccaaagagaatccagtttgatgtaaagttattttactcaagtactctgtggcagggattctgctgaggtagagtatttgagcagagcaccttgagaccaatgtcacagaaaatattccagcaaataattaatggtgtgtgtatatatattgccagctaccctgctggagcccagcaatctctcagaggagattagtggtccttacccatgtgtccaaccatttcaatacttgcttttctcaatgatcattatcctgaaataaatccaaattaaattttatgaaccaggattgaaattatgtgccttcagtatcgagccttctaatagcagttatttttattgaagtattaaagcaattggcttgagtcatcttggaaacactgctttcatatttcaaatatggttaggaggctgtcagcacatattaccagggattggagatatttgcttattaaatgatttttaccaggaaaaactcattacaggaaacatcttgtttacaagggtgtcctgaggatagcaaatggaaagaaacatgttacattgaattatagaagtaaaataagttgattcagctaatagattcaatggaaatataagatattattttgcaagtcaaagacaactgcaatttaatttaactgacagatttctactgtaggatgtaaacattagatagaaatatttacttgaaactgtagcgaccattacatgttattttgacattctagtttaggcatctatatccagtgatttttcaaatgttattattattattattatttgttttgcccatacaaagagaaaataaagcagaagcactaatgatgtttgatggtgggaaggatagaggagaggttaagagaacaagttgtcaatgagattagttttgagtttactccctggctttgtgaactttgggtagggatttaacctcttagagtttcaatgacctcatctataaaatggagataaaatatatttaatgtttactgtgtagtcaatggagatgatatgtgagtgaaacttagcatgatgcctaacacacatacacacacacaaaaattgagtaaacagaaatttcactacttctaaccattcagtttatgctttcagatcttaggacttggactcggcttacagatcctggaatttgcaaaacacattccctttttcatggtctcttttctacatgcctgatttctcacattttttatggcagctgaaatagcattttagtcatctttgtgtgcctcccttcccaaatccatggacagtgtaagtactgaaaacatttgggtagatgaatggaagaaaacaaaatgaacaaagagagccccgaagtcccccaagaggacacaatggagataccgactgcaaagcaggcatctggaatgccagctcagatggcctgcttgtccccaggaaaagctgtgagaaaggatattattggcaccagaaaagtcttactaatgtcagtaaagacagaacttgggtccaaagcattctctcagtgtgatggtgttcacatatgccttgtgtgcctttagaacataacttaagtgcgatagtatgaactgctacagtccaaaccttgtagagcattgaacatccatgcagaacagttagaagaagagggacttctggtgaaacagagcccacaatgagggtcagaatgtcatgagtaagttatcatatttggaatcgtgatgtttcctaataagaggaccaagccctgtaagtctgagcctcgatttttactcagaatcctagagaaaaatgcttagtcagaggctaacaaggtcttagcctccttgacccacagagaagaaatacaggaagggttaatacatcccagttggccaaacctgcagaagcagtcaccccctcccagtgtaccttgtagtttgaccatggcacttcacacacttcgcacgttctatctcctgtttgacttttttgagggtgttttctgtccacactagactgaatctctgagactggaatggtatcttcaccatttttctggtgtcgcatcactcagcatgctgccctgttcccagtcacctcaggaaaaaaggtataggccaggataacaggaagcacatggagtttggagtcccaaacactctgtatcatgaacttccttcccaatcctcccaaccaagcccttcttggtgccccttatctcagagaacagtgccatctgcctctaagttgctcaagtattaaaggcggatgcatccaggtgccctcttcccttcctacacaaatccagccaatcacttccagtcaatcatgtttccttagcatctctggaactggtccacttaattctatttgcctaatttaccccaccatcatttcttgcctgtattattgcagcaaggactgatatccttttccccccttgtccttctagcccactcttcaatttgcagccagcgtgagcatttgctgtcacaaatctgaccatctttctctttagttagctttgaagtctcagctttttagtgtgtcttccaaaccccttcttgttctgactcctgctgaccttccagcttcatttctcacctcaacctacctccttccccagaagtactgggatattcttagctccttaaatgcaatatacttttcttatttgatgtcttttatcctctccacctgcaacatttttctttctctgctctctgtcctctttctttttctttttctcccttctgataggaagcattctttgatatccacgctcctaataaatgtggtttagctgctgctcttaaaactacactttgggaccagcatggattagggatatttttccctagaagaagagatatctaagttgaaacacaaagaataagtaggatcaaatgaagcagaaagagagagatcagcagtatatatatatatatatgtttattgaatgagtaaataaacgaatgaagacaatttgacaagaagcacctgtaaagcatatcactgagaccttggtgttctgttggtagcttctctttctgaaggcataaggtaaaactgtccaaatataaatttccctcctagtttgctcactctccagaaagctctgagcattttgaaatatattcttatgatagctcattttataacataaggaaactaaagctgcctggccttatggatggagccacatagttatagataagtcagacaccaagataaagagcatttccatgaagtgaggtagaggcaggtgtggaatccaagcttactgaatggtctaatgctgacttttttacacctagaatacctttgtgaaaatgaaatatatcaagaaatgaggacatttaaggaaggcaggcagcagaaatatgtatatcaaaaagctgaaataattggatgagctattctctatgaaaaccacatttttatcataactggaaaagatctgttataaactgaacaacagagaaatgttaagaccttttatatctgtcccccttgacactacactgagagctatgctgttgttatgttttccgaatccctctgtggcttctcttgtaagtgagcaggacactacagaagctgacatgcgaagggccctgataaaccagaatgctttttccatacagtaaattcgaatggttatttgagctcaacagtgttttctctggtgtttgaaaagcaaaaatagaaggatccaccaaacactgcaagtcatggaaactatagacgaattgggtgagttgagggccctgtgatggcagagagatgtctttatccgaggcaatggtgcacaggtagacaagcacactacagcagctctgagacatttccagagccttccttcgaaagggcatccctaaacaacctgagtctgtagaggtggataatggtgtgtgcattatgagtatgcacacaaaggagaatgtctgttatccttagtgcagagtaagtaacataaagtctagtggaaataaaaatatataaatttaattgtatgacataatttgttggctatagacattccctttcacttctttctttttccattttttctttcttttttattgacccgcttttcctccattcagtgtggaaggataagcactgaacagagccatactagagcaatctacagggacttgtttcaaattcaaaaattgggtgacccaaggttctaaagtctgtcagatgaatttgaataatgcaggtattggcactctatggcagccacaaatgtggcagaggtaatgagttttggaagctcccctgagcctcaggcagaattacaatgtcaatcaagtttatttccttccaaacctccttttctttacccagggatggatttgctttagttggatgtccaaagttcttgacttactataaagaagtaaaaagtggattggatttggagacatataacatgagtttgaacccaatccagtcaatcattgcttgggtgatcttgggtaattcacttaaatttgctgcttctcaatctcccaacctatagattaaaaagtcactcatttattcatcaaacaaatagttctgaaaacttagtacatgtcaggtattagaactgtattttttatgattttttaaaaacatcatttaccccaagagtaagtaggtaaaatgtaaagtataataggaagagcattactgagatcaagttaagtgagataaagtatccagtacttgcttacttcacagttaacacttacggcatattgctacatcctcaagcctactttaaaaaaaaaaatcattgtattccccttgtaagaattaaacctcccatctcttcagtgctgcaactctcattaaggtatcaatctgattacctaagtgaagaacagtaatttacccttaggggaatttatgctcccataaataatttactatttttaaacgggagctttttaactctaatggaagtcagctcaaggcaaccaataactactaagcacctactatgttttaagtcatgtggagatgtaatccccaccttcatgagttttgaaatctataagatttgtaaaaataatatatcaacccattaaaatttaaaaagctaaattttgaaagcaacaaaagttttaaatgattgatattacaaaggattctatgggaccctatgtaatttcaagtaagttatgtgtcgtgcaaccattactggaataagtgttgaaagaaaggagaaatcattttcttggtggaaaatattagggaggcacaggagaatttaatgaatgttgccacctgagtaactcacccacctagagattgcccccacttcttccattaataccctcacatagctcttcatgcgagtcagattccattcaccagttctcttctcacttcataaatttttttcaacatccttagcttagcaaaataaagatcatcactgttaccaattagatcaaatacttaaaaggccaaagcaaagctcagtcttaacaaataagagaattatgaatctatgaacttggagggaatcttgtaggtaaacacaaagtatgataaatagcagcaagtctttatgaagcacattaacataaaatgacttatttgatcccctcaccaactctgaaaatgggaaagggcaaagaaaggtcatttttccacgaccctcagctggtagctagtgggtatggcatccacccaatgcttgtgtcctatctaccatttaaaaatgtcatgtaggagaaaaacttgctatgctctttcttagaaattgagagtcacaaaaaggtatagtatgtattagtacaggagttaaatgtggactaggttcttgccactcaaagtgtggcccacaaactagcagcatccgcattacttgggagcttgtgaaaacacaaacaactggccccatcccagaattcctgaaccagaagcagcagtttaacaagatccccaggtgattcttatgtgcaataaatctgagaagcactagcgtgtgtaggttctacatctctgagttggatacaacacaactcagaattgtgcaaataatgtaatatacaagaaaacactttttatatgaaaaaatactatataagacttcataaaataacaattattattctaatgtataataacccagtcattcatatcagcatattgtcctacagttgaatataaataacacaaatagctggaactcttgggaacttgaaggtaatcaaactagacttagttcaggtataatatttatcccagatgagattataaatttatattaagatgccaatttagcaaatatctcatgatgcaggttgcattttagcttattatgggaggatttttttattgcgatttttttttacagctactctgctcttcaggattattttagtgttgtttttaggccagtaagaaatatcaattataacatattgtaacccactaaaatatgccttttaaaatcgtagattctcttccatttttttcctccttcacatttacatggcaaaaggtttatatcttcaagatctaaaacaaaaagacatggaagttaacaagagcagtgtgaagcctgaagcctggagtgctgacctctcattcagtgctccttcctcccctccactggggctaaaaactttgccaacatgtaccatgtgactgcaactgaatctgcaatggcatgcattggtattttcacagagagcaaggctatcagccttggaatcaaaagaccttggccgaagtcccagctttgctcattttaaacttgagtctcacagatcttttgcccttcccacctcaatttcacaacccaaaaaaaagggcaccagaagcaatggtatttaagaaataaaagggaaattttaaactctgccttttaagacgttctgtaaagacctttggttttctcctgaggttttaacacattatgcctatactgatcatcaaacccaaattattttcccattcttttaaagtatgtatcttctgcacccaatatcattttgttcagtaagctttctgcagatattcaaaaaagtaccccccaaaagcattgagtatttttctccctgtgttctccttctcagccacctttgtggctcctctgccctttcttgtcccttgagcgctggtgtccccagggcactgcattggtcctttagtccggctccctgggggtacacctctaaattatgccttctaactaccaagaatttccactctgcatctgcaggtcaaacgtctctcctgatgccacttccacaaatccacctacctacaaggcatttttggtggtaacctatagtcaccccaaaacatgccagaaactgagctcacccttctcatcccacaacctgctcctccttcttttctcgagttttctattaatggcctcatcattctcctaatgacccaagccagaaacgagttatcatctggattctgctctctcctacaccttttaaataccactgagcagacatgctgcaggttttaccatgtaaatatctcaaattactctataccttttccacagctttcattcaagcttttgttaattttcacatgaacagtaaccacctttctctctgcctccagccttgccttctcctaaaatcgaaaaaagcctaaaactaatcttcatattttatcaaatgtagatccccaagcccaaaacatttaattcagtgcagggtgtggagagaatttgtctttaacaactgcactcctggggcagcaatacaggtcagaccaggagaactgacctaatctgttctctaccataagaggataactcttctgatacgcaaatctgattaaccatgccacttccctgcttttaactcttcagtgactgctatttccatttaggataaagtccaaagtccttgacatagacattcgccacctgtcctctgcctccctttagagacttgtcttctgccacacccccacccatacatgctattgtgagtgcatgttgcctgcacaggaacaagaggggtagagagaaaagaggcaagggagggatccagtactgactaagaacacactccacattcactcatttgatcctcacaggtgctaccatctccattcgaaggatgaggaaagaagcccaaagaagtagggtagcatgcctgggcttcagaggcagtgacagaatcgagactaaagccaagatgatccaacatcaaaacacctttggcttttccatatctctgccataggacatacttcagaaaaacgggatatgtcaaactatatattatgtcaattatggccaaatgaaacagggtaaacttaagtaagataaggagaaacctggcaagtcctagcattattgtggactgctgaaaaaccagagaacagatcaagacaacagtagtcacaatataaagatactttttaagcagatccttcagaaaggtcataaatgtcagagaacaagttatagatctgaaaggggtaatgaatatggatataggtatagatatagatacatatagatacagatatagagatagatataaatataatatagatatagacatagatatatagatactgcaaatgccaaacatgtgatccaacaggtacacctatagagtgagaacaattgtgatgttgcagtgtctacccaaccacacccacaccccaaatgtgatagtactgttggacacacctcattgacaaagaattcagtatcttttctgttgctgcaaagtcttctatgaatactttgtgaggctgctcaaatcatatttgccccaggacaaatcagtacagggctcagtgtcataccaactaatttgaataaaacaataagtgtgcctatttatattcagacccatgcccaggagctcccagaggtgtggtaagtgttgctttggaacagacataaaatatacatagttctcatttaagctactgcatatttttctggtgcctctcacagctatattgatagccatggttctaagtaattagatgagtgctggagaaaggaattaagtgttaacattttatatcctcagattggcgaggtttcttccagagctaattaaatcagtgtaattcaattcagttttgaaaacctacctatcctgattacccactatgcgcgaggagctgtgttagaagctatggggcagacgtggatataaggtggtcagagaggctgatgagtgtagtggttaagcaaacgaaaaagatcctggggccaagactcctaaatctgaagctccgttctgcccctctttagatgtatggctttgggcaaggtgattttacctgcctgggccttagcattctcatctataaaagggaatgtgtcccttcttcataaagcttaagggactgaataagttattgcctgtaaaactgttattataatcccaatcctcaagccatttattttctagagagagagagaaaagctcaaaggaaggtaaaaatgggcattgcttttggaacctggagaataaagagaaagaacacctccaactggaggctgaatcatagaaaccttcgtgataggagtcaaagcccaggtgggcttgaaaggatggagagtgggagtagaaatagccgtgggaggagactctaggtgcagagaatgggagaagtaatggcccagggagtgttctcacaacagtgggcagtggagactggcaggagcatagaggtataaaggaaaccaggaaataactacggctggaaaaccaagtcaaagccccattgcagaatctttggtgccttgctaagtattcccaacaatagagggcattgaaggacttggaggaggagactggtttgactcctgctgtgacttgggaagttccccctaacagcagtgtgcacactacactggaggaatgaaaactggaaggcaggaagacagtaggcagtaggtatcacgtcagccatgtgagacataagtgagctttgactggtacagtgatagttgaaagaggtgtgaaagaagttgcagaattgggccatgattgaatgtgcacacagcaggaaagggggagtcaaggataactgagagctcaacatggggaggctgggaagatggaaattaccatggactaagagaaagaacacagagtacccataatatgtaattctaacacccattccccactaacctgccaatattgagttcactgccaaatcttaaaggcagacagccatttggctaatggtcagtaagcccaatttcctgccagatattagggcttgcttaagagtttgcctcatagtgtttgagaaatgatacgcaacctctccatggaacatgcattttgtaatagcaaaattatcaagagccttttcagtgctacaattgagatactagctgtgaatcaatgttcaaaaaaatcttaataaattgtttcagatgttactaggaaggatatttctggagtgtcaattagacacaattatagtttgagttgaataattaccctttcttgtacatattttgatgatgctttaaaaaaaaaaaaagactaatctgagaagaaaaagatgataactcacatgccattaactcctttaaagagaacacaattcataaatgaaatgcctaatttaaatgcaatttagaaaaacattcccaaggataagcattcaaaatccagcctaactttcagcaaacagaggggaaggacagaagcaggcaggagagaatgagtaacaagggaaaagagaaacagaaaatgagagcaagtaattaggatgtaattagaagatttaggggagaataagaagaaaaataagacagagggagtgaagataaactctgtaagtggtaaaattttaccacttcgtatctcaactcaggagtggcaggtgagatgttagtgaagatcatacaagtagttaggtctgggttcacacctcagcgcatccatttgctactacaatcttgggcatctccattgacatgtgtgtaaaacaaggataattacaagacatagcatatggcagcttttattaatactcatctttaagatgcgtcttatctttaccactatcccccaatattaattcaccctactctgttccatccagatgttccctaacccagtaccacaaccctttctcactcccacctgtaggtatgtactagtgctttcctccgacctggcatgtataatatatcttgggagacatctatgctgatatacacatacctaggcagagatgacaaacagaaacaaattataagtgtctgtgtcctggagtcagatgatttgggtagggattccacatcaactacttactagccctgagacattgggcatatcactcattctttctgagcctcagattcctcacttgttgaaaaagtggtgggcagtaaagattagtgggagcatagagatgcaaaggaaaccagtatattcatccgttttcacaccactgatgaagacatatctaagactgggtaatttataaagaaaaagagatttaatggactcacagctccacgtggttggggaggcttcacaatcatggcagaaggcaaactgcaaatcttacacagcagcaggcaagagagaatgagaaccaagtgaaagaggaaaccccttataaaaccatcagatctcatgagacttaatttactaccacgagaacggtttggaggaaactgccctcatgattcaattatctcccaccaggtccctcccacaacacatgggaatcatggaagctacaattcaaggtgagatttgggtggggacacagccaaacaatatcaaccaggaaacaactaagactagaaaatcaagttgaagctccattatggaagcgtatgcgagaattaccctgccaatatatacttacatgtctaagataaggtctatgctcaataaatggtcactagtactaattaaaaggtaaacaataatatgttctaggtcctgtgagaaatcttctcaagcaaatcctgcccataccaatgtcaccattctctaagacttgctatgcttgttacattatcatcaaccaataacttagcctgtgctgtcttatatctcatccactagcctacccattttggtgctttatgacagtttatataggcaatatatatttaaataataatcctgctcttttttatgtgcagtaatccccctttatttgaggttttgttttctgcagtttcagtttcttatagccaatcatggtccgaaaatattccatacgataagatattttgagagagcaagacagaaatcacattcacataacttttattgaagtatattgttataattgttctattttattattagttattgctgttaatcacttactatgcctaatttatacattaaaccttaccatagccatgtgtatacaagaaaaaaatgtagtatacatagggtttggtgctctctgcagtttcaggcatccaccaagggtcttgcaatgtatatcctctgtggataaggagagattactatatgtatcttatggtcttatatcctatataagtcacagataggaagtaaagcatttacaagcaccagggccagctacataatttttgagggccaattcaaaatgaaaaatgtagagcccttgttcaacaattattaggaatttgaagatggcaaccacaggatattaaagtgtggggcccttccatgcactgcatgggttgcaggcccattaaaccatccgtggtaagcacaacacctggtgaagtgttagatacataattaactttcagtaaacacttactgcttcactaatgaaaacatgcataacctttttttggtgaaatcttcacagccactccaggcctcttggtctggatcctacaagtactaaacatagcccttttttcttcgtttcgttcatgtatatatgggactcaaaataactaacctagaagcaaaacaaatttgtcaattattttttaattttggaacactgattcaaagttttattttcacaaataattataacaaaagatatcttcccagatgactcaattgacattcttaactttttacccttaagttctctctattctagggagaacagtactgtgataaatcgtatttcattatctgccagaaagaattgattaattttaccaagccagtgcctgcccccacagagctgtgtcctgaaaattatgccctttgggtttataatagcagcagatgatgagttaagatgtttgtttaaggtgtttgcctcagtgaatcatattttattaaatgcaaatattctcacctctaccatacattttgtaagcttccttactcttgcacgcataaggctcttatacttttctttttttcaaatcatgattcaaagagcagagagaaaaatctaacaaatgaagcagatgcatccacaaccatttcctcatctgttcactcttccttcaaagataagagtgtttaaaaatccctttaggctttcagtttatttctgatctttgtgttttcaatcactgacagaggtagattggcatatgtccttggtgttcatagacacagttaaagttttctacttttgctgtatacagttaaggtttctaatgtgctgtggccatttacatgtcttattagcatgttgacatatatttttaacaagacttggtattctcagtaattgccattcactttcctgagcacctgtataccagagctcatcagattcatcatttagttaggccatttggaattgaactgtgatgaagtcttatgcagcagacaagaagacatgtaaagagtatggccattcatcagaaaacagcagtactatctaaggagccatgcacaagactagggtgtcagctagaatattctgcacttcagtttaaaaaaaccaactcaaactggctttcataattgtattagtccattttcacactgctgataaacgcatacctgagactgggtaatttatatggaaaaagaggtttgagtgactcacagttccacatggctgggggcctcacaatcatgatgaaggcaaggaggagcaaaggcatgtcttacatggcggcaggcaagagaagaatgggagccaagcaaaaggggaaaccactcataaaaccgtcagatctcataagacttattcactactacaaggacggtatgggagaaaccacccccatgattcaattatttcccactggctccctcccacaacacatgggaattatgggagctttaattcaagatgagatttgggtggggacacagccaaaccatatcaatactgaaagaaatttattgcctctcaaaactgaggagtcaagagagaaagtaagctgccggtgaagctggattcagtggctcagcagtgtcacctggaaccagagtcactgcacctctgctctgctttgtaggaggtggtctctccctgagactggccaccttggggttgcaagctggctgccagcagtatctgaggctagctgcttcctcattcatgtccagcaggaaacacagtcttgttaaattgctccttgagaaccaatcagctgctttgcaaggatccctcagcaaatgtttcttctcatctttctgtctcagaatgggactgcgcccagccctgtgacacactcagtggctggggcttgagtgtgttgttggctggctcacaacagtgagggctaccctggcacctgaagaatcagtgtcacccaagctgctctgcctggaaatccagggttctgttagtaagcgaaaggagggaatggagaggagatgactgccatttttagtttctctttttagtcatctacttggatgttaggaaacttaagaatttaggaatttgggtcaaatttttttctcctacatctgttatctagttttttttcttctgcattttcagttagacagctggacattgagcatatatatgttgtgattcttcatttgttcaggaagtagttcattttatggatagtttaagtaagttaaattcagtattaaaaccactcatatttaattttctttaatgacaccatggacatggacaataagggttacatgttggggtacagagaccagagtcgtccaagaaatagcctctttcacctttggttgtttctctcaggatagaaatagctcaccatgaagcttatttctggagtgagaattttttaaaaccttttattttcttccaaataaatttaagatgatctgaatcattatttttctcaccatctatttatgacttaactaaagctactgtatataaaatattgtgccagtattgatgggagacatcagttttcttttgtgctaaccacttttttgttaatttttattatgggaatttttaatcatatgcaaaaataggtggaacagtatctggcgaactcctattttcttattatcctgttttgataattatctacagtcgtgctggccagttttgtttcatctccatccccctacttccttccacctccacctcccttgactccctgtaggatttttttcaagcaagtctcagacattatatcatttttcccctaaattctcatgtatgtatctccaagaaatagaaactctttttaaaaaaacaataaccaaaataccatcatcacatctttaaaacatttttaaaaataatcccttagtcaaatccacaataagtgttcaaattttatgggaggtatttttaaaaggtagctttattccctatacttgacttgataatctagttcagagggatgagaattacattcacaaaaggattagaaaagttatattccaatcaagcactagattgccaagtagcaatgcaactgctctgcaaggtcactgaagggctgggtggttcaagagagcccttggagaaaatggcaggactacagtgcaacttcacaccgagccttggaaaggcattgcataatcttaattttcttaaaattggaggcaggatttaggacacttggaaaggcattacataatcttaattttcttaaaactagaggcaggacttaggacaatcagatacagtatagatgactagataaaaatgagaataaatatgcagtgtgtagagggtgttgggagagtgatctgaccagtgattgagtgtgaagcaattacagtacttaaatttgcaagaaagatattaactcttatctatgagatgccacatgaaaagcagagaaacaaagaagaaaaataaagcacttacaagactttagatcactgaccacctggttggagccttaacttcatcacataccaacatgtgaacttgaaaaaacagcttgacaactttgaatactcgttttatattatctataaaactgtatctattgaaataatgtcattagtcctgtgttacttacatagcacattcccagtaataagctacttaatattgggatacaactttgtagtttgcacattacttccagactcatcacctttattttttttctttgtacccagcgaggtagatctcattatcccaatttccaaatgagaaaactcaggcctcaagagtgatttgtcactgtcacatacaagttataattgaaaggtattgttattgttattcttgtatgattaagcaaacagtctagagaaagcaaaatactgacatacatctctggatagaagactttccacaatgtgaaagtgtaacaagcagtaaagaaccacgtgaaagtcacatccagttaaattttctgattcagggttttaaaatggctattagtgcaaaataaatcttacagtccttatactgagatcttcctcttcctgggataataattgggatgatttctacagtgatagagcggataacagggatagaataacttaaagaatctcatcataactattatctctcactctgctacctatggacagggcaaaattcctccaaatgaagtgaaaataaattgattttttttttacaaaataaactaactagggatttctggaaatatagtgaaacatagaatttagtagcatttaataattctattttaatatagataggatttagagtttaaataaattaacaccattgccattctgttcttcaaagttgtattcatgaaaactaatactagcactatggaacagagtgtggagattttttaaagaactaaaagtagaactaccattcaatccagcatccccactcctgggtatcttcccagaggaaaaaaagtcactatacaaaaaagatagctgcacatacatgtttatagcagcacaattcacaattgcaaaaatatggaaccagcccaaatgcctatcagtcaacgagtggataaagaaattgtgatatatgtatgtgtgtgtgtgtgtatatatatataatggaatactattcatatatatatgtatacatatatgtatacatatatatatacacatatatatatatatatacataatggaatactattcagccataaaaaggaatgaatatggcatttgcagtaaccctgatggaattggagactattattctaagtgaagtaactcaggaatggaaaaccaaacatcgtatgttctcacttgtaagtgggagctaagctatgaggatgcaaaagcataagaatgacacgatggactttggggactcaggggaaatggtgggagggggtgagggataaaagactacaaattgagttcactacataccgcttaggtgatgggtgcaccaaaatcccacaaatcaccactaaagaacttactcatataaccaaataccacctcttccccaaaaatctatggaaataaaaattttttttaaattatatccatgaatgcttttgggtcttgctaggtatgctatagtgctacaaagctagcatttatcactatttttacaaaactaaactccaattatttgtactttaacaatagtttctttgaccaaaattatatattagatcagaataatatgattctgttgcagggggataatagctacttgcttgatcaaatcatcttctattcttattttctcccatagggtataattgacctcctaatagtaaatttacaaatacatattttgtgtatatgaatttatttatttatacatacagaagagctttcaggaagaaaatttttcatgtattcccaagtataagctttaaaaagtagggcacgttaaatttcttctgctaattgattcttggctacgttgtactctatgatctatgcaagcaaaattgatgtgaatgtgagacctccctgtcgataatgggatccctacctgactcctagcactggataatggaggagcccttggttatcgtcatcccatgtcgaactttgtgatttcacacttcataatgcaagagtattactttaaaatgcattaaacttctaaagatagcaaatagccttttggataatgcattttaaatagactctaaattcagaattttaaaaaatgttcgtattgtaagacatcataatagctcttatatcgcatcctgttgctatgccctactctcttttcctaggctttgccttcttcctcagaagatagcctgtcgttgcaaacccattcatgttgcaacctgagcctgaattccactctccataataggcctgcgcctcatcctttttcatttttagaagtcatctctctgtcagtagaactgattgggtattgtttaatatggagaggtcttataaatagctttcctggctaaaaattgaacatagagatttcaaatcagccccctccccctgcaccatacattatagctatctgttttgtaatcttttttattagagaagatgacagcacatcctgacataaatcatcactcataataatacaatacatattttaatctcctcagaagcattaagctgtagtacactgttgtcaaagaatgctgacatccaaaggactcataataaatatttgaaacctgaaaacatttagttttaaattttcatcaaatatgtatttagtccaaatacattaaaattccataaccaagtttaagaacttaattatgaattacctacaatgatcaaagttattttggtaaagttgatttctcagcttcaagtgctaaatggaataaaatgagcatggacttaatagaataataaattaaataatcatccatttggaagttgctatctacttcttcataaaatctagatttcatctctttatcgagagttaggtaaaattagactctagatgttttttccatttatattatcagccagccaaattttaaatggtgcatagttaataatgttatggaagtttgaagtctttccaaatttggttcatttaatttctgacaacttatggtccaaagtatttagaataaagaatagaaatatttggaatattgcctggttgcttataggagaaaagctgttcttgtgtagtcataacagtgttaaggggtgaacagagagagagagtgcaagagggcgtgtcccaagttaaggtccctctgaatgaaatttctgattttattttagctaaatgattaactaaagatggacgagaagattcttcaaaatctcctttttcaccctacctcattatgtttaaatggtcatctaagaaattatggatactatatttaaattcatgagaactagatatcagtgcttttaaacaatgtcttcatttttcaagctacattacagcaaggagaatgaaaaggaatgtggaataggagagagttgaggacaaaagagtgtatggaaggagaagggtaggaattttctagacaaacaaatgtggagggaagggagagtgttccaggcagaaggaacagcacgtgcaatcatggaaatatgagaagggctggaagatttgaggagctgcaagtcttgctagagcaaaatagcgggtatgagggaagaggaagaggaaggtaacagaagactatctgtcatatttaaagggctttgtaaactacagaggagttctatatcttaagtcttataaacaggaaatacccattcaaaatttgagtgaagaagttgactaataatagtaatgccaattgcttattcaataccttttattttactgtcagttgttatctattccataacagttttatttattctcactatatcataggttacacataaaatgcttatataatatttagctatagtaagtgtttgtacataaattatcttccagccttacagcaacttgcgagataggcattatcatcactggttgtcataggatgttcagaagattaagtgatttgaccaagacaactcagccagtaaatgacagagccaaacgttgtacttgggtccctctggctccaaaacctgccctctttacattctatgacaacgtcattcttgcattctataaacatatattgtgccccttctgtgatactggatggaggcttatcactctctgctatctcggagattctatttggctgtctttaggtcagcgtgctcacgcatagatttgttggctgttaaagcagggagaagacagcttgagggaaacagtccaggtgggggtggagcccgtaatgttgggggccagggaggagaccataaatgaaacaatatcatcattcccctaataacatttttatgtcttccaagtagtgctaagttcccagcatattctggacctacctaataagtaaatcttttcgggccagagccacattatgactttcatgggccctgggcacttttgccttcatgggcaccttcctccatgaaagaaaaaagtatatatatttattatattttatctacatatttatttatatgtccatatattataaatacatatttgtatatgcatttatatatttataaatatatataaaatatatattatatataattatattttacaactgaattggagtaaaggcgaatatagatgggattcatgattttacattaattattatattcattttttattctgattttaaaagattaaagtgaaaacactttcgtgggccctgggtgctgtgggtaagtaggccctggtgaagactggaatgttatgtgtctccatatggtaaaataatgcaaagttaatgccggaaggcattaccctccgtgggcgtggggatagaagttggaccagggtaagttccacttatgacaacagtttcgtaagaggcttaggcaagtgggagccgctattaaggaaggcagactttaaattattacacaattaaattgtagttttgtctttcatgaaggcttgagcaagtttacctttttgacaagcttatttactacaggataggaaacaacgtttgcaatatcacttttaaaagaaaagcaacagctttcaagaaatgatttcctctgttgatgcagttgcaataattttcaatatctcatttgtggtgcagaaaaatgaaatacctcagccttggaaaatgaacgcagagtgagatcacaaattgatcttggcaggaaagaggcaggcaaaggattttaaatactttaaagtactctgcacctccaaaacactgtcactctgaaagtacagtaatcaggggtggtatttagaatgccgaaagatatacaagagatggagaaagccaatactaaaatcttaaaatactagaactcagagggttagagggttaacttctggaagattaaaaggacagttattgtgtctctgtgaatacttaataaggccagaaaacataccgagccagaaataaacagatgcaaagagcatagagatgtgactgactcttccacaacaaattacaaaggcatattagaaagcactgctacaaaggaatgaatcctttgtatcccttgcgggatcctgagaaacatgccattgggagagtggttgattgggctaagggtcctggtttttgaatcagattcacactccctggagatccacagagaacgtcacagagagaacacgtggctgcaggagccttatgtgctgagcccactttgatgttgctggagagtcctactccagcatcttcctattttctcagttccagagaaaatgaaaaaaaatgaacttttgctttagagtgaagggaagttggatgagaagtgaagactggaagttgggcaggcgggacctctggggatgaactttcacctgtcacagtttcaacttattttgtggcacagagttgattaaaagagctttcctttggcactgctactgttggaggcaagaaaaggaaatgctaatttctggaaactagaattgctgcccctaaaagcacaagaaataatgagtgctctgaaagaaaacacagacaggcacgtgatcctcaaccagaaagcaacacacaagcaatggcatcagcagttattgaaatcctagcctctttttctgatgccaaggaagagcagataaaaatcaacctatgttccttggatggaaatcaaattctcatgcttgatggttttcaccactaatttcattgaaatggccccgtgctaacttgggctttctgaaagtattcatgccagtaactcagcctccgaagggtgccagagggactgagctggttgggctgagtggtgaggttgtgaggtggctgctggctgcctggcagtctcagagcccagtagccgctgtgtgctggccattggggagagattctgatggtgacatactgagagtgattaaatctgtttggaaagttagccagaaggcagagaaattgaaaagggaatgtagttcattccttttgggcactgacttttccccataagtattaactctttgctatcctcaaaatcagactggattttcacgttttcaaatttgaaactcatggaaaatgccagactgaaaactatcaaagtgtttgcaaatgctgaagagaatgggaataaagccatgagagttttcagtaaattgaatttgcttaggtagattgtaacaactctcttgtgagggcatttgagccatcatgtttaatttgggccatttaacaaagatcctgggagtggagaattgaaaagagtgggacttacaggctttctctgggattgtgttgttttctgcctactccatgtccagagtgcgaggaaataaatctaggatgttcttaatgtttggaggctcagtttcttaagacgttggctctttagttgcttatttgtgtagtccctgtgaaaataagtgtgcctttttaatttagctgagtgttatttcattgtctttgattcttttcacctgagtatggttgggtttgcagaagcccaagtgtacaacctgttagcctctttggtcatgcagaaaggcccttcaccaccattgggacctaacagtactgattctgctactgaagtactgattctgctactgatggtctcaataaatcagtaagactgaatttctcatcctatagcaaatttacccttacacgcaagaccattgaaaacacagccagcgcaacatagattttagacctactttttatggtatgtttatgtcatttattttacctctgttttctggatgttctcaaatgaaacattaggagacttttcaggaaaaacagaaggctgttacattttgactatgagaacacctgggaagagtaagggtgcataagcgaagcagcttattaagtgcttcagtaaaagtaagggaactaatttgtcacactgcatgacattcaaaagaacaaatgcctcctagactaaaatgctaaggaagggaactctagggagaatggaaaattccaaagtatattcatgataagagatgcctgaattgtaaaaagggattttgctagggggtaaaaccaagacatttgtcctttccctgcattttagttgttaccagcttgagtttcttgaggccctagtttatcatctcagatttcctaacacttttcatggcatgtagctgcagattagtatgaaaagcacaactgcgtgcttcagtgagcctctacttgattcttaaaatgacagtgatctggaaggaaggaatcccctctgttaccccaaagtgcaaaaaccatgaaactacaaagtcccgtggcagaagctccatatggaaggtgtactagctgtacaggagtgaagcccataaacaattgtgttaagtgctgaaaacgtggaattgatgagcattttcaatttttttttaggaggccaggtatttggatgaatagtttggaaagacagtgagcattgtttaaatgccccccaaattgcacacacagagtcctagcagcagcaacttgccctcaggcacaggggcaatgattaaagaaggttttcttagattgtagtgttatggaatcattataatcaaatctacctgaggaacctacccaccagaagacaaaaaaaacaagtaagatatcactgaaatcttttttttttcccaaataaaaatgcgtatctcatagattccatatggtgagaagggagatgatttgagagattatctcaatagtacatattaactgctcttacgagatgatcgagtgatcttattcagtatattattaaatttctctatctgtaaaatataattaatagcttaccattttcatggtaatgtttaaagataatgaaaaaatgataatcacaaaatgttttcagatactctaaagcagaggtcaacaaattatagccatcagctaaattctgcctgatacttgctttggtaaataaagttttcttgaaactcagccatacttattcattaacatattctctatgggtcctttcccaagagctgagtgcttgtgacatagaacatgtgtcccacaaaacagaaaatattgctctctggctctttacattaaaatgtcaataaatcttgcttttaggaaaaaccatcttagttttagaagctgaacaaatggacttatgtacactcttacataaatgaccaagttacgtgcatttctaagcctcttaacatatatataggcctacggagctcttaatcaaggcatgagagacagtatgttcaggcaaaaaggcttgagctgagtaaagttcagatagacactgccaatgactgttcctgggcaatggtctgatagaggctgtcaactcatagtatctataaggggcacacatgagtacggagcagtggttgagaaggacttgaccttggttagaggataagctctcattagccaacaatgagatgtgttgactagaaaaacaaattctgagactgcaccaatatcttgaatgaggaaagggatacttcagcttcattctgtgcagatcagtccacaactggaagactttgtttagttttctgcccccacatttttaaggaatgaaagactgttgaagctcatggaaactgaagagagtgaccaggtctggctggggacttgaaactacactatataaagaatggcacaagaaattgctatgtttgactcaagaaaagaagactcaggggtacacacaagccatgttcaaatatttgaagagcttactattcagcatagctctttggtacagttcgaaccaaggataagatggcttcctggttaggacgtgtacagatggagttggtggtcacaggagtttagaatgttgtggagatgattcaagtatcagttgggtggttggattggtgacttcgagaattccttcaaaccctaaaatatttgattctgtgaaaaagatgacctcaagggagcacttacaagtgttttccaagctgattcattcccagacatgttggtataaaggagaggtagtgattttccagttctagaaatataaatatttaggtttcagtgtatgcccaagctagcacacctcaaggtggagcccgaactcaagttgagattttgagaacatcactagttccagtcacttatttttctatttgaactgagatttaaaagcatgttttgattccccatctgaatatcctgcttcttctacaggctgttgataagctgagggaaacttagaaagctcatgtactttctgttgctctcttctatctgtaacaaatgtttagtagttttccaattactgcagcaatgttaagaggatctgtggtaacgtaattgcaaagtgctcaggaattctttaaaggaagcaggcttaatctttgattatcatcttgattaccaactatggcaatagcctactccattgatatcttcttattacttttcatttttgctaataaaagaggctactagttacatatgattttagctctctggaaataagtgacaaaaatgaataaatcatgtactactgtaggttggcaggcagggcacaagattactaaattttgcaccatgaaaaagagaaagctagaaagaaatcaatctttggcaaagcttgagtaatccatccaatgcaattcaaatgcatgggttagtgaacctctgtgcaagagttcttataacctagttaggtttaattaggacacagggacaaccaaaaggggaaaaaataagaatgttgaacagcagccaagtgaattttagaataatgaagaaatatcaaatagggtaaatcaatggagttagaggacacaatggggaaatgaaaaacattcaaagataaattaatgtaggcccaagggttatgcaagcaatttactataaatatactagggaaaagagacagatgtaggtgaacaaggaagcacaaaattggtaatacattgttataagtaagaaatggcataaaacaaatggtgtggcaaagcagaaggtcagtgaacaagaaagaaaagcatgtaagaaaaaaatacagacattcttttgtagatgacatgctatttagcaaaagtttgtgctatctcatcaagcactataatgtccttgtaaatgtcatgtaaagtaaatttggccaggcttatttacagttatgaaaactgagcctcaacttcttccaaagtcacggaaaacagcaggtttttacctttcaaccatatatggagagtttcagccaatatgcccattttagagccagaaaattcatgattccattaattttttaatttacctataaaaaagtaaagtgcactaatctcatgtgtgcagctcaattgacttttatgtatgagtacaggttcctgtagctatctctgagatcaagatacagagcatctccaggatccctgaagtttgccttgtgtctttcttggtgtgtatctcccaaatatcaccactcttcagatttctaacaccatcaattttgcctgttctggaacttcttataaatgaaattatacagtatgtacatttttctgtctggcttctttcactcaacatcatatccatgagattcatctcatgttcttgcctgtaccagcagtctattattagtcattgcctctattgcaggactggcaaactttttccataaagggtcaggtggtaaatatgttaggctttgtggataatatgctctctgttgcaactacacaattctgcctttgtagcacaatagcagccatccacaatgtgtcaatgattgagtatagcagctctgttccaacaaatgttacttactaggatttagtctttggaccatactttgccaattcctactctatggtgttcgttgtaggaatacattactatttatccattttcttgttgaggaacatttggagtgttttagtcatttgctaaaaagactgggtcatggaatttgtattatggtattaccaggtcatggaattggtattctgattgggtttaataaatactgtcaaacagctttccaaagtggttgaaccaatttatactcccagcaatggagtatgagagtctagatgtactgcttctttgctaatatttagtatagctggtctttttaattttaattattctgcatctgtctaaaggattctctgtatggttttaatttatatttccttgataagcatgatattgagcatctttcatatatataagcatatatacatatatttaaagttatatatatcttttatataaatatatacatgtgtatatataaaagtatatgtacatatttatataaaagatgtttatactttatttatatacatatatatatattttcccaaaagggagtatccaaatgagccatatatatatatatatatagagagagagagagagagagagagagagagagagagagcgagcttgtccaatggagaattttttaattcaccacttttaaatgagctattcattttattattgatttgcagaggttctttatatatcctggaaataagctccttatatatattgcacgtatctcctcccagttaatatttcattcctaagacaagataagcaattaatctcataattttttttcaataagaccctttcatttcatcattgaaatcagcactgagtgggttgtagcattaactaggacataagaaaaacatctcagaagtccaggagcctgtggaaagatcagtacattcgaagacgtggaataggatcccttctctcctgagactatggtgatcttttatacctctaaagggaggcagagcatcaggttctcgaaggaacagtaaccttcagggaggaaggtgaaaggaactcatagacatagcagaaccgatatttggaactacatccccaaagcaaagcctttcctaactcattcaccattccaacttccctgtgctaagcatggagggaaacgagtgaccttgatattgttatttataatcttcttttcaaaaagaagccaatacacatgaacctcgtttttaaatgcctggcagataccctggaacaagccaagaatgttgttcagaattctatgttctgtgctacacattctctctttagctatgtattctccttctattaagttattgcaacataaaggtgatttattaagatgagaagcagacattgctaaaacaggaagaaaagcaaaaaagaaataaatgtttcctcagaacccacaaaggagaacagatgtcagcagaagcagatgtatgcttctccggggtgaaagaaagaatccttaatgcaatcagaatccctgtaacataagtaaccaagaaagtagaacatcgaaaacttcacagaacttccgcatgtgatgttatgcatccataagtactaccctaagcgcacaaactaccaatgacaaatgctttaaaactatttttaaaagacagaaaaatgagaataaacttgcaaatataaggttatatgtatcctctttttagaattagaaacccattcagaagatttgccttgaggaagaagttatcaattctgtatcctatttaactcaatcagctaaatagctaatgtctgctcttgacccacatgtgacaggatgaatgtttaatttcttcccaaatttcaacatgtaagagaacacgatgtaaattttttaggtaaacatcatgagaaaagtgactgaatgaaataaccaaagtgttttcttctaaaccacaatgtcaggatatcaacatttaaaaaatgtaaaacttctatgtgtcaaccaccaagataaagatactgggaaaatatttgcagcaaatatgacttttaaaagcatgatacgttaattatataaaaagctcctacatattgatttttcacaatgagccctttaacagacaagttttcaacagtcttgaactaacaatttaggaaaaaagtaaagagagttagcaaacatcaaagtaatgttaaacttactaaaaaaaaacaagatatatcaattgtcaccaatcaaattagcaaatagttttgaaataaataataggcatggtgatgcctgataaagatgaaatatgcacaagcaatttcatatgtttggactatacatcatataaggccttcgggaagcattaagaatattaataatatttatatgttttaacatagcatttttagttatttcaatataatctccagaaataatcatataagttgacagtatttttaaataggtcataatttccaatgacaaaactaataataaaccacatgaccaagtataaagacaacttaatcattgtcatcttcctctgaatacatatttgtccttaattttaaaaaaatactttttatattctatctgtccaaattttcatgtttttttcttccaaatctctgtcttttggtctgttagttagaaattctttaaaagcatgtatcattctttttcagtggccttttaatttttttttttgagatggagtctcagtctgtcgcccaggctggagtgcagtggtgcgatctcaactcactgcaacctccgcctcctgggttcaagcgattctcctgcctcagcctcccaagtagctaccatgccctgctaatttttgtatttttgtagaaatggggtttcactatgttggccaggttgctcttgaactcctgactttgtgatctgcccaccttggcctcccaaagtgctgggattacaggcatgagccatcgcacccggctggtctttaaatattttatcttgtcctcctatctctcattatcattcaactatagaggcataataatataaagtatggcaaatccattcaatgagaagtggctatataaattgtatgcaaaccataaaaaatgattatgtgtaatattaaacagtgatttcaacaatatcattaaatgcctatgcatagaagaagaagctaaaaggaaatacactagactacacccaattattgtgtttcactcatgggacagtgggttttgtttttctttcttcctttgaatattcaaaacttttcacatttcctttaataggatgtactttctccagaatgaaaatgcaaatcattaaagtaattgctctcttcttcaaaagatcactttactcacaaccctcttttaagattttttttaagagtttctagtttccttcccaacaactctgatcagcagttctcagagtcccactgtttacattcattctcttgttgtattgcagccaagcaaatatttggtctgtgcagccagcagaaaggtgagagcagatgagatgatgaatctaaacggttggatgttatgagtcctcctgccttgttaggaggtacaggcacccagtacatcagctaagcacttttcaagtagcaaacacttggctggagctcagccctccttctgcttatttgctactgagttccccctttcttgatcttgaagcctgttacaagatacacgcggtctagatttttatctcattcctgtttcaggctttgaatctggctcagatcgtctcgtttctgtggaaaccccatggttggtaggcacaaatgaccttgtcctgatcatgtattcatcatctccagtatcctcaccctcctgcatatctttgttcttgaagtgagaagtaggttttaaagccaaccaaggttctactattgacatccttctaagatgcatcttcttcaggtgtcaaatgacgctgcatttgtctgtacaccatctcctcagaaatctcttatgtcttattggcatttactttgagatagagagggtggatggaaaggtgaaatctaaaagggcatgagcttacccatgatcaaatagctcctaggtagcaggaataaaaatgtacccagtttcctgactcaggggttcctgattgcctgctttatgtttttttcaatgattctccatcactgtttgtatacgtgtaatttttaaaaatttgtttaacttagttcatgtttttctaggagatgctagtctctgatagatctccaaaagttaaaaaaaaataaaagtgatacatactctaattcctacctattcattgaaaataaatggaaagtgaatttaactgctgttcacaagctttttgacaggctttctctaaaagtgactatttctgtagttagctgagaaagcacaacaggaggaaaattttgcttttgattacaactctttcctgggaggtaataccactatgaaattctctttttttctatgtatttttcttaccttctaaccaggtcactacttttggggtaataatgtgtctgcaggaaaatggaaaatgtgagcagaaggtgaaattatttcactcaatagatatttacaggaacctatcatgttgctattcgtattcaaagaaaaaaatgcctgatcccaaggtgcttaccatcctaataggaaggcatgtaaactcaatagtgagatgagtgagcaggtaccattgtgtgcaggatttggtagaggcacagggggaggaggatgtggacatacctacaggatgggactccctacccgaaggctggaaagggagtagagagggtacaaggtaggagataacactgcagaggcctcattgaaaagagtattattagaaagataagggagaaccacggagggctttacacagacacatcctatgaccgtgacattggaagtagttcttagttcctgggttcatctgatgctaaactgtacgtgaacactaactccttaagacatacgttctttggtttgaggccttaccacatgtttggatcatgctcttctgaattgataaacaggctgtttagtggtatccatttatatttgatactctgcttcaaatatggcaatttgatcaactgaatgcagtctttgaagccacaataaatgtatttttttgcttaagtagataatgaaaatagcaagagaaatcgatgaatgaaaccaccatttggaggcatccttgttgcattaaaatgtaagatgtttggaatgagctacatgcagagggagtgacggttcactaaagagataatgtgataagtggccttcttctcccttagcaatcaatgtttatttgtccttagcaattttctttattttctactgggcatacatttctccttcaaaataaaataatctactggaaatgaaattgatcaataggcaagtcagaggatttttttcaaaaatctacagattaatagggacaagtcattaaggtggaatagatatccttattgtaaatgtatgtatcatctaaattcaaggtaacaggtttcctgtgcatacgtgtgtataagagagacacacacagagagagagagagagagagggagagagactgaaacaaggaggctttaatgtattacagcaatggttctcaatttatcaagcatcagaagcagcaattgggcttgctaaagcacaaattgctggacccatccccagaaattttacttcagtaggtctggaacaaaacctgcagtttggcattagttgatccaggaaccacattttgatatccactctaccagagagctctggactcatcaatcgtatttcccccttataccaggtagccatgatgctcttactagcatgcaggggtggagacctaaaacatcaatggttaaattcatcattctttgtacacccctccccttttgaaatccctaataaaaacttgctggttttgtggctcagggtcgccatcactgtcctaccaatatttgatgacacccctggaggcccagctgtaaaatttctctctttgtactctttctctttatttctcagaccggctgacacttaggggaaatagaaaagaacctgcgttgaaatattgggggctggttcccccgatatagttggatgtaatatttcttattaatttgtggagattttatttatttttcataaagaatcaaatatttagagctaacaaggatttaaaacagtatctgacttaatctattgtctatggaagaagacagtcaggccccaacaatttaattcactttattaaggtcctgtagatacttactggtgatgccaggagcaaaatgtgtctatctctgaactccctgaccacacaatctttgcactttgccacctggcttttgcaacttttaatttcagagtcattaataaatgtgttagttattatacaacttagggtgcctcatattagtgagacaattgtttaaatgcatctgccacatttttgacatggttataaaggcaaattagctaccactacctgttatttattgagcactcactaagtgcctggtgctatacttcacatccattagtcctggttaatctttaactggctctgaggaacaggtcacatagttcttacttttctgatgaagaaactgagactcagagaggttgcatggcttagtccaattcatgcagctaggaagtgacattaggagggcaagcataagttgggagatagctgagccacgcaatgtagacccagtagttggcccctcctctcccaaatgagaattgacaaaggtatatgccttggttgtgtggtaacaaggcaggcccttaggccaaaaataaccaggcagattccacttgctgaaacagggatacagtggagtaacttaggtctcagatttttttttttttaaagataaatgctcaagtcactgaaatcaggttacaaaatcagaaactgatttgcagaaaggctgatatgatgattaatgatctgagtctgacctaagagctggactgttttcctggggcaggtcagagcatcaggtagaggtcaggtgattccaggtgttgggactataggatggctgcaggaacatggactttgttcctgagttttgctaggtatggagctgaacttttgtgcttctgtaaggagaacactttatgtttctgttttaaaactgtagataattgcaccatgatgtgttttctgagcagggaagttgggtgaacattatgacttggctttctcacaattgggagtagtagtaggccactgctgtgtaatgttttttttcctaaaccttgaagaaaagtggaagtaaaaagaggaagtttagaaaatgaataaactatcttgccagcagataaagtccaaaatgatcacaggttgtccacacacaatttttattatttacttttttaattgtggcaaatatatttaataatattttccattttaaccattttatttatgtatgtatatttttgagacagggtctcactctgtcacccaggctccgtcagtggcacaaacagggttcactacagcctgaacccctcaggttcaagtgatcctcccacctcagcctcccaagtagctgggactacaggtgtgtgccaccatgctcagctatttttattttattttttgtagagacaaggtctcactgtgttgcccaggctggtctcaaactcctgggctcacacaatccttctgcctcagcttcccaaagtactgagattataggcgtgagccactgcacccagccttcaccatttttaaatgcacaatgcaataggattaattatattcataatttcgtgcaaccattacctctatctgttccaaaatgtttcattgaccaaaacagaaactctgtaaccattaagcaataattcgcctttcttacttacccccaacccctggtaatctctattctattttctgtctctgaatttgcctattctgagtaccccatataagtggaatcatgcaatatttgtccttttgtgtcatgcttctttcacttagcaaaatgttctcaaggtctatccatgtcatagaatgtatcagaacttcattcctttttagagctgtataatttttcattgtatgtatttaatatataccacattttgtttattaattcatctgttcatgaagcctggagctgtttctaccttttagctattgagaataatggtactgtgaacattggtatacaagtatctggctgagtccctgctttcaatgctctggggtacatacctaggagtgaaattgctgggtcatatggtaattttatgtttaacttttcatgaaaccaccaaacagttttccacagtgactgtatcatcatacactcccaccagaaatctacgagggtttcaatttctccacacccttgccaacagtaattgtttcttaggattcttccctgcattatagccattctagcaggtccacacatgctgtcttcagcatgctaagttgaagacaccaaagcatatgtctagtgtcttagttggtatttggggagattatttttactcaaaccagggagaaggggagaacaagggttgaagaatgtggttcatagaccactgtaacaaaataagaaacccagaaataaagcaacacacttacaactctctgaacatcgacaaggctgacaaaaacaagcaatggagaaaggactccctattaaataaatggtgctgtgatagttggctagccatatgcagaagaatgaaacggtttcattctgcatatggctggccaacaacctttacctttcaccatatacagaaatgaacccaagatggattaaagatttaagtgtaagacctcaaactctaaaaatcgtagaagaaaacctaggaaatatccttctcaacatcaaccttagctaagaatttttggctaaatctcccaaagcaattgcaacagaaacaaaaattgacaagggggacctaattaaaccatagagcttttgcacagcaaaaaacaaagaaaaaaaaaacctactagagtaaatagacaacctacagaatgggagaaaatattctcaaactatgcatccaacaaaggtctaacatccagaatctagaaggagcttaaacaaatcaataagcaaaaaacaaataaccccattaaaaaaatggacaaaggacataacagatacttctcaaaagaagacgtacacacaaccaacaaacttatgaaaaaatgctcatcatcactaatcatcagagaaatgcagatcaaaaccacaatgagatagcatctcacaccagtcaggaatggccattattaaaaagccaaaaaacaacagatgccgattgggctgcagagaaaaggaagcacttatacactgtcggtgggaatgtaaattgtttccgcctttgtggaaagcagtttggagttttcccaaaaaaatttaaaacagaactaccatttgacccagcaattcaattactgggtatacatgccaagtgaaatagatcattgtatcaaaaaaatgcatacactcatatgtccattgctgcactattcataatagcaaatacatagaatcaacctacgtgctcatcagtgatggactggataaagaaggtgtggtacatatataccatgaaatattatgcaaccataaaaaagaatgaaatcatgtcctttgcagcaacacagatggaggtggaggacataatccaaatgaattaacacaggaagagaaaaccaaatgccgtatgttctcacttatatgtgggaggtaaacattgagcacccatggacataaacctgggaacagtaaacactgtgaactagcagagtggggaaggaggaaaggggatagggtcaaaaaactacctattggatactatgcttactacctgggtgcggtatacccatgtgacaaacttgcacatggactccaaaataaaagttgaaaaaaaaaaaaaaaaagaagccattggccatctacaaaatcaaccaaccataaaataacattctggattacctgctgtggggctcaaagtcctttaggtatcatcctttcatttcacacattagggttatcaccatagtgtagtggaaagtctacaaacttttcaatcaggtaactttatgacatagacaacgtgtacatagacacattattttatgtttgtgtcatcttgaaattcatatattatatatatgaatatatattactaaatattggttttctcatttatatagccattggggataatagaacaatttacctcattgaaaaacattttcaatataggaataaaaagataccatcaatgtaaaaaaaagaatatggtcattagatgcagtctatgaggaggtcttctatcacactgagaatctcttgtgtttggaaacataacttggtcatcttggcatccccagcgtggagctcagtgctgaagatgaagtattcaactgtgagagattgaaagttgaagagtttatttaaaaaaaggtttttagcacttcaggaggctgaggtgggcggatcacgaggtcaggagatcaagaccatcctggctaacacggtgaaaccctgtctctactaaaaatacaaaaaattagccgggcttggtggcaggcccctgtagtcccagctacccaggaggctgaggcaggagaatggcatgaacccgggaggcggagcttacagtgagccgagatcgcaccactgcactccagcctaggtgacagagcgagactccgtctccaaaaaaaaaaaaaaaaaaaaggttttcttactgagaaattattttaagatatatgttcacatagacctttccagaagaaaactgaaaagaggtaaagggtagtctaactcacaaatataaatagagaaacacaatgcatatttactcagcaatcttttaatatgaggtcatattattggaataggagtttaccagttggatttcggcatgatttttcttgcacaaaacacaaagcagtaactataatttctgcctttagcttttgaaaaactaaaagaacttaaagatgcttgcaagccaacaagagcagagtcccattttcctccttctttaaatttcgtatcattgtcttacctttaccaagatttttcaaccattctacttcacccagtctttccaaagtacttaattttttttctaaattgatatttaatgggttgctcaattttacaaataacataagaaggtttagggtcaccgcaacagattctttgaaaccataaaattcaacccttggctacgatgttggtgggggattaaagagtagcctaccagcctcaagtggtcaaaatgacatggacattctcacaggcactttaaagaaaaaaatgacgagttggctatatttatgcatgcagaattatttttatagagttctatcttgattaaaacataatttagtagattaaatatgctatcttctttgagcaagctttggaagaccaagctactagtagaattataccagagttaggatactgccctctgcatacactcaaatagcaggccagaatcccaatagaaaatgagcatgcttagctatgtttctgtagtatggaacttacgaaggttcgattcttgatttctcatatgaatcagagctctctctctcctttccagtgtgacccagttgtattttgcataggcagatggtttgaaggaaaattccagattattagcatttgcactggagcttgacaatcacctttatgaacctgctcttggaatagcagccttggaagatcctggagtcaatctccttttatttcagatgaaaactgatgacagggaaagagcccaggaagaaagtttttattcttggtgccttgggcaacgtgtgtatcctccctcaaaagaaggcttggagcaaaatgaacacttacaggaaactgaggctcgtatgttttatgcagtgaatcaccggcataattggaattctaacctcgaaattttatttccaaatttgactggctccactccttatacatcaaattgatcaaagcagaaattacagattcaaatttatggtaaagctaagaaaaagaaagcagaacgatgagtcagaaggtaagaggccacgtaacccaatatttttttagcataaagcattcacgaattttactggcacctcaactaaaatgatgttcttttaaaatcgtgtcacttgattataaacatcttgttttaaaaatggaacatataatccaacatcccccaaatttctagactaattcaaacataagagttgatcttaatatggatttaggtattcaacaaatacttatagagtgtccactatcgggcaaacattgttctaggtgctggagttacaacagtgaacaaataggcaaaacctttaccctcatgaggcttagagtccagtggaaaggaaaagaccaaaaataagataagaaaactttatggaaatatataaacatacataggtatgtctatataatacactgtgatatacctagtaagatatatatagttttgagagaaaaacatggctaacttgtttgtgccttaccttgtcatacagaattagaatattatccatactgaattcctgggcccagccctggccagtgtctctgccattttatggggtacattatctctgctgagctaagtaattgctaaatccacactggaggctgtgtgagtagagaagtgacacaccagttaacagggtgagaaattaatgcaaattaattctccaccctcccagcagacactgctcccactttcttgcccttctccatccccctgccagttcacagagaaaagtatgaatattacaaatgatactcacttcatgtctcagtgacctagaaaggagtgtgtgcactaaggtgcagcagtgctttaatgacgctgagcccaaaagcaaggcagtgacacaaagaggggagtggtgtcactgagaggaaggcccaagcactttccccttctgcacctcttcccaggagacaggggtgagttaaggcagcacaaggtcactgggattgcctgaagcttgaccacaggcacgagtgactttcctcttggctggtaccatctgtataggggaatagaagatttttatcataacaaaggatatctcaatagagtcaattagcccagcatgcctcagagagttctgtgatgtgagtggtcacttctttgaactaaagttgaataaagaaaaaaagaaagtgaaatcatttcagttacaaagaacctagcactgcattctataaggttttatcattcagatttggaaggagacgggagccatggtggatgccgtgaggtgtcaccagatccctttgtgggactatatccatcccccaccctccagctgttctgaggattggctgctcacctctgtccccttctttagggacctctgtatctggagaggcacttgcaccacaccccatcccatagctggtgaccgatttgttatcagagctccttcatactaaagaaagagagactgagactcaagctgctgaagagctttcctcaaagtctcacaatctggtcagtcgtcaaaggagtctgtctgactccaaatccatcctctctcccctcaatcgtatagttgctttattctcttctagtgctgtggagaagcagccccagtttgccactgaataataagcgtccccaccatttcctttccccattgttgttatagggattcctaatatgtgttgctaaggcttcaccttatatcacccagaagctctaacctgtggcttcctcaagagacattatccctgaaaaacgggtagaaattcaggaaactgcttactcaatttctcaggtggtggcggatgttttcttccttattctttgttttctgcttggtaagtctgtgtgtaggtggtttaattgtgctgaacagattctttctctcctctgtacaaaatgggctttgggggtggacaggaggaggaagagaaagatgtgagtttcacataagagcagagggatccttagcctgtcagctgagaaacgaggactgtgtattcctgagtagtgcctcctgcctttcaagcctggaaagagaacaggagagggaggcatgctccccaccctgggatgttccctttactgctaccacttattgctttactggacatcataaagattgcaagatggacggaatttatttggataaaaagcagtggatgttgggtataagtaaattagcaacaggtgatagattctgaacataggacacctctagattgttatgtcaatccacacattccttgcaatgtcaaggaaggagtaaattttccagataaattaaacaattaaaagagtatcaaaacttaaaaaattcattccattttgtggagatctttccatgatccaacatctcttctcattaaaatgtatgcagagccaggcgcggtggcttacgcctgtaatccccacactttgggagaccgacgcgggcagatcacaaggtcaggagatcaagaccatcctggctaacatggtgaaacgccgtctctactaaaaatacaaaaaattggccaggcgtggtggcgggcgcctgtagtcccagctactcaggaggctgaggcaggagaatcgcttgaaactgggaggcggagcttgcagtgatccgagatcacgccactgcaccccagcctgggagacagagcaagactctgtctcaaaaaaaaaaaaaagtatgcaggccaggtgcagtggctcacacctgtaatcccaacactttgggaggccaaggggggcagatcacctgagcccaggagttcgagaccagcctggccatcatggccatccctgtctttactaaaaatacaaaaattagccaggcatggtggtgggtgcctgtaatcccagctactcaggaggctgaggcagaattgtttgaacccgggaggcggaggttgcagtgaaccaagatcgtgccatcgcactccagccagagagcaagactctgaaaaaaaaaaaaagtatgcagaaaaaattttactttttcctagtgaaatgacatccacattatgatcatctcatatgtgttgcctactgaaaatacagcagcattctccaggctgctgaggcatgtgatctactgcctggcacaccaaatgatccatcactttagttgatgacaaagaaagactaaggaattgctccagattgagggacactgaggacacatggcaatgaaatggaatacaggatcctagtcttcatcctgggctaaagaaaatggttgaaaggatttgactgggtcagttgacaaagttggaattcagacagtaggttacgtaaaagtattgtatcaatgttcaatttactaaagttaataactgcagtatgggtgtgtaagaggttatccttgttcctaggaaatacaccctgaagtattaaggagtaaaaggccacgatgtgtgtaactaattctcaaatagtgagaattatctcaaaagttatatatgttaacatatgagtagcatatatgaatacattctcatatatatactctcaaatattattcttcagtagtataagtgatacatattagtatataagtggtacatattagtatgtaagtagtaatgtgtatactatctcacatatatatataagagagagagtgacagcaagcagcagaaacaaatgaggcaaaatgttaacaataggtgattttggataaagagtatacaaatgtttttgtaccattcttataaatttctatgagttttggattatttcccaaagaaggagacaaaagagctttctttaagctgcaacgatgaagtaacaagactggattttacatgtggcacctaagaagctctctcattatttatacatatgtatgatattgcaccttcactgacagacttgaacatttcataagaaatgagttgatactagaaatgctaggtgaagattgcccaagttaaggctgaatataaatcttcttggtattccatgagattctgagacattttatgggagttttggcagcatgggctggctaagtgtagctcagggattactggctttaaatgtcttgagccagtgtcaagtttgagttgaaggcattggcaaggtgtggaataaatgtgaatggggatagaagaggatctttggagagctgagtcggtaagtgtacactgcacggcatcaggacagtgagcgatgtccttggaaatggcctctttttccagtatgtcatcatttgtacaaagcttagattaaagcaggaaacaagaaatatcttaagctggaaaaaaaaaaaaataatagtagaggcaagtttgaaggaagtaaaaaaaaaaattgagacttatctttccatttatataaatccaatcctcccagccccagcctttcctgtctcttctattaatgactagggcagaggatcttcccatggggagctccttttctgagttagagatgttcaatttcatctccaaggggaactggtgaaggtaacaaatagagtggctatggaaaacattagagagccaaacccagataatagcaaaatgatgctcatatgaactaagtttcctggtgtatagagaagaagcttgtgtgctggattcatatgaaaaatatcctcttatacttgaagagaagacctctcattagcacaaaaatgaaacctatcctcatatttcactcctaccttcatctctcacaattcacaattttatgatttttattaaaaaaaatagtttataggaaaatacccacttggtcatcaaataatttatcttccatagcatttacttacctcagcatgctgcaatattttacatagaggttgcttaaatccactgctgaaatgcaggcaactctggaagaaaaaaaaatgtgttaacagataaatggctccctacttcatgctagttaatctttgcagcaaataacagaacaatctataaagtatagaaagattttgagtacttggaactttactctctgagctggcattttgccacattggggataaagcctcaggtcttcctaaaagcaccatggaatccataatagcccagagtgtgtggctcctcatttttatatgtcatcagaaagatggaatgccaagagtatgtctggggtctgggttagtactagctcaagggaaagggtaccacgtagtcaatcacttcccacatatgccagatctcccctaaagattagtcaacgtgccagtaaaatatgagcctgcatttcccatgctatgaggagctcaagacaagcagactaaatgtttgtgatgttgacatatgttggggtgttgtgatgtatgtacacttgtatgcagagaaagagcctgccttagccattatgaggtactaaccaaaactgcctcatgggaaagggcaactgagagaatgtgaagggctggtcaacagcacagagaacattactgcgcacctcagttgtgccctctgctggggactcagtttttatatcaggcaatgaagtggtgggtgagccccaatttggtggtacaggtccctggtagagacatgtagacactaaagttcagtgggcatcagtttgctgaaacctgtgtttatagacacatgatggtttaatgtgaggtgacccagggaatttgttgaaaccaaaaatgaagccttatttttggggatcagaacagttagactaagagctctatgggaaaacattctaagaaatacacttgaaacggtgagactcctcgtgtgtgtgtgtgtgtgtgtgtgtgtgtgtgtgtgtatttccacatatatctattttatccaacttcaaaactattatgaattcagtcttctttgccacaattagagaggaaactgtaatttgaaaggttagcagatctgctactgtttcctaatagtttgtatagtttctaatgaccggaatgccacccaggaggcctttatagtggagctatgtcaccataggagcggtccaaagtgaatgttacttaatcagagtcaccgaagatgaaaaatgtagtatttcctttgcaagctggtgaggctgtaattttcaaatgccgctaatgtaatgtggagtgggagggggccgccattcctgacctctgtgttttatcctctgctttgaatggtttcggcaaaaataaaaatttctaagtggcactcataataacagaacttgaggcaaagggatgctcttcgagtgtgctgtagcatatgaaaacagaacctggtgagcatgcggcatgccagaatacgaaaacagaacgtggtgagcgtgcgacatgccagaagggttcgcagtgtcgcttggggtataggagaaatgcccgtgtgcaaaattgctgttacccagtgggctagcccgactacaaagaaaatcactgagataaagacattgaaatgcatatgatcattgtcgtcatgcagtgaaagttctttaaatctagaccccttatctctttcatggttttcagcagctgactttggcttttgtccacagttgaacaggtcctccctgcttttaatagtgaggttgagcttttggcggaattctagatgtgggctttcacattaattctgtgttctgtagtttatctgctatgttttatgctgggggtaagtctgtaatagctgcagtcattgtgaagcttatgatatagtgggaaaaacagatattgaagatgaaatgacaagtatgattactttgatgtatgggaaatttagggtaaacaggcatatataaggacaggttgctaatctcatttggggagtgttatatatcattgcagatacagttatatagatttaaatatacttgtagcatatgtacagtatatgtatactcatacatgtacatatttatttattaaagttgcctgatttagccaataaaagtataggatatatagttaaatttgaatttcagataaactagaagtttttggggataggtatgtgccatacaatatctggacataattacaatgtggagagtggtgtttatctgaaattcaaatttaacagagtgtcctgcatttttttctggcaactccaatgtatgcatatgtgtgtatgtctgtgtgtttttgcatatgtgtctgtatgtgtgtgttaatggcattcacagcaatctagatgggattgtagactattattctaagtgaagtaactcaggaatggaaaaccaaacattgtatgttctcactcataagtgggggctaagctatgaggatgcaaaggcataagaatgatacagtggactttggagactcggagggaaagggtgggaaggtggcgagggataaaaaacaacaaattgtatttattgtatactgctggggtgatgtgtgcatcaaaatctcacaaatcaccactaaagaacttagtcatgtaaccaaatatgacctgttccccaaaaacttatgaaaataaaaattttaaagatgaaaaaaagaatactttaactgaaccattgaggaccagagatgcttgtagttctgaaactctatacagaagcatgtgttgtgtatctgtgtatgtgtgtgtgtgtttgtgtgtgtgtatctgtagatgagtatatttatatgagtatgtatttatgtgtgtatatgtacccttcccacacacacacacataaccaagggcaaatctaagaggagtatgagaagtattatagaaagaagtatctagaaacaaggcctttggaactgagcactgaagttttattcttttcaaaataagaagcctgttttcctaccttctttgtgactgctcttctatttaagtctcttttgaacagagagtggtaagtactggtgtccccatgtccagttacaagcacctgatctgcagatgtcaaagaagttaaagcctccctggtctctctcctttgcttccttccctgttcttccagcagtttcttcctagttagggcttgtataagacctttccccttaaccaaccccagtaagaagccattgtgggcatggaaattggtttgaaattccaaggacatcacttggattataagaatacttcagtgcaaccattgaggaccagagatgcttgcagtcctgaaactccatacaaaagcatgtattatggttttaaataataaaatcgattgtttcaaatcatgtgccatatctaaacagttgattttccttacataggagtcagcttgtacatgcatgttcacattattattctcgctgactttgggattgttccttaactcacaaatcctctgcttcctcattcataaaacagagttgctaaagtttctgccccataggactgtcatgaggattaaatgagataatgcaaataaagaactcagtgcaatacctggaagatgtagtaagagctatgagacttaggggtgtgcaaatgtggctcctgccacacagcctctaatgcatcagccaccatctcagaagtcaattcagacatttctcacgtgttctgagaaacatggggaagagcccataccaaggtactcacataaagactgtagtttacgggtgactaaggttcagctttggaagaccaaggggaacccacagtaccatagttaaaagaagactcagcaggaataagtgtgggctttcctgagatatggcccaaagccaaaaccactgcatgctcagaatgtttgctcagtgtgctgggagcatcttggggctatgagaacaaatttctctttgataatgacatattaaaatagacatccctcaatgttctttgtagtcaaaagatagatggcctttgagacacttgtcactagtgaaatagattttgtcattatcagaggaagccgggccatactgcataccacaattaacttgaataaccttttcagttttttttttttttcttaattagggtttacagcacaagaatatctcttataagagggaggattttttttaactaagaaattttttaaaattttttattttggctgcaaaaaaatcaagctgtacatttgtgttttcaaagccatcctccttttgaaaaccacaaagccaagcgcatgctatataaagatgttatattgtagctgaacttcatgttaactgtcattaatctgtgacttccaagcaagaaactaaagtttttaaagggtcttcaagtgaagtatgtccaaaagtaacaacagaaaatatcattttaagatgccgggtggtttcagactctcaacactgaccttttaccttcaaggctgtgtcttgcattacatccacttctccttaaggctacagtaaacctgtcaagtcagattgctgtttgagttgaaactaacaggaacaagcggaagagttttacccaagtgattagtggatttcagactgcttgtcaaaaccacttggtgttacgagagttggcataaccccataaggcgtttcttaaacatgcctttatttggttcattttcaatttcttcccataactgccacacaaccatatttgacggaaaaggaacttcaatttcatgtttggaactttaacctcaattaaatgcaaagtaggaaatgcaaaatatttttaaaagagacacttatattggctgttatattggctaatttgtttctggatttagtcagatgcatggtaatatgtcctatcaatgatggaataaatatctctgctggaataaatatatttgttggcttctaccattctataacaaatgatgtcaaaatgtgggttttttttaacacattgataccattctctttgggcctcatgtatgaatctacagggagaaaggaaattactaaggctgctaggactgtagggaagatggaatggggtgaaagaatagagagatttggggccagttccatggaatactgtcatctctgagaaactctacagtattgagaaaatcccccctcatctgtaaatttgctagggctcctccacacacccagaccttagtcaaaagctgcatactttaacataacctccactccctgccaagcatcatcaagttctcacctttaagaaggggagctataacggtattagcctgctagggctgctataacaaaataccacaaactgggtgtcttaaacaacagacatttattataattctagagaccagaagtccaagatcaaggttctggccaattcagtttctgggaagggttctccacctgacttgcaaacagcagtcttctctctgtgtcctcacgtggcagagagagagtgagctctctggtgtctcttcttataacagtgccagctctattgaattaggaacccacccttatgatctcatataactttaattgcctccctgaaggccctatctccaaatacagtcagattgaggattagagcttcaacatgtgcctctttagggggatacaattcagcccgtaacaataactaagaacaaaagatagtatctgtattttggcaacttactattatgcatctagtctgtaaatgtttttctgtcacccacaacaaatatacatttagcatcaaaataatgaataaacaattttaccaagaaacgtaacactttagcagtgttaaaaaaagctctatgccctgaaggccaaatatttgtagctaatgtttagcatgttaaatgttgacttgtttttagaatgttgctttttatgcagatgtctttgcaagaaaaataatgttttgattttaattgtaccctataaaatactaaccattgttatatagcatgacatgtagcactgatcaaattatatttcccactgatcaaattatatttcccaaaacataataaatacaaacaggtgtttcagctgttaagtacttttttttctgttgccataattacaaagaaatttcatcctagatctaacagcttagactcacaacctataagatggtggtcacaggttgtatataatgaaaaggtaataaagacacaggtgaaagtcctaatgcaggtaatggattgaaaagcagataaaagctctaattcagcctctctgagccttagtttttctttttatgaataagtaacttgggctaggtgatcttttaggaccattacaggaataaccattctctcatcctaagaaacgaactaggaagatgatttggtaaaattagcaaacagatctcacttggaaaaaagtaatgaaaataaggtcaaatttcaagttatattagtgggaaacagtcttcggattgtaagattatgaaccagcctcccacatgaaataatataagctggattttagaagatattttagatgaaacaaaatctcaggctgtgtccgttctgccacatgaaataaacttggtgaccccatccagcctttttccatctctgattgcaatgcatctgtaattgaaaaatgtctttagggaagtgtactgttgaacagccttctgcctgaacaacatcatcctaacacacatctcataagagatttcactgctctgacaagttacacatcctaagtgaaaaaccacagtgatattgttgctgtttgctcaaccccctgccggagctgggattcacaccctgaagctgtatttcatgagtgaattcagattaaatctttgttctctttccatcgtatggcacagctgccttaaaattcaccaccaccgacagacagaggacttcctcgagataatgacccacaggaaatttctttcatgaatcagacaagccagtagaaccaatccaccatggagagtttagggcaatggcatgccaggttggcattataatctcatttgccacatgcttgttgaaaagcctttgtgctggaagctacattagacatttgggaaggagtaccacattatgcacttcatcccgtgtttgtgaagaactttactaggcctaatatcctagctaaaatctgccttatctttccttcacgacagagagaaaagatgggaaagtcaaaatataaatatattgctgagtcattgactctttttattagttaatttgctaaattgaccttgactcagcttctctggattagggttaaaatgccttgtcatcatttttggatctctacatcctggaattgtatggcagaatgaaaagaggtagactagcctgcataaccagctgcttgcacctccccatctttagtcacacaattcctatgagcttcagtttcctcatctgtaaatttggaacaataacattcactccacggagtgatgatgaggtttctggtgggcaaggtaacacagtgctttggcttgcatccttctctaccacttgttaactgggacactctgctgtgtttccttatctgtcaaacagggatgacttttttaaagcagttctttttcatagagttgtttgaggattaaatgggtagacaatatatgtgaagtattctgaacagtgcttggttcatggcaagccctcaataaatgctacctcttattggttgatagaatgcacctgtgctcaattaatgttcccttcctctcccctttttctccttcatttgccctccttgaccacacacagaaactggaaggcagagtttctcgtgtgttaaaaatattccaggtcaggcgtggtggcttacacctgtaatcccagtactttgggaggccagggcaggtggctcacctgaggtcaggagttccagaccaccctgaccaatatggtgaaaccctgtctttactgaacatacaaatttagctgggtgtggtggtgcatgcctgtaatcccagttacttgagaggctgaggcaggagaatcacttgaaccctggaggcagaggttacagtgagctgagattgcaccattacactccagcctgggcaacaagagcaaaactctgtctaaaaaaaaaaaaaaaaaccacatgtttccaggatccttactttgaacattcttcaggaattgctctctggaaacttcaaagtcatggagagctaaagcgttggaaaagaatttctaaaataatatgctggctaacttcaaggtattttaggtctatctctaacaccagccaagtgactggcatttgtaaggtgtgggtcctgtatagagcacatgaggatatgtaacaaagaattattttcaaatctgttagcaactcagagttcatgccctattgccaatggctgtggagcttcattttcaacatatgcaggacagtaaatctgcatattatagaggagactgtgttggaagaagaggcttggaatggtagtctatcttctttgtattcagttcaactagctgaagtctattttaatggtgtctctattcaaataaaagtgtgatggtggagaaaagagaggctaagcaacatggcaggaataaaaaaagactttagggacatgatagtttgcatggttggagaaaaattaactcaatagatgtttgagttggcagatttgctaatgtcctacagcattctttgtataggtgtaggagattatttgcattgcttggaattgaagactaacaaagttgaaatgctttttgaggtattattgtgtcagtgacaaatgccaaaattagtggccacactgggtttgaaccacatggtggtgatgtcagaggagagcggagtccaagtgggatgaccagggcttcaataaagcctggggtcccagtaatgccaggaaacaggcagcgcaaaaggcagaagcacttggcagttgactgattctgttgcaggacctaacaaagtgattaacatcaagtaaatgaagatgctccttggaaaactgtaacattatcaaggctgtcagggaggctgcatgaagttagcacactgaaacgtgcccctcctggttcacttcctcagacagaatgttctggctttgggttttgctatcagatgtgatttgatctccaggcctctcacagggacagagatatcaagaagtcagggggtctgacagtgatgcattaggcaataggatgctgaggctgattatgatgcaggtgacagaaatgaatcacctcctgaatatgctgacattggcgctgcgggaggagacagagccagcgctcttgtgatgtcaataacgaaaaacaggaagacaactctgcctggaaccgtatgtgcctgaaactgggatgcttaatgttagaggtaacttgacgatccaggccactattatacagaaaacaaaacacacaccaaaaaatatatatatcttaacacctttggggaatactatttatgtattgcctcttctttttcacttttccgatcttatgaggtataaattatgataaaattaacaaatatatgtcatgatcacctaaatacttgcatttggaagcatataataagcatcagctgatcaataaaatcatcattaagatgtctacatagcggccgggcatggtggcttacacctgtaatcccagcacttttggaggtgaaggcaggccgatcacaaggtcaggagtttgagaccagcctggccaatatggtgaaaccccatctctactaaaaatacaaaaattagctgggcgtggtggcgggtgcctgtagtcccagctactcaggaggctgaggcagaagaatcgcttgaacctgggaggtggaggttgcagtgagccgagattgtgccactgcgctccagcctgggcaacagagtgagtctccatctcaaaaaataaaaaaaagatgcctacatggcaaatgctaaataggagaaaaaccttgataattctctgaatactgggttctgaaatggtaatagttttctcactcccctggcatttatgtattgccatgtagctctagttttcttcaaatgaattaatgtcctatctttactcctcaaatggatcataaattcctgcaaaacaggggccattctaacttaaaatcctttgtaaattctcagtgtttccagcccacagtcctttgcatgttttagcatatcaagaactaaatgaaatcatattgatatatttcactaaataaaaagatgtgtaagttctctaagatgcttgtggtactctgttctcatgctgctgataaagacatacctgagactgggttatttataaagaaaaagaggtttaatggactcacagttccacacggctggggaagtctcacaaacatggtgaaaggcaaaaggcatgtcctacatggtggcagacaagaaagaatgagagccaagtgaaaagggaaacgccttataaaaccatcagatctcgtgagacttattcactaccaagagaacagtatgggggaaacagcccccatgattcaattatctcccaccgggtccctcccacaacatgtggcgattatgggagctacaattcaagatgagattgggtggagacacagctgaaccatatcagtgcaagaaaaagtatgggttgtttagataaggtaatgctagaaccttgagaaatgtttgatgtcagtaactggggaagtgggttaggtgatggagacatctgttcagaatggcccctcagagggatgggatggtatttacgaaggtgaagtcagcagagcccgggagtaggtgaggaggagcctggtaaggccaaaagtgtgaggccccttcgaaggccctaagaacatggttcattttctagtgcaataggaaatcaaactagaactctccatgaaaggtagaaaatttaatcctgttttcaacacctctgggctgatagcattagagaaaaatcaccagattccttgatcagattattctttttgagcaattgtaatttcaaatgccccaaaagtgatagattaaaaaggttttatagttttataaatatgactcacttatgttttattattatttcacttatagtgagtcttatatttagtgagtcttatatttataaaactataaaacctttttaatctatcacttttggggcatttgaaattacaattgctcaaagtagggcctatatttatagaactagaatttgtattgttacctttaaaaaaaaatactgacccaggttttactagattatatgtatcctgtaaaatcaaagaaaataaccatgaaaattccaaagaaaaacttatatatataattattgtgagtagaatcactgaacgaatacatttatattggttctggaaagcaatgagaagctttacacaattacattatctcaaattataactttctgttgtttttcagagtttgtaaaaaataaatgatgtgtcatatttaatcttctttgtccttagattcaccataataaatattaaggtagtgcatttattatagggcttttcacttgaaagacaatacccattaattttaaaccttatgttggcagtccctccaacacagtattagaatacttctgtctctattctacattatgtttattgggactggggaggctaacatcacaattactttcaatctcaggaatcagattcttctttacttcgaaaattctcaactactattaaatctgtacgtttcttctctgctatcttctccattgtttcttctgggaattctatcaaatacatgttggagcctcccaatccttactgcatgtctgataactattctttcatattttctgttgcttcatctctatggctttttatttttcttgtattatagtttttctgtcactggtgtatctggaaccagagatgggatgaattcactcagtcattttcaccaaaagtctcagcaaaactactatatgtttacctactttattgtttaaacatataactttgaaggaatatccaataaatttacacttcccaaggcactgaagaaaatcattgctttgggtttttatttctccttttctagaaagggatagatttaaacaacatctcaaataaaaaaagaggacaaagagtcaaaaagcaacttcaaatccttctatatacaaaattccagctttctgtaatacataaatactttaagctgataaacaaaaagggtagctactcagtttaaaccaaaaacaagtgtggataaaaatgtacctaatcctccagagaatcagggcagtgcctaagaattatgtgcattccacacaatgggaaatgaatatattttccacattttagagctttaagatgtgactgctttagtatgccagccaacgcctacaaaagtgtgacaacaaaatacataaatcaataaaccattcctctatataccacatacttaatccattttgaagtgggagtatttcactgtaataaaaatacggaggtattttcttcaatcactattctaattagttcaggcttaccttcttttatggctctgtgaaatatcaccaacacatacaatagttatggaaacaatacatcccatagatttgaacttataaaagccttgcatgtgaaatttgtttctcagacaaatgtgaaattcagtacctttactggttgcactacatgagcaggttggaaaagaaggttttaaaattctgtcactagaattaatcatattccaattttgtatccttcacttctataagcaaccgtatagaactcagtcagccttgttcagcattatattttcaatgtgtatattcaatgaatctttctttaataaacatttatctcttagaaaacacttttctcaatgtatgagccacaacataacttaataaactaagaacacaaaaggtataaattaaaaattcaaacctgacatagtttaaattcaatattcttaaccctggatcaatcaaataataatctttttcatgataagaatgaatatttggtgaccacaaataataggaagacatatgtaatgtgatataaaaacattttatcgtgtgccaaaagcatctgttgcctgtaaaaatatgtgcttccttgatgcttatctgcatttggtttattcttttgagcttctatttggttctctaattttacctacaccgtttcttagtcactgctaatcagattccaacaaacaggagtacagaaaaatcaagggacttaaggttgcacttgaggtctccaggcatgtgtctttgtatttgtgaacatctagcccatcttattatagcaaatctcaaatggtcattacgtttcttgtgtatttttgcagccagtattgacaggagtcaacttagagtttgtctgtttatttgatgtttatcttgtttaagaaaataagaagcaaaaacaccaagaggcctatttgttagggaagctttcctctaccaggttagagcaggtgaaggatcctagaaaaatttccaagcctcttttatttctctcctcaccaaagcacaactagagcagcttgggaaagtttatgtcctgccttgcaaagcagagatgtacctgaacaaatttcaatctattccaccaggagtttgtgattgttctttcagatggcatcttctaagtctcatcttaagtttgccatttagctctccatgctttgtgacttcattttcttttttgagagcagggagaatacgttcacttttctttcattaaagagtatttcaactgtaaatgataaatggctttcaggatcctgaatataaagagctatatgaaaacacggctaaactaaaccatgagttatctggaacactggttttcaactgggactgattttgcccatcagagacgtttggcagtgcctggagacattactgatcctcacatttgtgtgtagggtgctgctggcatctagttggtaggggccaaacatgctacaaaacctccaaagcaaaggacagagcagacaaagattcatcaggccccaaatttcgatagggctgaggttgagaaaccctgacctagagtttgtcaagaacatttcacaatccaaatcttaatccttcttaagctccctggaaatttatatttataaaataatgggaaactgaatcatacaaatagaaaagctcgatcaggaaaatggtgcttggaaatgcttttctatgagaagaaatagatgagaagtgaatgagaatattctattcttttgttgttcttgtttgtgtctcttttttctttctcattctctctgtgtctctctagtggatgctatgaaaaatgtgtcccacattcacactacatgctgcagaccacattatttaataacgggagtctcagcagccgtcttcagtagtgttcgtttaattttctattaagattagcatattacttatggaggggttttttttggtattatatttcatgatgctttgacacgttgaggccttgctaatcctggagagactacctctcccacggctagctaattcctaaaaatagcaaataagagccaggcacggcagctcacacctgtaatcctagtgtgttgggaggctgaggcgagcagatcgcttgagtccaggagtttgagaccagcctgggcaacatggagagagcccatctctacaaaacatagaaatattagctgggtgtagtggaatgcacctgtagtccagctactcagcaggctgtggtgggaggatcacttgagcccagaaggcagaggttgcaatgagctgagatcgcgccactgcattccaacctgggtgacagcgtgagaccctgtttcaaaaaagaaaataaaaaacaagatagtaaacaatttgcctgtgtatttgcctttcgtatgcaaaccaaccagtccagaaaccatacttccagtcaccccctttatctaactctcaccaagccagtatttctttaccctaaatcatctcatgaccaagtaacagatgactagagacaccgctagaacccactgaagttactcaaattacccaaccttaagcttgctcactgaacttaccctatcttgtccattcttccccagaaaaccacaatacaggcttttccaggctttttccttgtctttcctgcctccctgagagccctggtgcttacccatgtggccctgtctgagatacctgttcctagagatctgtgctccttccttcatggcattcacgtccatgtctgcatgcattactataccgcactaagacaaatcctgggtacatttaaaaacaattagcaaccttggggattaaaatgaaagcaaatcttaacaaacccatatttccgatcttcccactagccctctgaagtaaatgtaatcgttcccattttacaaggaagaaactgaggttcataggctgttaagtgtcttgtcctgaggtatatggctggtaaatgattccaacttatatctgttaaactccaagatacagtcacttctatgaagtggactatgacaagtggcatttggcttgctcacaaggcaatagatatcatctccaaagaatagaatgtatgtgctccttaattaatgcttctttaattttctagaatgaatactctttttttcccccttaggtgatgaccatcagcagaacttagttacagagtaactgatgtgggaatatacatgattgtggggaaggagcacagggctgggaatctggtggtttgggttggagttccagcttccctgctgaccaattacatatccctgggcaaactgttgttctcttaggggcttcaacttgctcttctgtaagcagaaagcctgaattatgttggtgcaaaagtaattgcgatttacttttgcaccaaccttacattatttttgcaccaacttcacattatttttacaatttattatttgaacgatcccatttgagataaattaccagcacctctgagacccaaagtgttgtagagaacgtaaaatttatgacatgtctctccaatccatagagattagtagtttttacatactggttcatttttctggcattactaggaggacattcattgtaggttgcattcatttattcaataagcatttattgaggaactgcttggtgccagttaattggtgtgaaaaagacatcattcttgcgtatacaaataatttcaaatatttctgcaaaaggctctaacaaacatttttacaaagtgtgtttttgggtaaagcacctagtggcttaaaacctcaggttcttcatgtctgaagtgggcgtaagtgcctatttcagagtgttgttgacaactaaataagacaaagcatataaagcagttagtgtatcagtaagcactccataatgttagcccttattatagttttcagaaggaggaacagctggctgccaagattagttatggaaaacttttggaaggagatgatatttgatgtacgtctttaaaaaaataaatagaaattcaaggtgaaaaagaagggagaaagaactccatgcagggaggccagcgtgcacagagcactgagaggtggctgtttagaaaccaaagtgcagggatttgtcctttttgttctttctccttttccttttgctttagcgctagacacaggggctcccacctgtaatcccaacatgatggtgggaggccaaggcaggaggatcacttgagtttgagacaaatgtgggcagcaaagcaagactcccatctcccaaaaaaaaaaaaaaaaaaaaaaaaaacaagctgggcctggtgatgctcccagctactcgagacgctgaagcgggaggatccctggatcgcttgagcccaggagctcaaggctgctgtgagctatgatcgtgctactgcactccagcctgggagatggagcaagaccctatctctaaaaaaacaaacaaacagacaaaaaactattttttattgcttaatattttattaagataacatcataattgatatataatatatattcattacatgtattatttgtatttaatttgtctattatgtttaaagttgtagaataggtatgtgtaatattttattaatatttcccctttcccatctgcacaacacttgtcaaatatcccaagataaatgaatttctttaggattccctggcctctgcagacagtgattttcttaatctcattttttctcaagaaggaagaaaaggcaataatgtgactcatgttgtttgttcccttccagggctgtattctccagtcttgtggctgcctctagtacttggtttggttgttagagtgagcattatttaggcatggtttgtaatggttccctggagctatttgtggaagagcttatgtaataaaatacataattatgaacttgttaaaagagacattatttactcatttgtccaacatggctcctttcagtctacctcataagtaaatctatatttagtcagtgtcatattgatctgcaaccagagtacactttaatgctcctgcagaaatacgccataaaaaaaatagcttgataagaaaaattcactgcgggtctcatctcatttgaaaacggcagaagaagaaaaattatactttcttttccattgttttccctttttttaagacaataccagaaaaatgaactgtaatacacagttctgataatatcactgtagagaatctctttataaatgtcatgcattttatgaaatttagtgttagaaaataaatgactaaagattacataattgttggatctgtgtgtgaccttaaatgagtgttcattgtaccattttttctgtaagtttaatttttaatttttattaattaattaatttatttatttactgagaaggggtcctgctctgtcaaccaggctggaatgcagtggcacgaacacagctcactacagcccctcaacatccagggcccaagctatcttcccacctcagcctcctgagtagctgggaccacaggcacatgccaccacgctgggctaatttttaaattttttttagagattggatcttgccatgattcacaggctggtctcaaactcctggtatcaagcaatcctccctccttagtctcacaaagtgctgggattacaggcatgagcaaccatgcctagctgtatgtttaatttttttttttttttttgagacagagtctcgctgtgccacccaggctggagtatagtggcacaatctcagctcactgcagcctctgcctcccaggttcatgcgattctcccgcctcagcctcccaagtagctgggattacaggtttctgccaccacgcccagctaatttttgtatttttagtagagacggggtttcactatgttagccaggctggttccaaactcctaacctcaggtgatccacccgcctcagcctccgaaagtgctgggattacaggcataagccaccgtgcctggcaaaagtttaacattttaaataactgttcctcagcactgcccataatttaggtaaatactacttagaattagataatttaaggtaaagaatatgtcatatatacatgaaattgtattagaacaggaggtaaaaatcagagtaaattagaatttgtttaaaacacagagttaaacactgtgagagcagaaattattttataaccaccaatagtacaaagctaagctttcatcttaaagttgtatgtttgcatgtgaaatcatgcagagaattactttagtacttaaagaaaataaaaacattatgaataaatgtttatttatttggtacttaaaatctaaataccttagcacaagtggaaaagctctaactacaaataccagggcataaaacaaatcctacattacagttttaaaatgttttacagcttaatactgttttattcattgagtcagaaatttccgtgtgagtacgggagtttacacttgtaaatcagaaaccgtcgcagttaattttttcactctatggagcaaccactttcgtctgtgtgggagtgttggtctactgtagctgaaacagacaagactaggccagtggagacattaaatgtggctgaaaataccactgatgttcaactttccttcctatcctgtacttatattcaaaactgtcatttggctcatgggtttgggtttttgttttggggttttgttttttgttttgttttgttttctgcacagcctagaaatattagtaatcttgctgcttctgtgccctaaaataatactttagttgcctaaaataacaaatgaatcttttgagaagagcttatttatgtagcaagatactgattagggtatttattggatacaataactaagattaagtgcctgaagatttatgtatcaggaacttttcaactttgactccatccaaaaatactatgtcagtataagaacgtaaagaaaaatgcatttaccttttgtctcatagcatagaaagcaaaggttatttttgtcaattatgagtaataaaaaataagtttatttaaggtatatatttacatttggagtgagaggatgataagaggagtcatttgaagggagtaagttagctagaaaaaaactcagtgtgctactgatagcacctgtgcatggacagaggaattagtatcattaccaatttacagacaaggcaattaaatgagagaaggcttacgtggtctgtccaaagttaaagagttagtaacttgtggaaccagtattcatcttaagctttggcttaaagaccacaagctcagaatcggtcattctcatggccctattatataccaacagagttcctgaaaaagccaatgcaatttccagagagcaatttacaatggggagaagagtctagcccaatatggcacataattctgtgaaacattggatgtgtaagaaatttatcaatatgctctttatattttacacctaggagatgtgcacaaattcttggttaagggggctaattaacgatgtcttgaagtgaacattaaattctctcctacacacatctcgttgtctaaaaaaatcaatgaggactttattagcacccttttttatatccaattctgtaacctgggaaggtgggttctgcccatcgactaaacatggtaggaaacctgttttcttatttgtaaaaattgacattaatatcataggcctgttagtcccatactgagatgtaccagcaaacaaacttattttttttcaacatctcaatctttattttgaacaagtcatgatttcttttctttcatcaatatatatgagaagcttggcctgctatggtagtctgtgacagctaaagcaatcaacccctagccaagagtacttaactcttttctttgttgaactgctcactgatatgtggatctaggaaagtcatttctctgaagctcattagtttccagggtaacatctgtattacataccacatacaaatattattatcatcattgttaattatgtgaagtaaataaatttcccaactgttctaggcattacctaaaggacatggaatcactgggggcatgtaacatttaaaattattgggtgtctaaaattgtttaaaaccaggaaaaatatatagttctatttgcacttaactatttaaagtgtatctgctgcttgtcacccatatcttaaccttgtccattgatgtcagccatattcttcaaggtgtttaaatagcttagaagcccttcaagtaatcataataagctaacacactttgaggaaacatgtgctgattgcatgatatgtattatttcagtgaatcctcacacactttacaaactggactatcattatctccattttagaagtgtggaaatcaaggcacagatacgttaactattaagtcaatgtcaaaactactagggccgggcacggtggctcacgcctttcatcccagcactttgggaggccaaggtgggcagatcacaaggtcaggagtttgagaccagcctggccaacatggtgaaaccccgtctctactaaaaatacaaaaattagccgagcgtgatggcgggtgcctgtaatcccagctacctgggaggctgaggcaggagaatcacttgaacccgggaggcagaggttgcagtgagctgagatcatgccactgcactccagcctgggtgacatagcaagactgtgtctcaaaaaacaaacaaacaaacaaacaaaaaatactaagtcctggagtcaggattggagctgtgctcttctcttctctttctctctctaacttgaaaggttttctttgtttagaaagatacagcatgactaaggtcaataaaaataacaaaaataatcattataattataggtgatcgttctcaattgggcagtttaaacagtgtcttgtaaaattttaaagaaaaccaagaactttatgcacgcttctgtcagttagcttttgctacataacaaagtactccaaacaaagtggtttagaataaaactaaccatttatttgttcataatttttgggatcagcttttggggcttaaatcagctgggtggttcttctagtccccactgtgctccctcatgcccctgtgggtagctctcgggttggcagagggccaccggtctaggatggtctcacctgggatgggacttgcctcggttccatgtgttttgtcaccctccagcatcccagccccggctcatccacatgatggtggcaaggttagattgagccgaagctgtggaggtctcttgagacccacatttggaattggatgacatcacttccaccacttccattggctagatcaattcacaggatcatcccagcctccagaagtaaagaaatagactttacttcttgatggagatgctgcaaattacattgtaaggatcatggtacagtgagggaagaatggtggccatttttgacagaataaatactaccaactttagctgtgaaatatttttaagagttatatggcaatatacattttctgaaaatctgttttgttctattcacaggggttaggatggtataagtattctttaattgcacaaatatctgtgattagaaaagccaaaaatattgtcagtctcttaggatttgagttttggactgaagttatctaactgtgaataaagataatcctgcagtaataatttcatatttgatttatgtttctccataaagttacctcaggcattatccctgttaaaccaaatttaatagaacttcagttgttctgttccaaatgcttgtgcatatgtggagaattcccctgtacagttgtactgactctctcaccaagggatgttcgttcttttgtgagtttgttctaattgtgtcattcactgtattaccattaattagcaaattcatctttcaacttcactcccatgggacagattcagtcaggcttgggtaggtagggaatttaattaatatatcaacaaattgaattttttattaggtactttagttttatctttttttatcttggtattatatattagaaatcttatttgaactggagttacctaaagttgtttttattaggtaggcaaagaatccagctatttctccccaaaacactatatgaaataaaatatgccatcaatgttccttttgggttattttcaagttggccctctatctatttacatggattggaaattttttttcagatttaaccttcccgtattgatggaagaactgttttatagtaaatttatcaatagttgaatatataaacaaccactattcatgggttaagaacaaagggcatcagtgtgtgagaattcaattcaataggactaatctcaaacgcaattaatgctctcattctttctgtgccctttggtagtctgttctcccaaggaatttattgaaatagatacacttaattaaactgttttcagcacttgggctaagacacaatttaaggtgtgacatttcacttaaagaaaaaggaggaagtctattctgaataactgtttaaacatttcaacctggccccttttcttaaagatgtgcaaaatttcaggtagtggaaaatatttgtcaagtgttctttcttctccagctcctacttgtccacacgtacacacgctcacgcatggacacacagcacactcattacttctaaagtttcctcactgtattgttgaaaagttttcacagtatgaactattatgcaaagtaagcagattagtgcagtgaattggagtggtattttaggttgataaaaatcagttccactcccagcttctaactggctgcatttttttttcttgtgaaaataaagggcttctcaacatcaccaatcagttctacaatcatctgcttctatgaattctagaatctgattttgtcatgggctttatctgtccaggtttcccaattcatataactgtgagcagacacacttgccctaaaataatcatttccttatgtataatttttttctatatgctatgtaaataaatgtatgatatacatatgaagcaaaaggaaataaaatgtgaaaacaatgttccttcagtgctcagtgaccctataacttgcacaatagcatagtttacacattgcaatatcctgacatatgtctagacatatttaacaacaaatatgtcctgacatatttacatggagggatccaagctttcaataagaattaccaggactttaaagttacaaaactaaccaccaatttattacatttcattacattgaagggaaaaaaatctgtcctcaagaatttttgtctcttttttatggaaaagcatcccctttttgaacaaatagacacttatttttatattacattttgtgcacaaattttagttttattttgctttcaaacctagacttaatctggaaaacatcaaaaagaaaaggggtacatttaacttcgttaatagtaagatataaaataaccatcaatatttccataataacccaaaaagtgttatcaccttaccacactgatatgaggctgcgtatttcaaatatgttttttagacgttagttcctattctttgtcataaaagacaaacatgtcagatatgaatctgtaggaagagtgaaaaagggtcaaatcttttccaaatgtatcttaatgcttgttaaagtcactgttttatctttgtaagttcctgcactgcattcctcattgtattcatttctctctaagcaagctaagaaatcttttgttttgttctccccttcaaaagtgttgacttctcctaaggtatcaggtaagaataacgcataattacctccactgtgacatggttattattttactttccccattaacacagaaggaaactgaggaagaacatgacttgaatctaagtcataaacttcagatcttgttgggattttgttggttggtttgttttgtattacaccatgaaatacacacaagaaagtacttcacattgtgcaaaatactatgtaaatatcaacagttattattataaattttgaaaagttgtccacattcttactaattcctagtctcttaccttacctttttaaattaaccaaattgatatgagaatcccagtctgagactaaatgtgacacatagaagacttccaagagtgttcaggcccctcagctggcagggaacaccagcatctggtctttgaaagttagttattcacttccacgtcttctgttctgccagctggtctctggagctggctcattcacacatagtggtcagaaccctaggactccactttaaaaagcctcagttcataaactgtgataagaccagcctttactccactccagcccaaacagtctataaactttaacagagagaaaagcaaaaatgtttcaagtcttctcttttgttgtaattgagggtcacttcataaggacccagggaggtctcctctaagaaacacaaccttatgtagaagctgaagaattgggatttaaagtcagaagatctgggtctcaaaccagctttatcaaactacttaaactctctaagcctcagttttctcatcgacaaaatggagatatcagtatgtaccctgcagtgcccctgtgcacattatagacaccagatattaaagtcactccatatagaatagaaactaccattatcaccttttgcaaattcagaatctgagtttgaatttttctattgaatgcagtgatccacactttgtagaatgaggggacagaataacaagtgggaaaccaatgtggtcccaatgtcagtaagtacagaattcaaattagccaacactgtgttttattttattagtattatctacaccaacacttttgtaaacatgagcatattgttatgttcaataatgttcaaaacttatacctctttctgagccttaaatcaatgacctcaggcatatttgtatggaatgttgtctctttatatcccatttcaaaatggcaggagattgaaacaggaagtaaacagacaataataaatgggaatctatatgctaattgcagcccatggtgaatcctggaatgcatctttctttgagagggcatgacagcatcccattcatctatacggccccagcgacagttgggtgatgtaactactacaacagcctattagttattctgtctcatcattgttcaggaattttgaacactgccttcaatggaaaaattcaagctcaaactatgaaaaactgctatcatcccctctaacagaacaaagcatgtctactgtatcctgtgaaacattaaaaagaagcataaataaagcaagtaggatcagtggttaagagcacaggcttcggcatcaaggagacaccagttctgatcttagctctgcattaacttacattgtatcctagaaatgacttaatctctcaaggccttcattttcttatctgtataagggacatgatacaacttaccttgaggtgttgtggagagtaaaagacatatttgttagtgccaggcacaatagcacttcaccaatatgagtggttatcagtggttgctatttaaatatgggataatatttctttctcactccataatttaaacacaagcatgtggtaatggttctatattgaattttaactctgatttgtattctatcagagaacgtgatagacacataaaatgctctcatttcgggctgctgagattcctgaaactgctattttgtaagtgaaactccagtgaactgaaattgcttgataagatcaagcaacccttctgactatgagagcccttttcctcctgtaaaatgggagaagttaagcattttaaggcagacagcatagctgcaagataatttaaaagatgggtagttggttctgctcctttacttcatacaaaccaaaatcaaactgtccattcacattgtacccaatgcccactttggataagtgatacagaagcaactgcttgaggctgaatctttcatgaggtggaagaggtaaaaatggcagggtttgtttggggctatcaagacatcacttctttgacaaagacttgtagaatcccagtgcaccccgttattctgcagctacagctctctgctctaaggtgagctcgaatctacttgttaaattgttttttacagagtttgcaactctttctgatgtgggccttgcaaaagttgtgtccttttggtgaccgtcctgtacccccaggcttctgcacctgctgcagcccttggtaacaacacagcttggcataagttctacatctagaagctcagtgtgccagaggcaaagattttcctgagagacctttgattccccagcctttacagcagtggctctcaaactttactttgcataagaatcaccttgggatactctttaaaaatgcagattccatggcattctcaacctattccaattcagttggtctggggtagaattctagacttcgtatttttataagcatcacagtttattctgatgaaggtggttactctggaagacacctggagaaacgctatagtatttaaaaaattcctgatttctaaaatatgtgatcatttaaaaaatgatatgatatagatgataaatagcctcatagcctgaattgattcacatatgctaacatgtgtcagaagcattactgtgtattggtgtctttaacttcctttttcaaatatgtttgggggtgatagagtaaccacaacggcaataacatgccctttaaaagagtcgactgcttttcaagcagagatatagatattatactgagagtaaaagctcaggctttggagaattgatgagagcattttctagttatctgaccctgatctgctatttcctcatttacaaaatggaggcgaggacttcctgactatcaagggcctgtccctgggccctggcactttttaggtactcagtgctagtacccacatgggtagtagggacagttacaagaggcactgcctctgtaccagacactaggggctctttacacccaacttttccccatcattctgtgcttggcaggcttagaaacatattgatctgggaagttcttcacattatctgaactcacaaacttttacttgaaacactagatattagaacataatttctaatataaaaggaagacacaccaagccagtgctcattacagttatgttatcaagcaaatgggctcactgccctgatgtgcacagaagccaatactatgtgacaccaacttttaagaaaataaaggctttgttagcaaaattggtcagcaaggagacaggagcagacacaaatctgcctcccctgatttggggtctcgtttcggaaggcaagagaaaggaatgatggcttggcaggatctgattggaagactttaaattttaccatttccagaaaggtatgttgaggcagattttagaccctgattttctgggtcagtggatacctggcttccaaaagtttgtcattcaggttctgatgatgtcccagtcttattggttccaagaggaggattcattggtttcaggtgtttaattagaagtcaaagttttttccattgcgcatgcctgaaccacatgacttctggtttggggctctgtaatacctaaaagataactcaacattttgttatcaacagagtaggtccagtttacagctagatttctgtaccaatgaggcagagccacaaaaagaagagttcaatcacatcaacagtcagatgaatttcccctaccattctggagatgacagatggaaaactatcaccaaacaaacaggcccagcacaacccctcttccctggacacagggccaagaaaacactggcttgttctcacatacgttccaagtcctcttcattccaaactacatgagtaccatcacccttcatcataggagtccagcttgttcaaatcttctgtattgcttactagagtgagaagtgtatgattgtggtaccagatctgaagagggcaggattagcattcttctgaggaggttcaggatggaaattacatttgcattcattgaaaaccaaagcacttcaatattggtatagataacaaaggagagagaaacagagccgatctatttttttttccaaaaagactccgtaatactttgctagactctgtaataaagtaccacaaacagaggggcttaaacaacagaaacttattgtctcatagtcctggaaactagaagttcaagatcaaggcatcaacaagggcatgctctctctagaggtagtaggggtcggttctaggcctctcttctagtgattggtagttccttggtttatggcagcataacctgaatattcacatggcattcttcccatgtttgtgtctgtgtccacatttcctatgtcaataggacactagtcttgttgaattgggggcccataataccctaataagtaatggcctccttctacctaattatgtccacattgaccctaattacattcaggtcacattctaggaaactaggagttaggatttcagcatatgaattggggcagggggagggcataattcaagccataacagactcttatgggcacatttataagaagatcggttaggacccaaagttttgtgttgtacaggaaggtgactttagcctaaatttttattatttgtgcaacaacaaggtggctttagccaacaatttttttcaaaacaagtattatctggtgactaccatttctataggcgtttctctgtatgacccccatggaaatgtcttgtttttaaaagacctatatccataaacagctaaatgacttgccctgatgagtgggatcatataatattcaccacttaaatggtcctgactttgtgtaaagattgattcctgaatattttcccagaagtaaaccaatcattttaacgtaagtgatatgtcagtcttctaatggagctaataagcaaatgaaactaataaaactgccctaactaaaattatcaaaatttaccttcttgcaaccatgagggaaaaaagcatctctaagccaacttatttttcatagaaattgacacttaaatcagaaatcactgtaaaatgcttagacctcatatgtaaaaggcattacctgagattaagggttagcgcactcacattatgctcacaccttgttctgttcacttgtatatactgcagtatgattgcttttcagttttacttttacactaacctcatatgacagaatcatgtttgaatcctgtgtgtttgacttggaactcctttttgccttcactgaagatttctgcaaagcagattgttaaattctcagtttatctttctggaaaaaaaattagagttttttggtacagactaacaagacttaagatactgtgattaacaagaggaaagctcctaaaataaagctcgaaggcacaaatttaaattgggtaatagtcaagggtatgattaaaaacttgctcatttgcattaattaaacagccattggatatcattaatttatatcaggaattaacaccacagtctatcaatcagaagcaatctaaattaaaagtcaagaacttcctagttcttgaccatgtgttttccttgtctagtgatagggttttttttttgttttttctatcctgtttttctgcccgattctagtggcttaatctattcatatccaggtttttgtcacaaacaaaatggggatattaattctcatccattaccattaagattaatgaacatgtgaaaggcttggagacttgtcatggtcagtgtaagcctgagcctcattcatgttttgggtcaaatgtgttcttctcaaaataaattgagtgataaaagattgttcataaatgttataggagtttggagttgtgccaattataatacaaatctagatctctaaaacattggatctcaggaaaatatttggagagaagtcccagattatatcttgtaggaagcaaagatccaaggatttgatgtaaggaagggctttcttatttttgcttctggagaacatgtcactaatcctagagacacattagggaatgactgggctggccactattttaaatcagttctagttttctgacagctctagtggggtattctaattactcttccttacctgcattgatgactcaagactaggatgatccttagtattggaagggcagctccctggttagattcatccaagaaaatctaatagaatgagccaggaaaattctagatgtatgtctcacctgtgcctggatctccttattcaatagatattatgtaactagactatgaattaaaatcaagaagtatctaacagagaaagttttcaaataagacattttctaatagtccttcatttcatctgcttcttaattctctggctgaaggtccagttcattctgagctcatattaccagtgatctattctccacctgtgctcagctgcattctgacctggcatcagtgcagcaatgcctcaccatcttagttattgccactgatgctttttttaacccaggttaaagctcccatcttccatcaaattcagagatagcccctctaactgattaactcttctttactgaatatgctaggaaacccttaaaatgaagtaaatttgggaaccttttaaagaagaatggctataatttcctcttctcatttaccctgtaattcccaaatcctatttttaaaaatgaccacaaagctacataaagtgttttttaatagtttttaacatgaaaaaagaagaagtgtatatgtttgtgtccatgaatacctaattgcctttgattctccatctcatgtgttatgtaaactctggataaattgaaaggatatcctgttttattaaaaacattatagatactccatcaattggataaaaattctacttgataatgaaataatatgaagatgcagagaatgaaactgactttccttgaggtcattataatctagaacactcacttttcctatttaatctacacactagacacattgctgtgagttcgatatcattgtgctcattttacaggacataaaattgagtctcacaaaacataacatacctaaaatcacatagctacctggttatggaacttggatttgaaaccagatttttctggcactgccattcctttgctattctgccaagatgttttttcctccctgcgtagctccatgaggataaaaatgcaaacatcgtttattaaatatctactgtacacctcacacacattatcatataaatcctccacgcactacaacacagttactgtcattatcatcttacacatgagcaaacttaggctcagatagctggggtagcttcaacaaactaaaaagtagcacagcaaggatgcaatccccagtacagcagatcctcattattcatggattctctatttgcaaattcacctactcactaaaatgtatatgtaaccccaaaatctgtatttgcagagcttttacggtcatttgctgacttgcacagagcagtgctagacatgcatgtttcagctgaggttgaacaaggcagagctctgccttcttgtttcggctgtcacactgtcaacaagtgtcctttttgtggtccatttagtgccattgtttctgcattgatgtgtttttgtggtaatggcactgtttaaaatggtccgtaagtgtagggctgaagtgctgtctcgtgttcctaagtacaacaatgttgtactgtgctgtactgtgctgtgtgcagaaaacatgtgtgttagataagctttgttcaggcacgagttatagtgctgttgactgagttcagttggaatgaattatacagacagagtctttatttttgtatatcatctttaaatatatatatatatatatatatatatatcaaatatacaaggggacttcaaaaagtacatggaaatagaatttaaaataaaaatataaaatataaactttatttctcaacataagttccatcaaggccaagacacttttgtaactgatgataccagtcatttagtccatccctaataaactgagggttctgggaattaaaccatgtccatgcattttttttacattattaagtgaagaaaaatgggtgccctttaaagattatttaagattaggaaacaaaaagaagtcagaaagacccaaatcagaaccataaggtggatggatgcctgataatttcccatggaatccgttgcaaaattgcccttgtttgatgataggaatgagcagaaacattgtcctggtggagaaggactctctgttgaaggtttttggagcattttttctgctaaagcttggctaactttctcaaaacaccctcataataagcagatgttattattctttagtcctccagaaagtcaccaagcaaaatgcctcgagcatccctaagaactgttgcacgacctttgttcttgactggtccacctctgctgaaactgaatgactgccacctcttggtagctattgctttgattgtgctttgtcttcaggaccgtactggtaaaggcatgcttcatctcctgttacagcttttcagagaaatgcttcaggatcctgatcacacttgtttaaattttccatagaaagctctactctggtctgcagctcatctggacacaatggttttggcacccagggagtgtgggaagtttgtccaactttaatttttcagtcagaattgtgtaagctgaaccagttgagatgtctagggtgtcggctgttctttgcctgttaatcattggccctcttcaattagggcatgaagagggcaagattaatttttttcctcaaaaatccttgtggatggtctgctactgagggcttcatcaacatcatcttatgtcttcttaaaaccagttatgcatttgtgaactgctgatttctttggagtattatccccaaaaatgttttgtgaaacatcagggatttcagccttcgtccacccaagctttaccataagtttgatatttgttctttcttcaatgttggcagaattcacattactctcatacggacttttttcaaactgatgtcttatccttcttagtgcctcaaactatatcctattcagacatattataacaagttagtacaagtttattttggtgcaaaaaaattttgaaatccacgcagtgtttaataatatgtatttccatgaacattttgaagaccccttgtatataagaatatatactctttagagaatatagatatatgtaaggtatatatatatgtgtgtgtgtaaagtatacacatatatatatatatatataaactgtatagtctttaaatagaaatacacataaaacaagactgtgtattaatcagctgatgaaaacgtgaccagaggcttgcaggagcctaaatctgtatttcctctaggaccaatgcatcgttcagtattcactaatctggtgtttgcagtgaccttacagaacatattaccatacataagaattggctgtatttgtgtttccagtgggcaagttcttctactacccactgtctggccttacatacattctgtgaattcataatgttctgatttgtgtgatgcacctttgcttttaatttatattcagatttcccatgggtgacggttccctctccacagccctcctgctaaccatcatcactcactcaaatgtgacaccacactgccactctgcatttttgctgagatgaccaacaaattcttaccatcattatgaggaaaacacaacagagcacacagtaaagcaaactcatcaaatatttacttaaattgatttagcttagagcaagtttatatacataaataatttttgcttagtgagagtcagattcagaaatgaagatgcaaaatgtgagacaaaaagaagtgctgggggcagggatggggagagattggtcagcgggcccagagttacagttggataggaggactaagtcctggtgctctgctgcacattaggatggctatagctaacaatgttgtgtttttcaaaatagctagaagagaggattttgaatgtttgaatttccacaaagaaacgataagtgcttaaggtgatggataaactgattaccctgattttatcaatacaccatgtgtacatgtattaaaacattacactgtaccccataaatacaattttttaaaaaaggtacctgaggctcttttctaagcatcttcattcagctattgaattcatacttgggtctaaagaaacaaacacatacatcacagtggcctcctcttactgcatgacggtttcttatcttcaccatgaaccttctggaatgtagccctttctctgaaggagatcacttctctcctgcaaatttctctgctgagaaaaacaataaataaatcagcaaggatgataccctcaacattggcaagggtgctgaagaagctggaagcctaaagggttgtaccatccaggcctcctggagccattcagtgactagagttctgtgaaaacaatggcttgtctccagcctgcgtggcccaaggaaagatgccatgaaccagcagtcccaagacatgggctccagcctggctttacaagccactgattgttctaggcaagtcactgtacctctcagaatcaaacttcttcagctgtaaaatggtggaattctctgcgtgtctacctccagagattgtgttaattagaggagatactaacaactcactgtgtagaggattttgtagtcaacaaaacattattcatacattatctcatgtgatactcacatctgcattgccagttaaatataattataattataattgtagccatttcatgagaaagtcctttcaaacagaaagctactgcacaaatccttgtactataaaaggaaatcagtgattttgaaggcagcaaaaagaagagcgttagtgtctgtaatctatgtaaaccttacttcacgtgaaggaaaaaaatcacttaaaaaattcgtaccagatacactattgtctcttttaaattaaatggattattgcacaaggtgccaagccaaggacactgggcctgaagttcaggtcacactctgaccactaggacattcacctgggtgccaggatttattctaaattgcacaaagttgccatacaggccagtgggggagtaagctaatgactcaagaaataattattactgtaacagccatgagatgcatatagagtttgtgttccccactctataatgtgatctttttgttttaaaaatgattttgttcttacttcagtctggataggctaggtgatgcagcagtaacaaacaaccccgagatcttggtggcatatcagaacaaaggtttatttctcactcaagctacctgtccatccatgctggcttttgctgactccatatctgttactctagaacccaggctgatgacgtagacaccatcttgaacactgccaatcaccgaggtagaaagaaaacaatgaaagagccctggagagtctcataccagcaagaaaaagcactgggctggaattaacacacggtatttcactctcagttcctcagtagtccaactgcaaggagtgaggaagtacagtccaacaacatgcctgcaagtgaagggaaccagaaatattttgcaggtagcacatagcagatatgaaagcatcttaggagttttttcttactataagctcattaattgttccgtgggacaagattgccaaaacagctaatgccaacttaagctgcattgtagaaacatagaatctagaaccaaggaggagacagttctctttctaatgcctgctgcacacacacttatgcagagtaatcctttagggactgacctactctgagagaatgcagcattctcggtcctctgacaccactgaaatgctatgaaaaaatgaggaggtcccttatgatttggggacactggaaatgtgctttatatatttttcacccttaacacaaatacatgtatttattatttttcattagttatgtcaagaaaaattgaaactttatgaagaagaagatgttttttcatagtggggacctcatctgaaaaataactatttctagaaatgatattctagaaactatattttagaaatcttatgcctttacatgagatttttttttgtcttcagctaaaatgacagacttaaaatataataaggcagaaggagtgtgatatagccttggtgtctaaacaggggagactgtttcccagaaggtgaagttatcccagagtaaaacatcctggaaaatgaagaagcttttattttcaccacacacgtacacataggcctaaagaatattctccactcctggaaagaccgatggcctgaagccatcccatcctccagtggggtttgttgaatgccctctccaatacacatatatcctctttggtttaaaaaaaaaaaaaaagtctagacagatgagtttaaaatgagatttttcaaagtgctgttaacaagtgtgggaggagtaaccaggcagatataaatgctggccaatggggattacttacacagaatgtgctgaaaatgaggagtgtttcaagaattgtttccctgctgtattgttggaatgctaaagtctaaatatggtaatgtgaaacactatcatatctggtgggaactggaatatgctttattttacaatcccacaggggaaaaatattttggcagttggatgagaatctgggagaatgaagattcatgctgacatcagtccgaattatgctcatgaaatgatattcatctcaaacacagatgtgtttgatacattgttatttaacatacatttaattattcctttcattaacttttcctaattgtttctaatattatttgcctttggtggaataatcttgttcttttattatctcagaaaggcaggatagggaataatttgatgaggtgtaagcttactttccaacacacacacaacaccttggagggcctggttatcaacggctattttatgtagaaatatcatgagaatatttattggtgtttgtttcaattttggcatccaaccattaatattttaatttccattttgcagtagctgtattaagcataataaccacttgaaacgtgtagcctgaataggaaagaaactacagaagccaaggagtattttaattacaaactccacttcaggaaaaatgccagcaacaagagtatggttgtgcaagtatttagggtagggtagactgctgcatgaaaaacgtttgcagttgggtgatctccccctgctcaataacacaaggttagaaggatagcctcattgacttacaaacaaccagacctgtgcaaccttgcagttccactgccatgtgaaaagcagagataaaaagagtgctgggataatccaggttaaaagacttgaataaaaaagatgacagtaactcacaaacagaaaagcatgactcttcatcccaactcacttgaaaatcaacactttcacagaaggcctccaagactggatgggatctgtttcaggatacatttggtgacagatattctatgaccttttgtgtgagagagaagatgcccaagttactatcagtgggaaatgaacaggaagccagggatggtgtggtagcaggaaaagaacttgagatttggagttgggcagacagattcgtgggctgattttgcctctgagtggctagacaatttggggcagattatttagtttgtctgaacctccgtttttttaatggtaaaaccatactttttcctcatggggtcactggaagatttaaacaagttaccatatgtaaagactgaaaacactcagtaccttcccttccttatctagagaaaaggaattctggaactgctcttcttattttatgtgtgagaaaactggtgactagaaatgcccaagtcctgctccaggtcacatggctggattccctgtgcccaggggagggctttcccatgacctccacccagccccacagtggatctcacacaaagaaatgggagaagaacagatctaactgggacaatctgaggaccctccccaccattggtgttaagattatggacttggccatgaacagtcccatcagtcccatccttgactcctgacacgtgtgccagagacactctcctcacactctagcattctccaagtgatacctggaccatcaagccaggagccactaatgatcatctaatccaagaagggtatctcctcagaacaaaacccatcagtctcagtagctgggcatcccttggctaactacttaaattcccttgacctaaatgatcagactcatctcagaggattgttgagagtgttgcaaaaaatgtacctaaaagtgttcagcatacagcctagcgtataaatgcatagcagataataaatattattttttgaactcttaccattattggagatgacagtaagaataggtaacatgtatgagtgtactctgtgccagacatcataataagcatctttcacttcaatctttccaacaagacaatgaggaaggtgttatttactcatttttcaggtgaagagtctgaagccagaaagggtcaggcttgggggaagggagacagggagattcttctggacattgcctggcacataaggtagcacgtagctacattaaaaagaatgtacagaagcctagctgtgtctccatagccatgttgctaagactttggctgaattgttcactactagacccctagagcctagcacaaggtttggtgtatactagatgttctgcaaagtttcattaatttgttgagtgagaaaataataaacactgccgtgttcacatcattatgttgacccaacagacaatctcagggacccttgggctggtgtagtcaatcacaagggctatttgtagagacagctccccgctgtgaagccaaggagaatccaaccatgaagagagaggaaatattactaagcagaaaattaaaaacgatcctattggctgttggccttggcactgtttctgaagaagcaagttcagaaacatttggcagtccgtgtcatcgcctctcataaaccccaagaataaggaaggcatcagaaataaatttttattttctgattaattttctatagaaaggtttttgcccaccaacaagatacaaagggcaacttaaaaggcatgaggttattaaaaatcaatgctaaatgttgtcatcagagggtttgcttattttgctgttattaaaaattcacacaaattgggcgaaacattttcagcctgaaagagatctcggaaaatggctttcttatcattaaaatgcaagctaagcagagtgatagcaaatgatcttttcctatgatcagtttttcctaatcttggggtcagaaaaataaatgtcagaggaaataatagactttatttaataaaataaaataaaaacaaaatgacctggctattaaaatgaaaacacaaaaaaaatgtctgcttgtgactatgtgaataactgaagcttcgttttaataaaaatttttaaaaagtttttcgactcttttattctgatcaaaaaagaaaaagaaaaagaaaaatcccaaaggtccaaatcgcaactctatttatctattgtaaaccaacaagagccgaccatgttgagagagaagacaggagaagtgttagctgtggtgaatagagaatcctttaaaacaacaccgaaaaatatattttctaagaaagcaaagatctctgttgcagacatgtttcttaaccaagatatagcaatagcttctttaaaatctacttctcatgtactgactaacccattcattcctaaaaagtattcctttcatatgaccatgtttagcttagttctcactttaaatttaaacaaggactaatggtactccaaactatttgctttctttcagtctaacccactccttaaggaaacgagcaggagagacatgtcctgcaatgccatggcacgtgcgcacaccccagaacacggagcagtgctttcatggtcgcctgccacgtcacacactggcactgacagaaatagtaacaacacaccctctttgagacagtgattgctttagatttttatacaacttgtttaaatagaggaaatctaaatttttaccaaagcaattgccccccttcaggaggtgggttttttttgggggggtggggcagggtgtcaaagaatgtttagttcagtaccttttctagaagccagtacagctaaatctataactttcctattttacatatttggtaattaaaaaccaagtgtgaagagcttatggattttattcaacgatgacatatttttttagattctgtaatggcccataaatttgcattaatgaccacctgttccagaaaccttggaaacaggaggctggaagaacatccgtgagtttttatgtgtctcggatacctgactctgggccaaggtggaggccttggaggagtagaaaggactctagtgactggctgattgttaccatttttggccaaaagaataagtcaggcaccagaatgtgtaaccaggtaatgtaattatggttaatgtaaatgtcacattttaaatcctgtaggaattcacaatagttcaggttttataacttttttttttttttttttttttttttggtgggaccaggaaacatggaactgacttgcacgggaggtcagactggcttaatttgtatttcctttcaaagttgtgtgagatacaaatatgcaccacaatgtacccatcactgtcttcttaaaaacttgtagggaaacaaaaatatgagaaattgcatcatatttaaaagcgctagaggaactgactgtataaaggaaatttttttggatggagagaattatgtaaagcccagctctaatgtagatctaaaaacaaacaaacaacaataacaacaaaaaagacaggcctaagaggtgctaaaaaattgggagccattaatcttattgtcaataaagaagtaactcataagcaaatagctcctaatttatctcttttctatgtttaacccattaataccatcccccattatctgctctttcacttttttggtttcagttacccacagccaactatagcttgaaaatattaaatggaaaattccagaaataaacaatgcatacgttttaagtttcccactgttctgaatattgcagtgaaatctggcaccatcccattcagtcccacgagggacatgaatcatctctttgtccagcgtctccacactgtcttccctcccctggtgtgagtcacttggtagccgccttgattttcagattcgttgttttggtgttgaggtgcttatgttcaaggaacccttatatttcttaataatgacccaaaggtacaagaggagtgattttggtttattgttataattgttgtattttattcttagttcttgttgttaatctcttactgtgcctaatgtacatattatactttctcatagttatatatgtacagaaaaaaacatagcatatataggatttggtactatccacagtttcaggcatatgctgagggtcttcgaacataccccccagggctaaggggggactactgtaacagtacgtcttctagcagaggactaaattttagaacaactggaagcactggcatttgaagtatgagaaatagtcagggcgaggtgtttatttgtagggcagtaactctactagatcaaaaccatggcctacataatcttatttagtcacacctcatttcccctgcaatgctgggagacagaagagacatctggggaaaccgaggctcagataggtgattcaaagcctaaatgctaaagccagtattaaaccttattctaaaaatcattccatttatccttctgaagtttctgtgagaaaagggtaaggatgtactgtgaactcagaagtattccatgtttacaggtataactaaattcatttttattgtatctgttgtattaatactagggtatcaataggcacaaaattctcatggaatcagacaccagaccacctcatgatcactggaagatgtttcttttctacatgtaatactgaagctaaaaattagtttctgctactgaaaatatgtctctgttgaacaaaaggaggccgttcttttgtttgctttttttttttttttgcaatatcactttactgtgacccaagaacttaaaaaaacaagttaatattatcttgtcattctgatatgtccagatagttagatctctttaaagaacttcttggacccttaaagcttgttttatgaactatggaataaaaattctggtattgacctattaactctttttttccagtgtttcaggaagtttctcttcctcccaggaattaacaggctatcaaccagacgcaatagaaataaggattttgtggacaaaagctgtgtgttttaaaagtcagcatataccacaacatagataaatcttgagggcattattctaagtgatataagcaaatcacaaaaagacaaatactgcataattccacttatatgagttatgtaaagtagtcaaactcatagagacagtcaaatggtagttgccaggaggttggggaaaagggaaatgagttgttcaatgcatagagccttttagtcatgcaagatggaaagttctagagatctgtacagcaatgtgcatagagttaacaaggctgtactgtatgcttaaaattgttaagggagtaaatttacgttggatatttttcaccacaataagttaaaaaaagaaagacagcatgataaatcctcaggatacctgggcacaccttctgagaacaatgttgaactggagatcaaagagtgagctataaagcactacactccagtggttctgatatttcaagaccattttgaactcacatcaggtataatgaaccaaggacggaattttttaacaatctctgggagcgtctctcacagttcaacaggacatttcagaatatccattccacaagcattctccaaaaaaaagaaaaaagtactaactttgatttgttgctaaatgcctaccatcctcattgagcggccttactttaccagggccaattgatccctaaggctctgcagtgttcctagggaaccttgataaacattattaccttgagccacaggggacatacaaatgagaaacactaatttctatttgcaagaaactctgattagcaaatgaggtagtagagtacacatggatatttcctgattatttctctaccctatgccaaaaaattttctgggacaccaagactcaaaaacttaaatttacatattcaagctctctgaaaaatgttatacagcatcctacctcctaatgattctttgaaaatctacactggtccttcaactctttgggtaaaattgaatccttgggagaaagcagtgatagtggcacacaatcatattaaaacatgtagaaccagtcaattagttgcagatttgagatgttaataagatcagagattcgctgagaatattgaagctagaagacacctttgaggtcaccttgtccaatgtctccattacacaggtgacgaaactgagaccctgagaactcttcttgtccagtattaataacaactaaagaagggattaatttctgccaaagtgtttacgttagctcaactgtagtagcccctggctgcttcttattaaactattagtttggcctgaaatttttcttggttcctgtttatgggggagtttaataactgctatctgcagtaataagagatataataatgtttatcttcttatttcctctgaggatcttggaatgtgtttcatcattaattaaagaatcctctgagtccccctattagataaatattattagccccatttataaagaaaatgaaattctgagagattagttgacggagcagcagcataccctgagttaatgtttacagtggatgttctataaacctgtaatcagcaggaactttgtgatttcctctgcaagtattttagtccttgaactaaaactcagaagtcgatattcagctattgctttggacaagaattgtgttaagagacaggaactaaatattaagactagggggcttccaggtgtatgagacagtgcctgttttcagaacatgtagagacatcaagacaattgcataaaatgctaaaatatcaggtaaaaatctgtattctaaaagaaatgctatgaagattgaagggagtaagaatataaaccaaggtgaggcgatcagggaaaactttaaaatgaaagtaactttgagctggttatttaaagatacaaaatataccagtggttagattttggggcattctttcattcattctacaagtatttcctttattttcacttcttccttctgtaagtatttcctgagaacatactacagggtgtcgtctaaactctgaggtagaaaaagtgaggcagagaaggcaagaatggagacagagttcctctaacatccttgctttcccccagggatatgcaaagaaaagcagaaagcttttttttttttttctcctgaaaattttgggcatgtaaatagcctcaggcatgtcaaaaactagtgaaaaatgaaacttgacaagaaggttggaagcaccttgttcacaggccttaaaggcaaggagtcaagtcatattgctccaagagtaataaacaggaggttaaaaggacaggaaacaagatgcaagaagttagtggttggctttgctgcctgggtagcaggatgagaacttgttccattatcagctgcagaggggcaggacaagaagtgagctgaggtagaaaaagactacagaaatggattaaaatggaattggtacagagaagagcactaggaaaaagaacccaatgaatgaagcaaggcttttcaagtgcctgttttttcttctttccccctttcttcctcccttccttccttctttcttttctccatccttcccttcctttcttccttctcctcttccttccattcttcccacctgtaaatacttactgagtgcctcctttatgacaactacacctgtgaaaaacagcagatcttagacaacaaataaacagataaataattaacacattcaacagcggtaaggtctctttgtaggtgggtggcagcttggattggataggtagcaaggagctttctgagaaggtgatagctaagtgaaatgtaaatgacaaggagccactcattgaacaaggagacgaagagcatttgccctacacagaggaaccatatggtgcagaggccccaatgtgggggcaagctaggagtgtctccataacagaacgaaggctggtgtagtgaactagagtagaaaaaggagattgtgaataaaaaaacgtaggtgggctggatcgtgcagggtttgtaagccagcaggatttgtaagccagggttataatgggaagccattggagggtttcaggcagtggtgtgaacatgacctgatttacatttctaaaatagcagtctagatgttgcagaataatgagcaaaaatgaaaacaaggagctgagaagagatgctcttgcagtattccaggcaagagattatgctggctcgaactaaggaggtaatcatagtgatgaagagaagtgaacagatgcaggatagtttttggaagaggaattagtagaactggaagatggatttcctgtgaaggttgaggagagcaacgaggtagataaacatgccatttaccaagatggaggaagactgagggaggatctttgggggatagaaataaagattccttttttatccattttaaattggagacggcttttagatgtccttctattaatgtcaagtgggcattggataaatagttctggagttcgaggagagatcacaagtagaaatctggattggggaatcattagcataaagactatatttaaggtcaagggtctggatgagatcccctcagagagcctatagctagaagagataatgaggtcaaggacagagcccttgtgtgctccacattctgaatttgcttagaagctggagaaaaaagtagactgcacatgagaccagaggtggaagaaacacaggatacatggtcaccattgtcttattagatagaagggcacagtgggctttcaccacgaggactaagggagtagagttactccattggagggcacgttggccactacagaattcacctggaggactcagacacaggataagtccctgaatttaacaattataagaagtcttttgagaaagcagttcaatcatatgctgaattttgaagccagattttagggagctttgggaataagcaccgtgtgagaaagtagaagcaaaagatataagcgagggtctcccacagtttggggctgacacatggcagtgagggcgatccccacttaaggagagatgggttgagaaaggattagactaaaacatgcttgtagaggtaaagaaaggagattgggagaatctcgatataaataaaactggggacgacagataaacgtagattgctgagaagctgggaggggtgactggagcaaggctggaaagcagaacacaacttaaaaggtgggaaaatgccttttgcaaagatcattcataatgctatagtttagcctatgtttggctaaaataaagattgttttcacacattttactgctcttaagttaataacgtgaatacaacgcaaaacatttatcacacaccagattttactagcttacaatgtaagtggtggaagatctgggaacagatttcagaataatttcatgcctagattcttcctctacctgtttcctcatttagggggcccttctcggtttaattgtctccagctgatgatcaattaagcaaactgattgcagttgcatttgatggcagagcagcattgtgaaaaaaacatcatgttggaatctaagctatgaagggaaaggtactagacaacccacagtgtgtcattgtcacgagcaaaggaggagtcatttcctctctactcccacacatgtggttaaataatttgtatttgagcataactgtttttctgtgacaactggaatagacaccgtcattgttaagaataatcaagtcaaggaaaaatgtagagcaccacatgtagatgattcttggaatgattttagtaggaaatagaggatttttaaaacttttttaaaaaatttctcattttagatacattttagggcaaacatttcaggtatagaaaataaatgcttcaaagcactctcggcattagagtcattattgatgaagtcattatgtgaattatgaatttattcttgcgaaatgatagtttcctgggaatcttacctccaagttaggaaaggccaaagttaagcgttgccttgctagtttaagccagttgtttaggaattctatacaatatctagaaacaaaaagctaaacattttaaggtattaaggcgagagtgttcggctctcaatccactcagcttccctcttggaagatcagctctattcgcctttcaagtgtcatttgtggggagatgtgttgtgcaaaggagactcctgggaccaatggacccagttttccttaggaagtgatgctcacctactttaaaacagcactgaatggaaaatcaatcttgaaggctgagagtgaagctgagagcttaaacttgactctaggtatttgagggtgttcatagaaaggggccagctaatagcagagaggcatatttttgtaaactgaagtaggatggaccctctgggatcatgaattacaaaaaaagttccccctctcctgccacactgaagggtacagaacccagctagcagaaactgggctggatttcaccccctcctcacctttgcacagtacatgaacagcacagccataggcaaccgccctggggctgactctgagctcctctgggtaaagaagaatgctgcctcctcagaatcaaacacacagtatttgattactttatcaattttatggaacttggcatcctccagacacatattcataatcagattaatatttttacccgagagggcctccttgtctccttctggagacactcaatggccttaaggtctaaagccgtaaggataaaaggagtggtcatggattaattcattcatttaaaaaataatgattgagtgcctgctttttgccagtcacagctgtagaagttggagaaacaacagcaacaatgaaagcaaatccttatcctcttggagtagatattccagtgttgggagacagaaagtaaataaaataaaataaaataaaataaaataaataaaagtcatacaggtagtatttcagagagtgatgaatgcaccagaggggaacagagcagtgaacagcctaagagtgtgggggcacagcagtgaggccagtgctgcaggtgccgtataagcatgaaggagagagcagaaggtggaattacagaggaagcaggtcttttaggcacctgcaggaatggttttcctttgggccagctgggaagctcctgagggtatattgcacaagggaaggacttgactaggttgacgtcatattcttgctcttgagctgagtccaccatacttgggaaatggcaggatgaacaatgatggtacttgagctgcatgtttgtgtgtccccaaaattcatactaatcccccatgggatggtattagaaggtggagcttttgagatgtaattaggtttagatgtggtcatgaggatggagcccccaggatggcactggtgtccttaaaagagactagagtgcaatctcttggtcacgtgaggatacaaagagaagatagctgcctacaagccagggaaaggtcctcagcagacagaagatctgccatcaccttgatctcagacttcccagcctctagaaccacaataaacaaacatttgttattcaagccacctactttatggtattctattctagcagcctgaactgactaagacactatggcttggaaactgattgtcggctttttttggaatctgaaaattggattgcatggctttctggcatacatttttggtcttaaggaagtcctgcctccatgagactgatgatcttatgggactcattatacatattttcacatttgtagtgtatatataatctagatgagttttcagatgccacatatctgtgagcagaaaaatggtaatcttgtcattgcacagtgcagagatggtgacagcaggttctgcatttttgtaaatgtctggaattagccatcaaagatggccagagactggttgtacccagaagctaaaacagaaaaaggagggggctaggttgccttgtttctactctatctgtattaacttccaaagagtaaaagaaatatgaccaggcaatgtgaagaaaacccttttagatcccttctcagtgtaagacagattttggctttatctctacccctaaatgtgaatgagtgacttgaaatgttgatcacaaattctagacaacgagatgtaatttcctgacccctaagtctttgcttcctgaatttctttttttttctttttaatgtatttttattctttttttattattattatgctttaagttttagggtacatgtgcacaacgtgcaggtttgttacatatgtatacatgtgccatgttgctgtgctgcacccattaactcgtcatttacattaggtatatctcctaatgctatccctccccactccccccaccccacaacaggccccggtgtgtgatgttccccttcctgtgtccaagtgttctcattattcaatccccacctatgagtgagaacatgcggtgtttggttttttgtccttgcgatagtttactgagaatgatggtttccagcttcatccatgtccctacaaaggacatgaagtcatccttttttatggctgaatataggaacacttttacactgttggtgggactgtaaactagttcaatcattatggaagtcagtgtggcgattcctcagggatctagaactagaaatgccatttgacccagccatcccagtactgagtatatacccaaaggattataaatcatgctgctataaagacacatgcacacgtatgtttattgtggcactattcacaatagcaaagacttggaaccaacccaaatgtccatcagtgatagactggattaagaaaatgtggcacatatacaccatggaatactatgcttcctgaatttcaagcagaaatcagaccattcattttcagcagccttaatgtgatgcacactaaagctggctcctgtgtttagggattacagtgggttggattccttcacaaaagtagccattagtcaagactaaaatgagtgaaatctggaaggagttaattacaagtgatcattttgtggggttgtgattcatataacacaatttcatttgacactaggagaaagaactctgaaagagtggttggaagatttaatagcaatattttacacagtctgttgggtttgtagtatgtaagtttccaagaagctacacaaaatcctattggtttgtgtcatatacctttatttaactttagaaggaatcataatccatgctaactaaatctaaaaaaaaaaaaaagtaccacttgtggaatgcccaggcacatttcaactacatgagttttaattgtcagaggattatatatccaagagaattgatctccatatacagctgacagtgccatggctattaatgatggaatgacatctttggaaagccctgacttcatctcttccagggatgctttatcttatatttccatatcaatttctgtggttagcacctttatgctaacttgaaaacaaatcacatgtaaaataaaattagaatgactaatactgatttaaaataaagcaaccctgtttttcagtttcaacaggccttacatctacaaatctgccaccaaattttaaaattatgtacattctcagggaaaactaaggactggcagtgaattggaacaagactgagatgatgtcttttgtgtactgtaacacttcaaaatcattgcttccagaaaaaaaatcacagaggcttttaatattcataaagatagaaacaggtgtttgaacagaacttgagccacctttgacaggagcacaatcagtttgtctgaaagggtcttcattttccctgtcactcactggcaggactgggaacatcaaaacagttatactcctgagctttcactacctgtttcaaaggattatacttgacatttctaatttttccccaatcattaaactctgtcctcccccttttaaaactgcatgattttgttagaaaatcaaagcaggcagaagaatacattagtgctcaatcctcatggactctgtgctgacctcattgctttttatgtctaccagtagaccacacaaactatttttggttcatcatttatcctgtgcagacagatagctgctagtctacctcagaacactatttagccagatgagggtaagtaacaaactgcattttagatgtaaatgctgtgccatgtaggctggacaggatgctttctctttctttgcctcagtttccttctcactttgcagagaggtaaagctgcccctataaatggatgcgacttccatgactgaaccttatgattattttctaaaaagtaaaagcacttattattttgtcctctcaaaaaaggaaagacaagataaatgtttaaggaactacttaggtaattgtaggtaactttacatgttactattttattccttatttcctctccttgcatatttgggcaagttagagatctattgtgtgccagggggcaaagaggaagaatacaaatgatttatctgtgctgtgccaagtcagagtatctaaaaaccgcatttgatcattttggggccagcacgtaactccgcaaagcttaattatgtccgcattattttgataagaagtggctttaggaaaacaataggaagacattgtcactggttggctcctgtgtgacctctgtcaaggatcatacatgtctagcctcagtttcaccacctgtgaagttaaggatttgggcactatctcaaggtttccatctcgaactaaatgtctattacacaatagatctataacttgaccaaatatgcaaggagaggaaataaggaataaaatactaacatgtaaaattacctgtgatgtctaagaaattccttaaacatttattttgtctttctttttttggaaggacaaaataataagtggttttactttttaaaaaaatagtcataaggttaaatcatggaagtcacatccatttatatgagagatgagaataaaagatgaagctttaggacactgaagtcattgacagttttaagtgaaggcagagtagccatgtgattttttttaaatatgaaattttacccttttgctgaaaagaggcagaatgtgagagggggatgtagggaatgtgggaaatacagttagtcatggaattattaggatcatatttgtaggagtcttgcaagtcatatttttatttatttatttttaaatcttattttgtatatttaaaatatacagcatgatgttacaagatacatgtagtaaaatggttactatatagtggaacaaataaacacagctaccatctcacatcttcacttattccctgcctaccccatggtgtgtgcagacatagtctcctcatttagcaaaaattctgaatatactgtgatttactgtggtcttcatattgtacattagaccttttgacttgttcatcctacatatttgctactttgtatcctttgacctgtatctccccacttcctcttcccagcccaatcctggtaactactgttttattctctatctctatatatttggcattcatttatttattttttagatggtacatataaatgagatcatgcagcctggtgtggtggctcatgcttgtaatctcagtgctttgggaggttgaggcgggagaatttcatgaggtgaggagtttgagaccaaactgggtaacatagcaagactccactctatataaaataaaaaaaaaaatttaaaagctagccaggtaaggtggcacattcctatagtcccagctacttgggaagctaaggcaggaggattgccagagcccaggagttagaggtggcagtgaattgtgatcatgctactgcactccagcctgggcaagagagtaagaccctccctgtctctaaaaaataaaaaaataaaaagtgagatcatgcaataattttctttctatatctggcttattttgcttaatataatgtcctctaggtcaatccgtgttgtggcaaatggcaagatctccttttttaaggctgaataatatttgtgtgtatgtgtgtgtgtgtgtctgtgtgtgtgtgacagtttctttatccattcatccactgatggacacctagtgtgtttccatatcttggctattctaaataatgctgtagtgaacatgggattgcagatacctttgtgaggtgattattttatttatacacagaagaggaattgctacaacatatgataattctattttaattttctttaggaacctccatattgtttcctataatggctgcaccaatctactttcccactaacagtgggcaagggtttccttttctccgcacccttgacaacacttgggtcttgtcttttttatagtagacattctaacggatatgaggtggtatctcatagcagtttttgttttcattttcctgatgattagggatcttgtgtatctttttatgtgcctgatggccatttttatgtcaaatctatagaaatgtgtattcaagtcctttgcatatttttccatggagtttatattttcttgttactgaattgtattggctctttataaatcttggatattaagcccttatctgatatatggtttgtaaatattttttctcaacctgtaggttgtcttttcattttgattgttttctttacagtgtataaggtttttagtttgatgcagtcccacatatttatttttgcttttgtagcctaagattttggtgtgacattcaagacatcattgccaaagccagtgtcaaggagctttttccctatgttttgtcctaggagttccattgtttcagatcttacatttcagacttttattaattccaagttgatttttatgcatggcataagataagggtccaatttccttctttggtatgtataaatccagttttcccagtatcatttatcaaggagactctactttctccattgtgtcttcttggtgcccttgttgaaaagtagttgattatatatgtttaaatttatttctggtgtctctattctgttccactggtctatgtgtctgttttcatgtcagtgccatactgttttcattactatagctttgtaatataatttaaaatcaggaggaagtgtgatgcctccaactttgggttttttttctctttcacagaatcgttgtggctatttagggtcttttgtggttctatatgaattttaggattgttttttctatttctttgaagagtgtcattgggattttgatagagattatattgctttaagcagtatggacattttaacaatattaattgttccaatccatgagcatcgaatatcttttcatttatttgtgtcctcttcaatttctttcatcaatgttttatggggtttaatgtacaggtcttttacctccttggttaaacttattcctaaggtatttttatgctgccataaatgggattttttaaaaaatttactttccagataggtcattgtttgtgtattaaaatgtcatagattttcatttttattttaaatcttacaacttgactgaattaatttattagatgtaatagttgtttggtggagtctttaggtttttctacatataggatcacattatctgcagatacaaataattttacttattccttcctgatttagatacctttcatttcttttctcttgcctctttgctcttcatagtacttctgggactatgttgaatggaattggctaaagcgggcatcctggccttgtacctgctcttagaggaaaggctttcagtttctccctcttgattatgatgttagccgtagattttgcataaatgggtctttataatgtcaaggaacttttcttctatacctaaactgtcaagaattattatcaaaaaagtatgttgaactttgttacatattttttctgtgtccattgatatgatcaagtggtttttgtcattcagtctgttaatgcaatgtataacattaattgatttgcatatgttaagccagccttgcatgtttgggggtaaatcctacttaatcatgatgtataatcattttgatgtgctgttgaattcaatttcctaatactgtaatgagaatttttgtatcagtgctcatcagagatattggcctgttgttttcttttctttttttcttttcttctttttttaaagagatgggggtctcgctgttttgcccagggtagagtgcagtggctgttcacaggtacaaacacagtgcattgcagccttaaacttctgggctcaagcagtcctcccacctcagcctcccaagtagctgaggctacaggtacatgccactgtgcccagctttgtaattttcttttcttatggtgtctttgtctgagttaggtatcaaggtgatgctggcctcaaaaaatgtgctaggaaacattccctccagctctatttctgaaaacatgtgggaagtacattcgtcatggaattattaggatcatagttgtagaagccttaagagtcatgtctttacaagccattggtaatgaaatttgcattttccctcaaaaaattttcagtcagctcccaattcaatttgcctgtgacactgatttctctgtcctcacctcctgttctgacagcaacatctacgtttggatgaatgcttccaaatttggttaaattgtttgcagagatttttaaagtacttaagaaatttactttgacttgacatttgaattagagatgagataaaaatttaaagtaaccaacatcatagaaccttatgtccctatttcactagccttctttttccctgtataatatggccaatgaataaaaacctcaaatcttatcattcttattatgcatttaaaatttcccataaatatcacccaagaacctgaatgccaaaaataagtatgcaatgccttctcaaataatacacatgtgaccttcatataggaccctctagtcaccaaaaaaatttccatacaactgctgatatccccatgaccatttcaggctgagagagagagagagagagagaggtttataaattattttgactcaaaacccccaaagtagaaacatgctcacacacatcgccagcctgttacttagaaactagcacctcaggacatagggatattgaagtactattgaatccactttcctcagctaccacctgtgaattatggctggcagcaggagttttatgatactattgtaaaagtaatatacctcttaaatggcaatttactaagttgctgatgaaatgcattgcaaatatgttagtttcagggtggttaggaaaattaaccgctgcatattttccatattgtcatatatgccaacatgctcagagaatcaggagcagctttctgggaaagctgtttaaatgtaacatatggccagttagtcacttggttagaacatgaggttgataaggccaaagctttagggaaatcacctgaggctgttcttttaaaagtagtctcagcaactgtatcccaaaaccctataaaatgttcccttaacctcacacttttcattgtgcttcctatctaattttctatcctatcgatttgatcccataccctgctcctcagcataggctgataacaatagagtgtaatcacacatcattagacctcagattacattttgaagtgatccccaataaatcttgagccacaaaacaatcatacaaaagagagactcaaagggataggtgagtgaatataaatttggaaactggtgtttcattaagtttgtagaggcttatcctggacaaagatctgtgcttatttgtatgaccccctaagatatcttttatattaacagacacttgcatagattttcacagtttaaaaagctgtttagattaatcatttcatctaaccatcacaaaacccctctgaaaagaggagaatgttattatccaaattttatggaggaaaaaacaaaagctaatgatccagcttgtgagtaatggaattagaatttgactcctcataccaaccccatcatggaaaccaggctttgaccacaatacaggtcccctggagtgaatgaacagactaaaacaaacaggagtagtgaaagtgacctgcagaacacttaaaacagaacagcgtttgacaagcttgatggcccaatgatttgaatctcttctctaaacaatgttagagcacagataggaggtaagttgcaatttgcacctcaaggatgctgaggctgcatcccaagttagtagaaaagagtgcagtgataaattcgagatgtctgccatgcggacaggaaatgtctagtggcaacacatatttgctcttcctatattaaagaatctgtcattttataaaacatacttgggttttatgatgagaagcaacatagatcaataagtcgacaagcctttgttaagcattaataaatgccaagcactatattaagcactgtggatgaacaccatggagattaagagaaagtctttgcgtatataatttacaattcaatctgggaaataaattgaatgtgcagcaaacactttaattttaatcttttgatactgattgtaaacacaaggcagattcataaagggacaaatcacaccaggagtccatctctgtgaaatgtaacatcttttgaagggaatatcaagagatcaaatacagttgtggaaaaggccttaatagaaggtctgtgtagtttgagtgctgtgttttcttacatttatttcacaccatgtggaaatattttatcaatggtcaattacagccaaagagcggttaaatattttgaatcactactgtatttgcttatctgaaattatgctcacatgcatgtctttagcaattatcttaactctataattgtgattttagttataattagaatggacaagaagtaaataatgaaagctccccaaatatccttttctcccaatagaagtagaaaaagtaaaactgcaaacaaaactaccagtttcctgaaggagacttgattacaactcccctgtgagaaaaacaatggaaaggttgggttttctttcaaaataatctgggaatggggaagttggatatggagaggtggcagtggggttgtagataaaacaagattggccgtgagtgggtaattgattaagctgggtgaaggtacatgacaattcattatactgctggcttgacttttgtatatatttgaaatttgtcataaaattgttcttaaattcctcttaaaggtgcaagagtaatttaaagtttcagacatagaagggattttcgacattgatgcagaaggaaaaggagaaaatatttaaaaccatgttaagtaaataggggagatggaattgcctgaccaagaagtatagaacttgttcaaattaatagcaaagacatggaaccaacccaaatgcccatcaatgatacactggataaagaaatgtggtacatatacaccatagaatactatgcagccataaaaaggaatgaggtcatgtcctttgcagcaacatggatgaaaccaaaagccatcatcctcagcaaactaacacaggaacagaaaaccaaacaccatgttctcattcataagtgggagttgaacaattagagcacatggatataaggagggaaacacacaccagggccaggcagggggtggggggcaaagcgggggagagcattaggacaaatacttaatgtatgcaaggcttaaaacctagatgacgggttgataggtgtagaaaacgaccatggcacacatatacctatgtaacaaacctgcacgttctgcacttgtatcccagaacttaaaggaaaaaaaaaaaaacacggactggttagtttgccagcagaattgagaaagactatacaaagcccccaaatcccagaacttgtgggtttgaaaagtgaaattgtttttcaccttattattttatcagtctcaggacaaagattaattaagggtgccgttgtcacgtcctttgttacaacttgtgaaaataactgaagtggtgccttgctgttcttttcagctgaataaagtgttcctagaaagctaaaaggcaaaaaaaaaaacaaaaacaaaacaaactgttgcaaaatttggatgaagggaaaaatcagagctaagggatgctatctttttttttcaccaccaattgtctcatggatgtacgtttatcattgatttggtgtaacaggctcttttggatgctataatttctcatctgtctcctgctgcaaaatccatcgactatgcctgtagctaggtctacatcacagctgtgaaacattaatctcaaggacacattcttcatccctggcctggctgatgcatgctgtctagttagttccccagtaggctctggcttctttcccgatgttctcctggcaccgctaacaactgtggaactcctgtcattctagagatgagactgctgtaatgctccttgggtggccttcaatgtcccatacttatttcctctcacttccctgatcctaagagggatttgtcacccaggtgtctggaatcaaggctcttctgtgactttgttatataaaaccttgatttagaagcagaactgttcatcatactgcttttgtgaatgtgtcctttatgagttctttgcaaagccctccatactggctgctaaacagtttattaattatgatattgagtaataagattgttcgacgaccaggtcatgcataaaagcccaacttcttggctctggtgatgtctgtttttgttaggctggctctcatatttattttgtcatgattacgcaataaaaggggatttttattatgtgcccccatgctggttaagccttcactaaagctaaactaataggaagctgtgtatgtcggataatggcgatttcaatgctgaaattgatggcgaaataagacacaagttgtagagtactgctttttgctgctctcccctgtacccaccaccaccaacaacaacaaaagttgtctcttagtgtgtgttatctttagtattaatcatgaggatagcttatatgtttataaattgaatgatggaatttcaagaaattttaaaaatgcagactttcttttgtcccagaacaaccacagggctgtaagtccaaaagccataaatgatagggcaagtgtaaatggactgtgatgagaggaaaaatgcaactaaaatggatagaaatgggactcaaggatatgataggctctctagaaaccccaagcctgctgtttccagtgaaagataattagagttttctgggggagggggatggctgataaagggacatccagaataaaaaagaaaaaaaaaaaaaagcagttttctgaaggaaaagcttcagtaaagtttagactggtgtcaggaatgataagaggccaagaagctcaagggaattcagcgattctttctgcaaatgctggaaaaactccctcctgtgaatctccagaggtatgtagagagtatatgtaagaaataatgcattatatctgcacacagtgtatgttcaacatataatctcttccacacttacagaaaattactttccgatgctcactaaatgagaagggttacaagagataagagggtggtctgcgttcccaaggcagctgctgggaaaagaagggtgttatttaaaatgattgtaagtgactatcttcctagattgtacattgtgcccccttctccagttgattctctataacctagatagtcaaaggcaatactgacattgagaactgccctgtaataatactgcgtttatctcaacggttcttcttttttttatttaataagagaggagtttcatgaataaaaacaaagctatcatgatgtcaaaataatattctttgcacccatgagttgagaaaataacagactaaagaggcctttttgctttttaagatgtgggagtctttgtgagcttccctgttcccaagatgaatctgtaatcttggtacaaactgctgagtgggtgtgttttcgatcatagaaaacttttcttatgtatctggagagtcatggtagtcttactacatctggttagtcatattccccctccaatcttcgtacaaaagaaacccaagactagatcagggcttgtgatgatggcaaaatgatatcttactctttaagtgctgcatttgatcaacatgtgtcattaatctctccttcctgtttgtgacagtaaatgacggaacactttatcaattcttctttcaattagattgatgtatgtacattccttgaattttaaaggtcattaatttgcacattagtctcttaggttggtagcacacagattgatgtattgatgatttagtctttcattgatcctatatcatctttagcaccatgagccatgagtgctgtttccttcccaaccatgacacaatgagtgaaaatgcattaatgtttacaaagaaataaagaacctggctcttgacccttgtagagcattttaatggccctggattaaaatgattataaaatgtatcgagtcatattcttaaagtgcctttggcatgtactggcctttcttcctgagctgtaggtaatagctatagcatccaacaaaaaattgccaaaaagcctatgaccttccatttgcagtgatacttccaagtaagtaaggactttatgaagttattttcaaagtacttcattgaagaaatgtttccctagtcatctggattgagattttgtttgcctctacctttgatatatcataccctgttgaattattcagtgtgggtcaaagtaacattaagcttcttacaaatgcaatattccaaacatatcccagcattttactttatcaccatccatagaataaaccacacgcaccttatctgtgctacaaacatacttaatataatgataataataaaaataataaaagtgtaataaccttaagaaacagttgattgatgtcattgatcactttagaatgattgggagtaacggaaacataatgctgaatttaaaaactgctatacaaagccactgaatgttttactaaagaaaaaaaaacatgtaatttgaatctttcaaaaaaatctcttttttggcccagaaagtacaaaattcttagctcaaattttaaaatgaaatacagtgtagtcaaatatgtaatatattaaatatgggttccaaactctgctcatcagtgattttcagagtaacattttaaccttctgtagtctcctcatctgcaacataagcttaccctgaatcatcacaaaagctccttatgctctaagtttttacatataaatattaggaaatcatttagaacatctggaaagcatttgaaacaaagagatgttatcaaaggagtcaacagtaattttcatcaatgtttaagaagcccaaaaaattcctattccacttgaaaatttagtgctatgcagaacaggtagtaaatgttaccagttcaagtcagaaattattttattagcagttgttagaatcccagccatgtccaagctggaaaatagggaagcaattgatccttttagtgcaaaactaagactggctaggcgtttacaacgcagtggaggaaaggacttataatcaaagaaccttataataatcaaagctcatgtctgtgatcaaaccaaatcatgcagatttctctccttaaaaagaataaaaagacaacttttggttcattaaaaataccgacctcttttatagacccttcagcttataatgcatcttaaatcccattttggaaatgacatacagtatacaatcaagttcaaaattttaccactatagaaacagggaggaaaaggtcacagagaagagaagccatgtgtggaaggacttgagggatggtttgacaacctgaacttcttgaaatacttggtttcagcatccctctctcttttccttcctctctctaaattgtccctcctctttttctatctaagggacatgatccttagcctcctgctcttttccttatagagtcacctgctctggggcctcatcaatcctcataacttcagctccagccaggacagcagtggagcagaaaggtcaggagtatcaggacagaagcctcatcagccaggagggctctacagcctcggaagaacttatcaggaaaaggattgagacctgggcatcagtttgtattgaaaataagaaataaatgccctggatcatagagggaatcaacttgtgaggccatttggtcaaagaaggggaggaaggtgtgtttgaccctagagccttgctactcaaagtgtgatccctggactggcagcacccacattgcttgagaatctacaggaaatgcagaatcacaggtcccatcgcagatcacctgaatcaaaacttgcaactgactgatatatgcatataaaaggttaagaagcgctggacaaaatcaaagtggaaaaaaaaacagtcagtaaagatagagacgtgtagacttcacatctattggatcatgcctgaaataattatcacactggattttggatctcagacataaaacttgatgttttcttccaaatctgacagtagccaagaaggagcaaatattgtggagtgtgggccatgtcagggaatatttagttcctgtaacagggcaggggagttcaagtggtaaagaagatttgtgtctcagtgtagtatgcactaaattctgaaaaatgggctggagcagaatgaggggacccttgaaagacaactaaagagtgttcatgtttttcctgggtgcataagatgtattaaagagaaatacagtgagaacaatgatttagaaagaagcatcttgctacaagatgccaggaacagaccaagagcaaggagactgggcagagcactgtacttttgtcagtgtcatctcaatgtatggcatggcccatctgctactgtcctcccatctccatcatcatcatcctctgaggtccagctcaggcactacattctccaggacatctttcctagtgacataaactcatatcagccgcactgcaaagtcttgtagttcttagattctattctacaggatttaacctcaagggtcttaaaatagagacttgtggattggaaagggacctggcagggctgtgcaatcctaattcccatctcctccccaaatccttccagagacagagatcttgatgactcaccaagcaacccattataggtggagggagctgtaattattaagaaagaaagttcttttttagactgaacaaaatttcttttttcctttgtgtcaatcacatactaaaaagcaccaggatagcacagcgatctgcctttcatctgtttctctttcatagattctgttgagtctgcaagttaaaagtgttttaggctttcttttctgatctgaaagaactcaagcattctcctcactagaaaagctcatttaacaagtgtttcttttgacatatagctactatgagagtttagggagaccctaactgatttgttctctttttagtttttagattagcttatgattttacagctccagtatcaccctggcctgcagagagtttagggcagtaacagcaggggcatcctgaatgacaaaaaatcaacacataacatgggagatcacacaaatgcaaaaggcactttagaaacaaaattttcctaggcccaaagcacacagaacagggagctatgtcctaatcaaagtcatttacatatatgaagaacagcaaatctgtcaatccagagcaggagtgggtagatcagatcttagatgaaatgagagtctcctgggtatctgttaatttcacagtgcttgtccatactttgtccagggacaaggcactgcggtcaagaactcgccctggccctggtccacctgtcagccctctcttagaaataattagaatgtgaaccccacaagtatttctgtcagacaaccagctctccccctagtattccctcatcaccaaaccaccctgagaaatagaccaaagcgagcctctagatctgcaaattgaggaacacacagacccttgaacacggtgacttgaccagtgcagggtcccctgtgaggccagccagctggtttctcatttattgaatggcagaaataaggctaaatgttgcagatacatcattttattgtaatactgcaaccgccctggcaaaagagaccattaaccccatttcccgtattgagaaactaagtcaaaaacaggaaaagatagactaacaagagacagacaacaaagagtgggtagagtgacttgaacacaccaaatgcatataaccactacacttccttccttagcattaagtacaaatattaaataaggaataaacattgcatgaggcagagaatcccaatatagttgggttattgcaaagaatatgaaagttaatactttttagaagggtagagatatgataaaactgtaaaatattgaaagacttgaaattttacccaccaagattaacataggcaatcatatacaaagccatagctgtttctagaatttttgttgacagttaagtgtcatagttagcaaatatttgttttctagaacatgtctttacacccagcaagtaataattgatgcaggtgagccccgcagaggattgactgcatttttctgaccacggaacaactccccggggccgacaaacatttggttggaatcaaattggcactgatttcttgggcattattaaacatgtgctctttggccatagctatcatttcactttccaggtgaaataaatgtaagtgaagcataagaattcaaagttgaattaccatgtgctaccttaaataatatatttcacaccaaaagaagactctgggttttgatcaattaaaacatacaccaataattgcaaatttaaatatgatgttgctttttctatccagtatcttctgttgctcccacaaaggttttcagcatactcttcttgcctcttcgtttacattatatttctaactttgttaggatagaggtatcttcacgcattcagcaaacatctatggcctgactgcctttttccaaacatggcaaaggcttagaggcacaacactgaactatgtccattcacagacacaggctggtttcgttgcaataataatttcggtagagtaaacaagataatggagacaaaatgatattaacattgattatttctgaggctccacaatgtcatggaagactcaggctcctctcatctttctgttctggtatcctcaggctaggttaccatcatgcctgcaaaatgattgttgcttctcaaggcatcaaacagagatgtaacaagggtggggcaggaaacctttcctagaagcccctaccacactggaaacctttcccagaagcccctcacaaactggaaacatttcccagaaaccccttcctcactggaaacctttcccagaagcccctagcacactggaaaccttctcagaagcccctagcacactggaaacggttcccagaaatccctttctcactggaaacctttcccagaagcccccttctcattggaagctttccccaaagcccctgccacactggaaaccttcccagaagccccgagcaaacattactttatgtgtcattggccagacagctacaagcctgcccctaaaccaataaccaacaaggagaatgagatttccatgatagggttagactaaccagaatttatctgggctgaagtgtatttggttattggaacaaattagggttccattaacatgaaagatgggggaaatgattattgagtgggctggtagtctctaaggtgatccagttagacaactctaggctgggctgcttacatgctagcattggttggtttagcactatctttttttaaaagctagctttcattgtacttttcaaaaatattttaacgattttttgggtgtatgattcagtggcattaagaatactcactatgttgtgtaaaccacccctatccaattccagaatttttcattgtcccaacagaaactccgtgcccattaaaaataattccccatttccctgttccccttccttttggtacctggcaatggccactctatttcctatctctatgaatctgcctattctaattacctcacataactggaatcacatagtatttgtccttttgtgtcctgcttatttcacttagcaaaatgttctcaaggttcattcatattctagcatgtgtcataatcttatgatttttatggttgaataataatactctattgtgtgtatacacacatgcacacacacacatacacacacacacgcacacgatattttgtttatcattaatctaccaatagactttgtgttctactttttggctattgtgaatgatgttatggtgtacatgggtatatagtatctacttaagtccctttttttagtactatctttaatctcactgaaacttagggacaaacgggatgttcttaacctgttgcagatgttttataagtgataaagcatctgtaaagtactgaatatagagcacatcacaggtgcttcagaagtgacacctgctgccatggtctggtctttattgctgttttgtttgttattgttagaacacagaggcagagctcaaaaaagggattcctagctcagcctgaggattcagaagtatgcaagctgtgctttgaagatcagttaagagtagtatgtatatcagtttgctagggctgccatatcaaagtaccacagactggagtggcttaaacaacagaaatttattttctcacagttctggagtctgcaagtccaagatcaaggtgtcagtagggttagtttcttctgaaaccaaccttggattatacttggccatcttctccctgtgtctttctgtggtcttccttctctgtgtgtctgcatcctaatctcttcttcttataaggacatcagttataatggattagggcccatccatatgaccacattttactttaatcagccctttgaagactctatctcctaatataaccatattctgaggtgctggaagttaggacttcagcatatgaatctgcagggagaaaagagcccacagccacatcatagggcctggtgactactgatcttttgaaggagttgccagcaatctaaatgattgactgaagagaaggggtcagatcagatctgagttttctacctatcagtcgggagcatggtggaggctgggttgaagggaggaagggcggaacactagaaacaagttggagggttatgattattgttcagatatcatcatatgattcaggctagaactaaaatagtgggtgtatgggaaaaaagtttggaaagcaacaccttagtgttagattgattatgaaaataaggaaaaggcgccgggcacagtggctcatgtctgtaatcctagcactttgggaggccaaggtgggtggatcacttgaggtcaggagttcgaaaccagcctggcctacatggtgaaaccccatgtctactaaaaatacaaaaattagccaggcgtggtggtgggcgcctataatcccagctgccttgggaggctgaggcagaagaatcacttgaacccagggggcggaggttgcagtaagccaagaccacgccacttcactccagcctcagcaaaagagtgaaactctgtctcaaaaatgcaataataataaggaaaaggaaagagcatttgttaatggtttgggcaacagggtatgacactgttcttgaaaaagaggaagctatttgaagaatgggttcagcaggaagagcaagtgctatgttctcttttgcacaggtcataattgacaaatacaagacatttgagggggactgtctactagttggttacctataaataaggatttagtgtttacgtgtgaggtcagtagaaatagaaatttttaaaaatcacaatgaaaaatggattaatgggtatgggtgaaactacccagagggtatatacagagggctcaggcctataccctggaggagctaatgcttaagaaatgagcacactaatagttaataactaatgaacaaataaacaagaagtgaccagagatgggcaggaggagacagagacatagagccccatcatgacacacagaagaatgtgaagcacaagtcagtagcgtccagtgtgacagagaggacagacactggcagttaatcagttgttggtactttagtgagagcagtttgtggccaaaaccagatgaatatgaattaagaaattattgggagacaaacaagacctggatgtaggctgttctttttcagaagcttgcctgtaaatagggcataagaggtagattttcaagttgtttttaaattgaagatatttgcacatgttcaaatgcctaaggtaaacagagtgactgaaggaacaaggtcccctgcagagggaggagaggaagtgggatctataaggagctgaggcaaagaagtcttgggaggcattttaatggcccctattttttctgtgaaatagagagcaaattcatcagctgaaatgtttcagcacagagctgggcatatggtatttgctcaacagatgcttatttaattattggtggaagtatatgacatttggatttggaatgagcataagaggtccagaggcaagagtgagttgggcagcgggtctacactgatgccaggggtccacaggcaagatcctgacttacctagttcagtcagagcaaggggaatttttaaagtctctaagtgattctcattgtagtcaagagtgaatcactggtccaggggccgggtgcagtgactcacacctgtaatcccagcactttgggaggccaaggtaagtgaatcacctgaggccaggagttcgagaccagcctggccaacatggtgaaaccccgtctctactaaaaatacaaaaattaactgggcgtggtggtgcacacctatagtcccagctgcttgggaggctgaggcaggagaatcacttgtacccgggaagcaaagattgcagtgagacgagatcgtgccactgcactccagcctgggcgacagagtgagactccgtctcagaaaaaaaaaaaaaaaaaggagtgaatcactggtctaaaggtaaacttgaaacatgcttagagtaaggaaaggctactttttaatgagctaacagatgtgatctagggaagaaattgttgcctataataatgtaaaataggatttaatcacatctctttttcatttcccttgaattatcaaattctgtttatgtaaaacagagagcaaaagacaaataattacaaagagattgagagtaataacaaaacattgtgtaatataccagacattaacaatgaaaattgcccatctctctgcctaactatatggccattgacagaacatattaaaaggaaataaaaataactttcacttagtgccaatcacatgtcaagcattggatttgcttccttcatatgttgtctcatttaaccttctcaacaacccattttaccgatttctaaactaagactcagaaagtagcctcatttgtaaacaagaggaagggcagcgtcctggagtttcagaagacttggagaagagttgggaagcccaggatcaggggaattcactagtttctccctctcagtagataaaagccttaggaagtaatcagaggatagaaatatgacttccatttgcagatgtaaatatttaaagtactgtacatttgtttaacacctgctacgcaattcaccctctgttgactttgacatttcattattttagaatgacctttgccctttagcataacacaaatccattaaaaggaatggtgacagaaactcaaaagggttgtgtgaagatcatgatggtttttatacccctgtgcctctgctttcgatcaatttttctcttctatcccagtaacatggttatccaagccagataaaagcagagaaaatggctcttccctctcatttttgctagcatgtcaaaataataaataggttaatcatagcagtcattttgacttaggacatcttaggcacacctttgggagtgcagaaacattcccaggttactattgaagagttccagctcttagccagaaaagaaaatctacttttccctttttcctttacttgtgtgaagtcagtgttctaggaagtattgaacctgtctaagaaaccctgcaaggcagctctgaaatttacagcctggcagcaagcttttaaaaaatgcaccaggcaatctagagtaagcttttattgtaataaaagacacaggtggaagatgaatagtcaacgccattgattttgacaccaccagagaactgtgtcttgcgtgtagagtgtatgtgtcactgtcttttgaaattgagtctgtggctgctgctactattgtctcccatggcaacctaccatcatcctaggacctccatcaataggcattgaggtctggtgggcagaagactgggtagagacctaaagtttagtcattgatctcccacataccctggttccaacatctgcagtgaagagatatcatcaattcctccctctctacccccttgttgatatgacaaaggatctaacatgttaggcaaaaccaaggcttctattgcattctatgtttggctaatttatttcttaatgggttaagagtgaaataattagaagcagttagatattcatttattgaatctctttggtctgcatgcagcctgtgctaaggaataaataaataaagatgtgacaaggtcagaagtttgttccttatatctaatcaagatcctggagttggaagtaggtcgttacccttcttgtgaaacttccatctatgcatttgctatgcacacaaggatctgaagtcctctcatcctttctttcagcatatatttgttgttgaaaatatgtatttgctatgcattagatgttgttctggtcactagacggtaaaagataatttttagtacctagcttcaaagagctcaatgccaccatatacaaaaggcaagtatagagataatcaagtattgtggaagctgagaggaagaagctcttagcaattctccaaatccatggtaaaatttaaaaagaggtatttgagattaatccattacatgacaactcatgtgtattagttcattttcatgctgctgatacagtcatacccaagacgggtaatttataaagacaaaggggtttaatagactcacagttccacatggctggagagacctcataatcatggcagaaggtgaaaggcctatctaacatggcagcaggcaagagagaatgagaacctagtgaaaaggaaaatcctatataaagccatcagatctcgtgagacttattcactatcacaagaacggtatgggggaaactgctcccatgtttcagttatctcccactgggtcctacccacaacacgtgggaattatgggagctacaactcaagatgagattttggaggggacactgccagaccatatcaacttgttactttaggaagatcctaatgtgatgcacatgaaaacaggagaatccggtggttagataactggcgtgtaatatgaaaagggagtgtattagggttctctagagggaaagaactaataggatagatgtatatataaaggggagtttattaagtattaaactcacatgattacaagttcccacaataagccatctgcaagctgaggagcaaagaagccagttcgagtcccaaagctgaagaacttggagtctgatgtttgagggcaggaagcatccagcatgggagaaagatgtagactgggtggctaagccagtctagtctttccacgttcttctgactgcttttattctagccatgctggcagctgattagattgtgcccacccagattaagggtggatcggcctttcccagtccactgactcacatgttaatatcttttggcaacaccctcacagacacacccaggatcaatactatgcatccttcaacccaatcaaattgacactcagtattaaccatcacagggagaaaggtgaaagcgagaagggagagaaagcaagaagtgtaaagggtaaggtaagtgggtaaaacttgcagagaaggaaaactgaggagcaggaagtgattaagcaaaatagtatggggccaaattacaagaaaagggctgtcagaacatatcactggttgcttaatttgtgccacatatgattttgtaaattagatttgtataagtaaatgccatccacatacatgatttatattatcaatttgttttattggcattattcccaagaatgctgaaaaacatatcagcagaattggaaagaaagtttctaggcaatagtcactccttttcatcataaatctgcactagagcccaactgtcttctctaaaccaggacatggatgttcagctgctcactggatgtttccgctaggtgtctaacctattattcttttcccttggaacttgacctctcatcacctgcagttgttatacttttccctgtctccttgttttctcgtttttcttttctttacttttcttttcttttttttttttgtttgtttgtttgtttgttttttgagaaggagtctcgctctgttgcccaggctggagtgcagtggcacgatcttggctcactgcaagctccgcctcccgggttcactcgattctcctgcatcagcctcccgagtagctgggactacaggcgcccgccaccacttctggctaattttttgtatttttagtagagacggggtttcactgtgttagccaggatggtctcgatctcctgacctcgtgatccgcccgccttggcctcccaaagtgctgggattacaggcgtgagccaccgcgtccagccatctccctgttttttcttactgctgttctccttgtctaatagtccaacttacactcttccccacccttccccaccctccctcagtctttcttctctacttaactgacttctagcaattctagcaaacttcaaaaacgcagccccagttatctctgctcccctttccctgcccggactgacttaaatgctctttcttcaagatttcattgcacttggtacatgtttcctatttagccgtcatcacactgaatgataattgcaagtgttgcttgtctgtctttcctgaagtctggtatcaagtacagagtcctatatctcacaggtactcagcatatgttggctgatcaaatgaatgagtacagaaaatgataatgcacttttaactgtcagtgaagtcaagagttgagaatatttagttctgctgagtcttgcattgatcttcaacggcttagtcattcaaaagttatactaacatgaagggttaagtgtctgacccatacgtttttagtcccaaaggtgctattatgagcattatattttttataaagttttaagtcttctaaattttttacactatgatgatgttattagttagcctttaaaaataatgacttttaaagcccccgttttctcaccaacaacaaaaatggaagtccagatccagtcttcttgtggtctaggtgtatgggccaggggtgcagcagatgacttaggagaaatggggaagagactggttgtccagtcaatataattttgtaataacgtttggaaaccactggtttctgagacactgggtttggtttgttgatatggaaatggtaacctataagggttagcttggaaatgtgtggaatagtgttagtaaatacgtacagtctaatgcaagtttagaagaacaaatatattttttctgggtcaaaatgtttcaaatattcttaagacttatacataacaaatatatgtgaaggaaaatagatggatgtataatatgcaagcagtagacacatctttctgccaagagtcagaatgggtttattcaataaagaaccactagcctttctcagaatagtctagtgtcagtatagttgttagtcttggggttctgacccaattccagctaagtaattttattctgcctgcttaaatttccctaccattaccactcgacacagaattcttcttcatttcttgctccatctaaagtgtgattccatcctgaaaaagagcttcatgcaccactctaaaggtgactgctttgctgtgatgagtgaggcaattttgttatgttaagtgctttggggaaaaaagcacttatagtgctcccgtagaaacgcaagctaatattactcaatgagccttcctttcagctgttgtgcagtgtggcattttcaaaatgaagaggccttcccccattgcagtttatttatgtgatatattcagaatggacctatttcctaaaggcatctgggaatatgtgtagaagaaatatgaaagaaacaaaaattaaacacagatgaagttaaacagctaacagtggagaggctagtggggttgctaaactgcaacttcaaacctagatctgaaattctgaatgattaagaagaatggaaaataattacacaaggatcttccagcacatctgccaccttgctaaggtctaaattgcaaatgatgttagtagttccaagaggtacttagggtaggcaaatgtgtccatactaactacagaattcagagcttcatagactttagaataaataatttttgcaaatttattgaatatttacatgcagcatttaaaagacagccacatttttgaaaagtgtagcagccaacacattgaatatacatagatataattcctttctagaacacatcagcatgctttttctttaaaattaatccctttcattgtcttttagtagccccaaattatctattccctttcttagaataatcttttagcctgtttttaaggtacatgtttgctttgaaaaagtggtattattgatctttaaatactgaaaggtgtcttaaggttaattcaagagtattagcaaaaataaccttacctaagtctcttgaaagcaggtgaggacacagataggaaggcactgtaaatcaattgttggagtgttgactctatcatcaaatagcagatattctgatttttttttctatttcattcctaagtgaggaggcattttctccatcttttcgtctgaaaatctggcataggtacgtaaagaaaataagaggaaatctttcagaagaacatcaaggcctgtgacatgggatgctttatttgacaaagacaacaaagatttccctcactgaagaacatctctcatatttcatgactcttattataacgttgtgacaaattctggaagcatttcctggcctttcacattgcctcttgagtatggacattttaacgtacttactagtgtttagaagcagagatgttaatggttgaaaccttggaagccaggggctcatgggctgggagggcatccaattctgttctcagtacagaacctctcactccattaagcttgttttatttttatttttttcaaaatgaggcgaagaataacatcgacctcttagaatcaagaagattaaatgaaatactgcatgtaccacttcctgcaggtacataggaagtggatgttaacaggtggcccctcaacaactgagccacacgttcgcttttgaatctggataatgactatgtgatgagcctatatatatctataccttcatcttttattattgtctcctcaaaatgtctgtaatcattaacacaatgtcacgcacagctagataatgctgtccccatggttaaagtcctgcttcactggcattgtggtttcaggatggattcatgggactgtgacccgttttcctgtgatattgatgtcttcctattcgttcttgaaagcctaccttttataccaatttttctttgctttaacattattttgagaggaaacggtcttaagaatgaagctagaagtaaaggtcaagtatttttgtggcagggcacaaatctctgcagtccttctgtctttttaatcagctaccccggtgcacattgtcccaacccacacagcttgtgtttgcttccgtgggctgcatccctatagctttcatttgtctcgaccacctgcgtctttcactctgacactgaacacctgtgtccacttttgtccccaacctgagcctgagtctgggatcagtttgcctctgcccactttctctttggtctatctggacacctgcccaatactcctgacctgattgaccccaggtgctttactgcgctccctcctagttgaccaaactagtcatagattcatatgatttaggaactagaaagtctatcagatatctacaaatttaagcatttaattttacagatgggaattcgtgagctcagtgtcagatgttgatgttgtggtgcaggcaggactagagcctctgtctccttcttatgtaattaaacccctttatgattgcaagggggaaacaaatgatctgttttaaaacctaaaagtttaaatctacacatagaatgtctgcttgaatgtctgtttttcaagtgtaggaaatatattacattgtggaatcagagctatattttttgccttcatttatctctctatgagaattctatacctaagtgtatgtttgaatttttatgtttattaataaaatgtgtttactatactttgttcttcaatgaataaataactgtcaatttaaagaaatctatcttaagtagataatcagaaatagggacaaatctgagataaggagtatattttataatagtgcaaaatcaggtaagaatctaaaaagccaacaataagacaattgctacagaggtcatagtgcattgctgatagggaatatcatgcagccagtaaaaaggatgctttcatagaataatgaggggagtatctaactatattgctattgaattgaaaacaaagggtaaacattgcatacatagcctgatcctaatattgtgcctattagagttaacatctgaaaggaagtatcacaaaatattcgaagtatctctgtcttggttagttacagatgatttttattctcctccttgtcttctttttccaaatagtgtgtgacaaacacatacaaagaaaacatttgaagttttaaaaatctaataaaaatgtagttatgtctttctgaaaaacaaagttacttttcactttgtcgctagggggaagtgttcttactccaatcatatgcatcttctaagaccagaatataccactgcattctcaaaatcaacaaggctacttttccatgggaagttctgaaagagtccgaacactaagagaagtggcagaaagagaaagtatgggcccacagctttcaagatgagggctgctggctgcagttcccaggggcacttgtttgtttaatgcagccttataaaggaccagagacagagaagtataatttttttttttttttttttttttttttttttttttttttttctgagacggagtctcgctctgtcgcccaggctggagtgcagtggcgcaatctcggctcactgcaagctccagcttcccaggttcatgccattctcctgcctcagcctcccgagtagctgggactacaggctcccgccaccatgcccggctaattttttgtattttttagtagagacggggtttcaccgtgttagccaggatggtctcgatctcctgacctcgtgatccacccgtctcgacctcccaaaatgctgggattacaggcatgagccaccgcacctggccacagagaagtataattttaattccctggagcagacggtgattcccttgcctcacacttgttaaatacacacacacacgcgcgcgcgcgcgcgcacacacacacacacacacacacacactccatcatgcccacttctctgagacttctgcaggtctccttggctagaatgacaagtccaggcaaattcactaatgttatttttcacctgtcctgaataggaccttccctagccctttacaaccttgagccttgggcaagttatttcccttctagggtcttagtttccccaaccattaaagaggataatagtagttcctacttcattgtagtgttggggagataaaactaatctcagtgccctaaagtgattagaacagtaccaagcccattgaaaatactacatgacaaaagatgtgtctctctcatcttctgcttctctctccatccccctcactttctctctttctctgtctccccctccctttttctctccctccttcctcatctggaaagtgatctttatcttcaccatgtggcattttgaagatagctttaaacaagatgcaaaggcaaaagaaataacaaaagtcatcttgccatttcatggggtaaatcagagatgagatgaagtcattcacttcctaaaatgagttttttcatttttttaaaacaatccacctttttctttgggtctgctgacccatgattacagggtcatattgtgttttttttatttttgtttgttttgtttttcattttggtttacctggcactgagcaataaaataataaaatatatatatcttttcaataataccagtatgcacagaagtaggaaaaaagggctcccattgcttactgaattgctcactaatcacactgtttgaattcaatggggaattccacaacacacccgacttttcatttatttattttttattggttctgggagaggtttgtgattcattccatgtaggttgcaagcccttgtactacaggaacaaatggtctctggggcgatttggtttattaacttttagggcaaaggaggagaaatagaagaattgcttaactgcaatatgctggtgaaaagtttagacttttgtagttcaatgacactttgagatattttgactggtcctgcttctttttcttttcttttcttttcttttctttttttttttttttttttttttgaaacagagtctcactctgttgcccaggctggagtgcagtggtgccatctcagctcactgcaagctccgcctcccaggttcatgccattctcttgcctcagcctcccaagtagctgggaccacaggcgcccgccaccacgcccggctaattttttgtatttttggtagagacagggtttcaccgtgttagccaggatggtctcaatttcctgacctcataatccgcccaccttggcctcccaaagtgctgggattacaggcatgagacaccacgcctggccctggtcctgtttcttgatgatagatggactgattgtagagaaggaggcagcgtgatggagtagaaagatacctggccgaaagacagagactcaggccacggtcacagctctgccacacatgcccagccacatcaccaggctcctcgtgtccctggaactcagtgaccttcttcacacatgaagagggtgaactggacacagccccctctcagtaaggttttgtcatttcagggatgatgataagtcatatcttccacataaactttgtgaggaaataaaaggaactctcccatccataaagaaataacaatcttaatacaataagcatttattgtgctgcctgcctggtgttgcatttaaccccccagtgaagtaggaacagtctccctgatagcagagatgaatcccagaactaacaaaggttaagtaagttgccctaggtcagagagcctgtggctggtggcaccaagcctcaaggcctgacgcacatcttatgatcatgcctctctccatgctgtctctctgggggagcagaaagaccatctaagctgttaaggattcaaagtaactcaagtgaaatgtgcaagttaataaagaggaaggagcaatgtgaatgcttttatagctttgtgaagggtaattcaggatcacagtgcccatgtggtaagaacagagttactatgagagacttaaagagaagcttaattggagcaaagaaagaaagaaaaaactctgagataggacaaaaaatgctttgtctccatcacctatgttttctccttcattattctcttgtaaaatggtgaagcacgtggaatttagtaagtaaataagatacagggtaagcatgttgatgctatttgtgcaatttaggcacttggtgtaccagatggagtgagagcagatacgagggctactgctccaggagctgctgtttacatttaatgagttgctttgggttggtccaaattaatccactagctacgaaaacacggtaggaggcactagaaacatacacagagttcttctctcagaaagatctttaagaactctttaccccttaaattctatgactcatctttaaggcaaggaatgataggttgatgtgaattatttgaacattccaagctacaaatgacataaaaacttattcctatgaagaatcaacaataaaaatttaaataaagagttatggttggtagtatatactttgatgtccatcacattcatgatttacaaggcctactcttcctggcttatgatgtaactaaacatctcaaagatataatatagcaatgagatgatgcttacatgaatatattatgtttttatgaaatacaaggcatcattctcctaaaaagaagccaatgtcggaaaatgaatcctgtagattctaattcctgcactgtgtgaggactactggtgaattattttccgccacaatttgcattttcttctgcagtgttatagcaaaataagcctctttgtttgcactggtttcagaattaatttagtttgtatatttgttctctcctcctcttcctggatttggtttcaaagtaaacagttgttttcattaaattctcttttatttggccttagttctttggttactgtcattattctggatggctgtccctgttttatttttgaatctgatatctgtacactgttttaaattgcattaaattggttcgcttccattttctattgtttacctcattctgggtactatgatttctgtagctacatctgattcctgtcatggtgtgatctttttgtatgaacctaaacaccatacagggttggcagaatgagaaaaagaaaatcaacaatttgatgtttactgaatgtggacaaattacaaggaagaaacaaaaatgacattcatcacagagattgtcttgaaagttaatgacaaacttagagtcttgaaaagcagcaggaactaccttgtttggtaaagccaaaaatatcaacatctttttttttttttagcttaacctagaaataacctctgacagaagcaaaagcagccacacttttcaatttcaagctaaaagaactaaaaagttatttctacctaataaaaaagtacaataagattctgaattcccacagaaactcttcatctacattataacacatcaaaagccaccaaggggccatttatcctgtagaccagtgctaataaagttttgtgggcatttgtgatggtgttcatggcaggagagtagggagagggagttttagtgcagaggagaaggtagcaagttagtttttataaactttctggaagaaaatacagaaagatttttaaaaattattccaatgattcttttaacgaatgtttaataacacctcttaggatccaagtattgttctagagtttggaaatacagcagtaaccaaaacaagcaaaatccttgcctttttgaaaattccatgatatttggaaaagaggaacaataacaaatatacatataataagtcagcagatgatcattgctatgaagaatcaagcaatgggaagagtgactaggagttgtagggttgttagagaaagcttttctgagacagggcatttaggttgagacctgaagaaaataagagaatgagttacgtctacatctagagggagaatattccaggaagaaggccctgggacggtagagtatctggactatatttaatgaggccagtgagtgaaaatataaatggtaatagattaggtcatggaggtgaacttagaaaggagaagacctgtgttaagtatgcacaagactgagggaatgtaaacaaatgattggtaaatttaactataaaaattcaaaaatttctgcatagcaaaatccaccatgaatgaagagaaaagataaacaataactaagggaaaatattggtaattcatgaaacaaaagggctggttttcttgattttttttaaaaagaaacttatttatatcaaaatgaaaaaaaaatccaacagtaaaataaatagacaaagaagagaaagagacaaagcactggaaacaaatagcttttaaacatattaaaagatgtccaaccttccctataataagggaaattcagggtagacccacactgagatgccaatttcttactctatcagatggacaaagatccaaacgtttgatcttaacatatcaacgtttgagacttaaagaatcagatattgtcatgtattgctggtgagaatataaacaagtacagcctttatgaagagaatttttgcaaaactatcaacattttataagcccatatctttgacccagcagtttcacttctaagactttatccaacagatttatttgtacatgggttgaattatgtacaagggtattcactgcagcattatttgtaatagcagaaaaccctaggacatgttgagtagtgagaaatgaatgagaagccaagagtggagtctgattatgaatctctttgtaaacttgaatccttagaagttcttgatcaggtagaatgataacaaggctgtgtttagaaaaatgtgtctgacattggtttcaggatggattgtgtgttggggagagctccaagttcaatgtcatttaaagagttctgtttgagctgaaaggggagaatccttgtttagggggcagaggtggcattaggcaaggctggcgaggtaggtagggaccagcgtatgaagggcctttctcatttttatttttattttattttaagtttcgggatacatgtacagaacgtgcaggtgtgttacataggtatacatgtgccatggtggtttcctgcacctgttgacccatcctctaagttcccaccccttgcctccctaacaggccctggtgtttgttgttccccttcctgtgtccatatattctcattgttcaactcccacctatgagtgaagacatgcagagtttggttttctgcacctgtgttagtttgctgaggatgacggcttccagttttatccatgtccctggaaaggacatgatctcattcctttttatgactgcatagtattccatggtgtatatgtaccacattttctttatccagtctatcactgatgggcatttgggttggttccatgtctttgctattgtaaatagtgctgcaataaatgtacatttgcatgtgtctttatcatagaatgacatattcctttgtgtatatacccagtaattgcgtttctaagtaaattggtatttctggttctagatccttgaggaattgccatactgtcttccaaaacggttgaactaatttaccttcccaccacagtgtaaaagccttcctatgtccccacagcctcgccagcatctgttgtttcttgactttttagcaattgtcattctgactggcgtcagatggtatctcactgtggttttgatttgcatttctataatgatcagtgctgttgagctttttttcatatgtttgttgtccgcataaatgtcttttgaaaagtgtctgttcatatcctttgccgactttttgatgggtttttttttttcttgtacatttttttaagttccttgtaggttttagatattagacctttgtcagatgggtagattgcaaaatttttctcccattctgtagtttgcttgttcactctgatgatagtttcttttgctgtgcagaagctctttactttaattagatcccatttgtaaattttggcttttgttgcaattgcttttggcattttcatcttgaagtctttgcccatccctatgtcctgaatggtattgcctagattttcttcgggggtttttatagttttgagtcttacatttaagtctttaatccatcttgagttaatttttgtataaggtgtaaggaaggggtccagtttcagttttctgcatgtggctagccagtttttccagcaccatttattaaataagaaatcctttccccatcacttgtttttgtcaggtttgtcaaagatcagatggttgtagatgtgtggtgttatttctgaggtctctgttctgttccattggtctatatgtctgttttggtaccagtaccatgctgttttcattactgtcaccttgtagtatagtttgaactcaggtagcatgatgcctccagctttgttctttgtcttggctgttcttgttctttgtcttggatgggtcttctttgattccatatgtaatttaaagtagtttttcctaattttgtgaagaatgtcaatggcagtttgatgggaatagcagtgaatctataaattactgtgggcagtatggccattttcatgatattggttcttcctatccatgaggatggaatgtttttccatttgtttgtgtcctatcttatttccttgagcagtggtttgtagttctccttgacgcggtccttcacatcccttgttagttgtattcctaagtattttattctctttgtagcaattgtcaatgggagttcatttatgatttggcactctgcttgtctattgttggtataaaggaatgtttgtgatcttttcacattgattttgtgtcctgagactttgctcaagttgcttatcagcttaaggagtttttgggctgagatgatgggcttttctaagtatagaatcatgtcttctgcaaacagagacaatttgacttcctctctttctatttgagtatgtttatttctttctcctgcctaattgccctggccagagcttctgatactatgttgaatatgagtgatgagagagggcatccttgtcttgtaccggttttcaaagggaatgcttccaacgtttgcccattcaatatgatattggctatgggtttgtcataaatagctcttgttattttgagatatgttccatcaatacctagcttattgagagtttttaacatgaagggatgttgaattttatcaaaggctttttctacatttattgagatagtcatgtggtttttgcctttggttctatttatgtgatggattacatatattgatttgtatatgttgagccagccttgcatcccagggatgaagctgacttgattgtggtggatgtggtttttgatgtgctactgaattcactttgccagtattttattgaggattttcacatcgatgttcatcagggatattggcctgaagttttctttttttgttatgtttctgccagattttggtatcagtatgatgctggcttcataaaatgagttagggaggagtccctccttttcaattgtttggggtagtttcagaaagaatggtaccagatcctctttgtacctctggtagaattcggctgtgaatctgtctggtcctgggctttttttggttggtaggctattaattactgcctcaatttcagaacttgttattggtttattcagggattcaacttcttcctggtttagtcttgggagggtgtatgtgtccaggaagttatccatttcttttatattttctaatttatttgcatagaggtgtttatattattctctgatggtagtttgtatttctgtggggtcagtggtgatatcccctttatcattttttattgtgtctattttattcttctctttcctttttagttagcctagctagcagtctatctattttgttgatctttttcaaaaaaaaaaaaaacagctcctggattcgttgatttgttggaaggatttttgtgtctttatctccttcaattctgccccgatcttagttatttcttgccttctcctagcttttggattagtttgctcttgcttctctagttattttaattgtgatgttagggtatcgatctgagatctttctagctttctgatgtgggcatttagtactataaatttccctcttaacactgctttaggtgtgtcccagagattctcgtatgctgtctgtttattctattggtttcaaagaacttcttgatttctgccttaatttcattatttacccaggagtcactcaggagcaggttgttccatttccatgtaattgtgtggttttgagtgagttagttaatcctgagttctaatttgatggcactgtggtctgagagactatttgttaatgatttcagttcctttgcatttgctgaggagtgttttacttccaattatgtgatcaattttagagcaagtgtcatgtggcactgagaagaatgtatactctgttgatttggggtgaagagttctgtagatgtctattaggtccacttgatccagagctgagttcaagtcctgaatatccttgttaattttctatctcattgatctgtctaatattgactggggtgttaaagtctcccactattattgtgtgagagtctaagtttctttgtaggtctctaagaacttgttttataaatctgggtgctctttgattaggtgcatttatatttaggatagatagctcttctttttgaattgatccctttaccattatgtaatgcacttctttgccttttttgatctttgttggtttaaagcctgttttttcagagactgggccagagataatttttaaaatcagaaataaaaatgttttaatgctcctaaaagggctgggaccttctgcctgggtaatttctagtcctaaattggccctctttccgggtcattcagatcctggcttatgtactcctcagtcccctctagctgtgctctctttccagcctctcctgaaacacattccagcccaagatctcacaagcattttaattcatcgatttgggtgaaagcaaaggacatgtatattcagcgtgcctgtctccagcactccacaggagacagcagtgcccctagttacattcatgccatgggcattaatcagcctatacataaacactgcagccatgtttttctttttctttttcttttaatgaataactgggggccaatgagtgcatttatcacagtgctttttaaattgcttgatttttttaaattcttttgtatgcttctcagtggggaaaatatcttggttaagctaaaatgtacatgcagcagatcggtaagagtaggtgagcattgcttctaaagaaaagagcaaaattgggtgccatggaattctgatacaacaataaggtagattgtgcttacagatttcatttttcaaagagttgatcattaaggacaaatttagatgacttaatgagaacattgaaatgacacattatcatcttaattcaaatttcccccaaaagaaggaaagttgttttttatttttttaattttaatatgcttcatctatgtcacttcaaaaagattctaaactccatgaaggcagcaccatggacagcttctgtgcccctacaaatttatagtgaccctctttggcacataacaaatagttattagattaagttgagcttatttgaattgagttttcaaggtatttttctacctaggagaatcttaaaaacatatctttttgtaaattttttaaattttactttaagttccaagacacatgtgcagaatgtgcaggtttgttatgtaggtatacatgtgccatggtggtttgctgcacctgtcaacctgtcatctaggttttaagctccacatgcattacgtatttgtcctaatgctctccctccccttccctctcactccccaacaggctccggtgtgtgttgttctcctccctgtgtccatgtgttctccctgaatatcatatcatttttttaaaatgagtttctcttcttgctttctctaaaacactttgaaaatcactatcttctaggttaaagtcagtggcattcagcaaagccatttctgattttatgtctctttttctcaagaagcaaattgcaagtgtatgtataatcatattgagtcacacttaataattatattctaggggaaggtaaacattcaggattctccttactgaaaacagcagtaagatcatttttaatccaatgccatccagacatagcagataatggctagctccctgtgtcaagagacttcactcttcataaagtcaatacttagacaaaaatcagaattgttcccttcttccaaacctactctgaatctctctcacatcccaagggagaaatggttcctcacctgaagctagctggtgtgcctttggtgtaccataatgccttgtagaagttaaagcaaattctctgttcccttctggacaacactttattttttcttgaccatcccaatgtttgtaatcagaggggacatcataaatgctaaatctgttaaatattaattggctagaattctgaacatttaggtcctgtcaaacaaaaaggggaaattatctgagtagtttataaatattgtcatttggctgttccagtttgctcttaccacaaaataaattatcctcaaatttagcaggttaaaataataatcgtactattataaatcatggtactgtgtgcattagtccattcttgtgcttctgtaaagaactgcttgagactgggtaatttataaaggaaagaggtttaattgactcacagttctgcatggctggggaaatgcagaatcatttccccaggaaacttacaatcatggcagaaggggaagcaaacatgtccttcttcacatggcaacgtaaggagaagtatgagcaaaggggaggaaaagccccttataaaaccatcagatctcatgagaactcactcactgtcatgagaacagcatgagaacaggataactgcccccatgattcaattatctcccactaggtctctcccacaacacatggagtttatgggaactacagttcaaatgagatttgggtggggacacagccaaaccatatcactgtggaccagaaattcaggcaaggctcaactagtcgattcttctgctccatgtggtgctgactgggttcaccaagtggtaatcagctggcagatggtctggtctggaaggttcaagatggctttgcttatatgtctggcaccttggcaagggtggatggagatctaggctcaactgggactgtcatctggaatccctacacatgccctctccaacactgtgatctcagagtagattcttgtaagagacagaaagtggtctcttaaatactagctctggaaactggcagaatgtcacttcaaccatatgctgttagtcataagagtcactgagccaatccagattcagaggacaggacataaaccccacctctccgtgaaaagagtgtcgaagatattgcagtcatctttaattggcaaagatgcacatcataagaaaataatgcagctttgtatctctcactaatgaactcatccatcaaaaggcagctattatcaaaagattaatttaacataaaaaagatcaccagctttgcatcttaaagtcatccatgtgtcttttactcccttattcctcatagcaattgctgtcaatacttccaccaaaatatcttacaaattggtcctttcctttccccttacagtacctggaggtggtgacttataaaagctaagctttgttatgagctaattttgtgctagacattgtactaaacaactttacaagcacgatttcatttcattgtgcctaccaccactgaggtatatactgtcataatctccattgcatagattaagaaaataggactttgtgaactacatgacttatacattaactcccagccatttagtggaggagtttagattgaaacctgggcacctgactccacagtcttcattcctaaccagaaactccatgcttacacaagtagagggccttggcccagaggcgtggctttacctgcatcctggctccttgcctttggttgggcacctgtggtggagcagctacatgccccccaccaaccctgtactaacacagagtcagtgtctctctgtgtgcctccacacctcatgcagaggtatcagttatttctaatatatctaaattttattttccaaacaaaaattacatactgctttagggaggcaacagtcttctttaaggagaaacaaaacgagcaacacaggagaggtaagcagaaaggatctgctgatcattagctgacatactgtaactgtcctggtttaattggcaagagaaaacagctccaagagcagagttaaaaataatgttcccaatatttcaaaatataagtggcagagagataattaagacagcccaggatggcagcctctggagtaagttatgctatgttgtgacttcactggtttcagagaaacttaccaactactgccttgatgtcgcaaagttattttgtgttttcttcactttgagctgagagagaggctgaggtgtcatgtcctaaggcatggctttccttagccccaaggtgggaaggaagttctcctaaaacccagggagcttgactgatgacaggcttgcccggcaggtgggaacaaaaccagtcaagaatagatgcacgtggctgctcagtgggccatgcagaccctctgtccgcctggggcctggggtcaaagaagagccaccattcactatgaggccttttccaagtcccagggccgacagttctgaccttccactgctttgtcacctcatcatgtttgaacttggcctctacaggcagtagctatgaacctgaccttttacagtggcctcaaaaaatattggaggagttttctgaaaagctgcttttcctttcatgtcatgaatatttagaacaaaatggggaactggggatgggggttattatatcatatgaatacatgtatgttttttttttaatttttttctacttttagacatcatgttatttgtgtagatttctctggccttctatcaggtagctttttttcaaacaattttgtcatcagaaaaatataagccccaaaacacactatttatgtcctttgtcagtcttcttcctattcttcacaaaaacctatgtatcattataatcagtgcatccatgttattttatctagatgtttcacacacaattttatctgagcttttctaagaatttgaataatttgtgtgttttttagtaaaaggaatacagcgtttcaatgtatttgcatacattcacactatttaatgatttatcaacaggtattttgattaataagaactactgaaatcaatcagtataatagtcattagtgtttttattgtggataataaaaaaaaaaaaacacataacatgaaatctaccctcagcaaatttttaagtttgcaaaagatctcactaaggatgatcctgaagttttgagccagtgtatactggctttggagtcctcaaaggagaatctaattttatttcatatttttatttatattgtgtttttaaaaaattagtaatggcataaaccagataagaaacaacataaagcagcatattctgactggtgatctacattaaaagaaaaataaataggtgcctacttatatcaaaaatgtattatcttggtttatataacaaggcaaatgaattgagataacgaatagaaatacaggaaccggtagtttgggcaaatggagccgtttagttttatgtttaatagtgctgggtcatcagtaggattgccttttcccaaggccaagaaggcacctgcttaggagagggttaacttgagcattttattgtggttgggggagatgagtttgaaggcttcagaacctacaagcctagtaccatggtcagagttcaacgtggaacagaaacattgaaatcaccaaagggaaacttcctcactttatggtacaaatcaaacagcttctcaccttacctatagaagataagttctactagaggagagagtgttttaatttcaacaagaagagaacctgctaagagatgatttcaaccccataactttaaactgtgactctatgttaagtccttatgatccaaccttaaaacgtgtcctttttcccccaggccacagtagctttcagactttgaatatagctgatgtcttcaacagaaaactaaatctttccaagcaatactgagttcatttcagttcagtgtaatttcgtcaacttttttgagagcttataatgtgatgggtaccataataggccttgaatatacagaaccaaatcagagaagctcccctgtcccccaaaagatgttaaagtgcaaatgctgaaaggaatgctgagtagtgtgatcacatccagacagatctgtacatcttgagagatccagaaatgcttcacacaggtagatatgcttcaactgggtcttgacttttgtgcatccaaattcacaaatcagcacttcttccctcatattctcagttttccccagactccagaagaagatgggtgagacttccttttctaaatgcagctgatccctgacctaatactgtttttacttcatgtggaatcattagatatatttaacattctgcatttggactaattttcttattttcagccctggttctagacatataaaataattttgaatcttcaaacaaaatacaatcgtcctaagattcagtcatctatttcattttggactatatgaaagcaaatttaaaaacgtgaatgcaccattatttttcatccagttgttttaacaatgtttaaacacaggttgggaacctggagctcccagtttgcaaataaatcatgttcctgtattttaacagatgcaatgctcttggtggcagagcgactggaggggccattcaacattgagtcggtcatggacccgatagatgtcaagatttctgaagccattatgaacatgcaagaaaacagcatgcaggtgtctgcaaaggtatttgcattagtaatgtatctgccaatacatgtatgttatacaggtgcaataacctaaaaacgaagtaactagatatgtcggctgggcttataaattctaatatgctgtcagcgagcttttcctgttgagccacaaatttgctacttcattaaaaatgtctaacaaaatggcattgagaaggaaagcaattttttagcttgcaactactcaatcacgaagaaattatgggctgccaaaaggtttcagagagccccaagtatgttgactaatccctcacatttgtgagcaatttggggggaattttctttttaatgtttgaaatgtctgcacaccctcgccctgttctctgtctagcaacttctaattatatcttcagctgtgcagaccaggcacatgttctatattttccattgtaaataattaaacatcccatctgacttccttttaagactatggtgtaactttcattaacaaatcttcaggagaaaatgctcctttgtatgaagtcaagcacacatgaaaagaaaaaaagtagcacattttcataaatcatatgagacagagctcctgggtttgcagctgtacaacacaaatgccaggtgcacaatttttatttgtctccacccagttgaagataaacaggacccgccttaagcaaaattgagaagtttgcagtgggtctcccgcctcttccttcatcaatctttctctcccatagtgatgactgcacaatgcccttctgttctcttgactagtatccctttcatgaaacactaaccaaatctatatcagtcctttaaacccagtgaccgagtgattgcattttaattgaaagtcatttacactaaaatatgtcaggcaaagagttgcatgattagctttctttaatttttaaaatcctttgtgaaagagatttcaaatgtaatcacagaggaggggacaggtagtaggaagacattgcagagcaagaaaaaggagccatggattcctactaggtctccttggctaagcatgattcaaactaggtttgggcttttcagggtgaactggtaggatgaaggagaagaaagaatctggcctgggtccctttttctccatgggagatggatgagctagagtttcataagcctttttgggggttttaatgagctcagtgtagcctgtgtaaaggaggatgctccaaattaccatcacctgttggggaaatagcacatttggggtttccatgaaaggccattttctttctttcctgtggaaaaaatagcaatcatccattcctctcaaatctatgcctagaaaccaattaatgttattttgaaaggcacggtatcccgttggtgctcaagtaatcaggtgctaagattgctaatgttaaaaacagctctagagactaggacaggaggaacacatggacaaaattatctgcagtttgagaccatcacaacttcttagaagtaggtgtctgtttccattggtgcgtgtgcatacattttccaagtcaagtattcttttctacccttttcattccattcattcattcattcatcaaatattttttgggaatccatgtggaagacatggctttgtactggggacaggagtgaataaggcaccattccagccctcagtaagcttactttctaaaaggagagacaagacactgaacagatcagcaattatataaattaattaacataacatagcaccagacaataataagtaataggaagaagcttctcctcccccagggcctggacatatttgaacaggaagtttctatcacttattatatatttttttcaaggaacctcagtttctctaaaagcaacagcttcctcactggtctcctggcttccactctggaaccccctccaatttattcttcatccagtagccaaagtatttctacaacatcaatacggtcatgcaccacacccacctccctccatgtccccagtctcccactttgcctttcagtggcttcttttgtacttagaatggaataaaactcctgcaagctcttgcattatctggcccctgcctaccttctaaccttgtttaataccactggtccttttgtttacttgttcagcaacatggtctctctctctctcagctccttgagtatacttgtagctcctctcttctgtaatgtttttcactcttcttacctttcagtatgtccatcttgcaattctctatcacagaaatctgtcacagcatctattatatatatttgttatatatatataacaaatatatatataatatatataataaatatatatatatttgttatatatataataaatatatatatttgttatatataataaatatatatatttgttatatataacaaatatatataataaatatatatatttgttatatatataactaatatatataacaaatatatatatatttgttatatatataacaaatatagatagatagatagatagatatatagatagatagatagataatatatatatgtatttgtttggtgtttgttccctacaagtcttctcctgacttcactcactaaaactccatgagtgactgggatcccagctgtgtagctagaacacagcccagcacttggcacatagaaattgtaggcagatgcttgttgaatacataatgaagaaaaaaaggaaatgcaccagtgagtgagctgcaaacaactgttaagaaatggacccatttcaagcaaagaaaccatgccttctcaagtccgacagagcttaaaggtaaaaagaaaaagaaaaaaagaaaccacttctgtaatagttacactgtttgtcctcaaccagtttgtcttgagtctgctgcatggctggtcatttcactcctgcaccctgctttcttagtggagttacatttcttcacttaaaactaaaagagctccttttttaggagagttggcctgttcacacagggagatgactgggaggccagcttcaagtttaaaaaatgttatttctgagagcatagtctacatacatggaatccaatgtctgaaatcactcccacaaagttttgtagtgtaacaagtcagggtaactaatgtcactcaccgccatacaaatccatggaatttgtggcacagtgtggaggttagacagttagatgttcctcctttacattgctactggttccctatgtccatccaaacctagaaaaataaataaatctttaataaaaggaacacaggaccagatatcaggggacctggattttaggtatgtctagtttactcactgatatcacaaagacagattttaagttcttaatatatactaagtgttgaaatatcccttagtgctccatcctcatctataaaatagctagatacaaagaagaaataatacggttttatggaatatctttgcaaattaaaatggcagttctcaagttggggttcatggtgttctaggggcccccatgaccactttgagttgtctgagaaatcaaaactattccttatgataaaacaaacaggatttgcctttccccactatgttgatgtttgtattgatggcacaaaaacaatgctagcagtttagtatgaatcaagtcagtggcataaaaacagttttatttaagagatatttaatgaagtaataaaaatcattaatttaaaagaagaggcaaggtgtggtggctctcacctgtaacccagcattttgggaggccgaggcaggaggatcacttgagtccatgagttcaaaagcagcctagacaacacagacagactcccatctctataaaaaataaaaattagcccagcgtggtggtatgagcctgtagtcccagcttcttgggagacggaggtagaaggttcacttgagtcagagaggtcgaggctacagtgagctatgattatgccattgcactccaacctgggcgacaggatgagactctggctctagaaaggtaaaaaaaaaaaaaaaaaaaagaaaaagaaaaaaagaaattggcccagtgcaaagaatctgctaactaaatgattatcttctttaaatttatttttaattgtcaaataaaattgtatatacatgtgatgttacaagattgttttgaaatatgtatacattgtgaaatggttaaatcaagctaattaacaaatgcattgcacctcacatatttatcattttttgtggtgagaacacttaaaatctactctctcagcaattttcaagtataaaataccttgttattaactatagtttaggtcaagtattaaaaattcttcaagagatcagatgggctatttattactagaatgcaaattagacatttttgtggaatttttccaactacattattatagtattgctgttaataaagaatgtactttaatatgatacatatctttgtaagaaatgttaaaatcaagagtagaaataatatagggagaccgggcatggtggttcacacctataatccctgcactttgggaggcccaggtgggcagatcaccggaggtcaggagttcgagaccagcctagccaatatggcgaaaccccgtctctactaaaactacaaaaattagctaagcatggtggtgcatgcctgttaatcccagctactcaggaggctgaggcaggagaatctcttgaacctaggaagcaaaggttgcagtgagccaagattgcaccactccactctagcctgggcgagagagcaagactccatctcaaaacaaaaaagaaaagaaagaaaaaaaaaagggataatatagggcatgtaagagtccactcacatgagaggacacaggaccaagggtcaaaaaaatgacagaaacaaaatagtgtgtctggtacggctggtacagagaaaagaggacgcaaggaattaaggaagaggagagaacagccaaacttttcaggaaagagggaaaggaagccaggagcctaatgtggaagacggagttaaggaagaactaaagccagctttaaatatcatggagaggtaaagtggttggaatttagacaaattccatgggaaacaccaacaggatttgctggtggaacagatgtattctgaaaagagattttatttcatcaagggaatggaattttcttttaaatttagaaatctgtagtttcattttccatataagccacatccatgaaattataatacacatgaactagagtctaaaatctatattctagctaagaactgggtgattgaatttatcttttttttttttttttcaaagaaaccctgggacactcttgataaacagtctcatcacatttgaagttctggatttccagactgaggctgagaaattacataaccagaaatatggttaacttctgagaggcaagctccaggtgaggccagaagctaactcctaattagggccagatatcctgagagttgtaaagtttagaaattaaaataactttttcctctaggatatgattggcaacttctcctttggaaatcatttattttattaaagcagttactattagaagtcattcccagagcctctttcagaaaagcaacaatatttataactgccaactcgtatttattgagtgcttactgccagggacaatactaagtgttttacatggtttctattgtgtaatatttataatagtgcttgtgatgagatagagctccctatttcgcaaagacagaaaagttattttccaagatagagaagttaggtgacttaccaaggtctcacggtgcaaagggtagaagagcatctgattccaaagcccatctcgctaatcgatgcataaccctaaccctaaccctaatgatgtcagtgcccactgagtcaatctcacacaagggcaaggttcagtaaatatttgctgaatagattaagtattaggagaaagttcaacagccttcagcaaaacctgcaatgagaaggtaaggaaaaggtagcaaagccaggacgacccaagctccctcctgcctgattccctttacaactatgcctagtacttccatatgataaattctaattaaatatttctcttatccagccctgtcattcattgcttccaacctctcctagagttttgatagtacacaatataaaattcttctttctctcttatgtatctcttatgtatcttttttctctcttatgtatctcttatgtatctctcttatgtatatgaaggccaaaggtgaacacaacacagtttcagatgggatatctctttccccaaactctcacatcatatctaggagaaggaatagctaatcttttcctgcctaataattgagatcatgaataagtgggacttagagactaaagaaaagatttattctcaccaagtatgttcatgcttcagtcttgtctcagatctgtttttatagggactgtcagatccattttctctcctatttggcccacaaggaagctattagggatgaggcgcattgagattatttccaaaaaatatattggctatgcctagttgtataaccaagttagaatattttggtaataacatgacgctcatttcaaactgcatttgtatactttttgtacaatattatatgtatgtatacatttttaaagaccaggggcaagagcatattaaaactttcccaatttccttttgaggaaagaatctcccagtaacagtgacaaccatggttacccttggttgaacacctgctgtatcctttcaacaaatactctaccaagtaccaggcacaaggaatacaatacagaatgctttgatttggctctgtgtccccacccaaatgtcatctctgaattgtaatccccataatccccacatgtcaagggagggaactggtaggaggtgattggattacgggggcagttttccccatgctgttctcgtaatagtgagtgagttttcacaagatccaatggttacataagtgtttgacagttcctccttcacacactctctctcacccaccaccatataagacacgcctgcttctcctgccatgattttaagtttcctgaggcctccccagccatggggaactgtgagtcaattaaacctcttttctttgtaaattacccagtcttgggcagttcttgatagcaatatgaaaatggactaatacagaggacaagacagagtccttgctctggtgacatcttggtctttctagatgccttatgtatttatttcaaatcctcacagcactcttgtaaagaacattcatttccttattatacaggtaagaaatgttaagtctagagagattaagtagcaagcctgaggtcgtgtaacaaacaagtggtgtaacggggattgcagcccaggtctgtcagattcaaagacaaagactttcccagcatgccatgctgtttcctcagtaattaccttcccaccagcaccagatagacttcagcctttgaggagccagccatttaagggaggactgttacccacagcgtactatatatagggaacctattgataagaaatgtagttgttagtgcttcaagccccaaccaagcttactacattcaccaatttcaatcctcatcaaaggcagggaagagccttcattattccactatcttccacaaccgcagttacccaacagttcagaactttgcagatttgtggaaattccccaagggaagggagaaaaaacctgaatctctgcctttgaatttcagatgtgttgataaccttcttcctatcctatcagggaagatgaaactgatctcactagatatcatttaactatattcggaataatttcaaacctaatatctaggaaaagattggtttgtcagagataatctaaattaagaaggaagacttattacattccaattgaaaccatccattcaattaattcttactaccgacgagggtagaacccattaaagatgagcaggatggccttcaggtacttaattttctctagacagtttttcccaatccacagctcaaatgaagattaaaaaaaaaaaaaaaaaaaccctaagagaacagaacagagaatgtaataacttctgtctctagctattggggcttagtttcctcatctgtgaaaggaggggttaatctaaatgtcccctaccagctctaatagtttatagttttatgaacattatagccttgattattacaggtttctttttccagcatccagatcttttttttttctccagatctttttcctttcaaaatgttcggggaaaataatatcttggaaattcagatggagagaatatcttctttcagatatcaggattagtttagaatttagttcaaataaatatatttttgttccagtatcatttatctgttttttcctttgagctcctgtattagcatgtccgttgtaaggcagtgagcatattattcctttttttacggttatttttgtgcttactttctcctgcccaggattataaattatttgaggacaagagttacatcttattcattctaacattctgcaaagagtcttcctaacacattgttttacacatggaagaagcagtacattgtgctgagttgaattcagaacatgaaaatataatgccagagagacttccagcgataaggaatagaaaataccttaaaatgtacttgaagttagtctagtattctttagactaggatagcagttaccaggtcagatttttgacatgagactgacatgggatctagttgttctatgttgtgtgatttggggcaaattttttatctgtctaaattaactcacattaaaaatgagaatgactatagtacctactcataaggttgtttgagagcacaatgatataatccatgtaaaatgtttaccatggagtaagtcaaatcaaaaccactcccaaaggctaagcattttaattgctattattaaaaatatctatggtacctaaattctaaagagcactgactcattggtcttgtctcacctatgatagtctgtggggttgtttttagcacctaaggtcggaagatcagacttgcaatccacaccccttcattaaacccatggatgtatggtgttatttttgatggcagggaatcacttagaaagggagatggatctctaaataaatgtctatgaacaaggcttttaggagaaagcaggctcaagggaaggggtagtgcaggagactgtgtcagcaatccaactctagtctgtgcctgttggctacatcaacacctccatagcaaagagctttagaggaatttccatgtaataataatttccacactattcttacattgagagaaaaattggcctgcttcattgacaggttgtttggtcccttctgcctgatttctaagaaaaaagtgaatggccatactatttataaagctttacattctatttctacttctttagttttgtttttaaaggaaaagagcatgttctcaatgatttctaaattcacagtatcttctctattcaaattctatttgtattctgcctatcagttcccacttactgcgctccaccgagaaacagggaccttgaaacatcgtttattctttgatgacttcattacctagcacacataaaattggggtttgttctattcctgcttgtaatattgctggataacagggtcagatttttcaggtgctagggcagagggaagagggaagcacacctttttttagaaagtaaaatgaaggtttgaaaacatgcttatgatgcatttatgtgatacccatccagcgcgaactagttttaactttccttgcatgtaaaagggatacaacaaaagtgttctccttttgatgataaagaaaaactcctttttctctaatctttagagatttttctgaagatttgctttcactttaacttcagggccgtaagatgagaagattacatttaatgtagcctactcaagaataaatgattgaaacacaattcagctttaacactcaatgtgtattcttaggaacaagagaaggtgctctcctggtctcctgaaaaaaagtctccttctgacttcttcctacttaagagaagagcacctgccatggaactgtgcttctcatgggcagtgaagtattgtgttagagaaatttcatggcctctgcccagtctcataaatacacctccttatcccagctctcagcacttcccttctgtgtggtgatatgcaatctggtttggttctgatcgagtcattgcctcagccagcctacatgtaaacatgtgaaggagtcacatctgtgggggaaacatgctcatttgtagtgtttgcccatttctgtggtgtaattactccctcgtgcatatttcaaactaccaacataatgtcactgaacacagagtagaacaccctgatgtaacatttcctccttatagatacgactgacacaattaaccttaagagcatagataacagtaaaataattagaaagtaatgagattttagtataattattaactttgttattaatataattcatataactgtaagtttatacaacttaatttttaataatcaatgcgtttgttaataaacacattaataatgtgtttattattattaacaatgtgtttgttaaacgcagttgttactggcttatgaaattcctaaaaacttaacatgtagttgcatggcccagtaagacctgggtccagcataccactgcttttctaggaagatttctcagatgctccagcctgggtgagttgcccctgtgggtgttccgtcacacttcttacattctataataattgcctgatttcttctccaaaccctcttgggagcagggacgtgtccaattggcatatccccagcacttatgtttgtgacactcaacaaatatttgttgaatcgtaggtggaaggaatggtagagcccgtctgatgtaaattacatgcttacttatattctgcaaagtgatcttacagaactgctttaaaccttacaagcaaagggcatatgaaataataatcatgtagtcaggccaagaggattagggcttttttcctctccacactcaaaaatttgctttgtaaagttccttgtaactcctccttcctcaccatttgggaggaaatatcaaggtgttttgctgcctgagaaatgcaaatccttcagggaaaaatatcttctcatgcaatgcaaatgaaaagaatttcttttattgtagaaaagattttaagaagtatgcaatacatccgacagatattctggaaccaagctgtgtgagcatcaggagtaaattttttaaaccttaaaactgacacagtagctggctttttaaaattgaggccaatgaaaagtggacaaaactaaaactgatggcttgccttggttcagtagaacccaaaattctcctaacagagtgctgaacccatccagggacatagagtttgccagagaacttggcctgaggaccattgtaatcaatctttaaggaaagaaacgcatgaatcagggagcaaagaaaaaagagaaaaacaaaatgagaggaaagggaagacaaaagatgactagagaagagattattctaagatctaaggatgaataactgttttgttagaaggcaacccgtaaaaaattaccacactaattaaaaaaaaaactgacatttaaaatgcctttgtagtgagtataataattttatatctaaagaaaaagtcgtcatcaagatgttttaagtttatattcaggaaaccactttttatgctattagataaatgctgttagaaatcccctaaaagtgtgtgaaatgaatttctaaggtgccagttatcttatgtaatagtataatgtagctccttttgctactacttttaatgaaatttttttaacatatttcaactaattctgatttgcttcctaatgatacgtgaatgctcccaggcacacacatttcagtcaccacttccactttgagaaaggccctagctctgtgcttaacctagaccatcattggcagggataggatacaactgctccaatgtacaggtgccgctgtttatcattttgacagattggtgataccaggaagtaaagagcccaagttgtctgccactttgcagtaagcagtggccattgcctgagctctgagcccagctgtctccagcacccacggctctgatagctctcccacgggccaatcaggaagccaatctaactattttgtgtgcaaggtcctcctaactggcttatcaagctcactgagtggctattatcaactgatcaggaaacagtattttgggtctcgttatcactttaaacaaagttgtccatttggctttgctttaatttagcccagtaaatgtagtaaaggaaatagcaaataatttgttttacatggatacatgattcattccttcagtctgaggaagaaatgttcaaccttgattttgaagagataattgatcatttgagataatgcatataaaacacatagcacagtgaagtgtctgtcctatcatagacacttgatgagtgttcattgtctttcctttcctatcttttctttctcattacagaaatctacatgctaattgccttcaataaatgtttgcaaaaggggacgattatgactaaaaattttatttcttcataatctttcattctcaattttttcaaacacatatcatgtgctggtaactcctacagatactgggatacagtaatgaacaaaatgtatgaaaacctattcatcatagagcttaaattattcatgggtaattctgcgtaatccttagatttgatttattaaccattattattctatttaattacagattacttacttaaaataaggcaccattatacctcatgttttcagtgtattcttctatgcatcatatcattctatcttcccaacagctttgagaattggggagaacattgtaaccccaaggtcacacaagtattaggagaaagattaatattaacattccaaacttatagacttgtgtttctgaccttttacaatgttctgaatgtatgtgtctctccaaatttcatatactgaaatcctaacacctaaggtgatggtatttggagatggaggctgtgggaggtaattaagacatctgggtgaagccctcatgggctggattagtagtgcccctgcagaagaggcctgcaggagcttgttagtcctttttgcccttcagccatattcggacacagcaagaaggtgccatctataaagcagagggccctcgccagataccaaatctgttggcactttgatcttggatttcacaacctctataactgtaagaaataaatttctgttgtttataaattacctagtgtaaggcattttgttatagccaccagaatgcactgataacacctattggttactccacagccatttcttgtgaaaataatggctgcacctggacaaatatatggtatccacactaatgaagatacgatagcttctatttccttgagtataaatggaatatatttgaatttcccaagtagtaatctaacagttcattcattgacactgtaatataaattagaatctcataggtaaataaaacattacccttaaaacatcaaatctaattaaatccaggtaacattaactgttacctggatttaatataaaagattagagctctgtttgcaaatttcaatatttgcctatatgagaatagcagcacctttcccccattatggaaacctgctgagtagaaagtgggaagacagaatttttaaaaaccacaggagccgagacgggatttacctgcagccactgcttttcaggttaccagtagtgactttttaaatgtataatcaagctgcaaaagacaatgaagaagataaagaagataaagaggtaaaggtataaagctacatgtgcctccaaaagagtgggcaccttagtttattttaagagaaatacgttaagatgccctaatatttttaaaggaaaaatacttgtatttagaaacctaagacacagcacttaaacctgttatcaccacacctcctcttccttcccatccctccagaattataaaatgtttctcctttcagcccttcctatcctaatgtcagcttctttaatctcagaatgccaacagacttctgagacattatcttagtaatcctcttaagagagaggattcatgagccagatatcttcctaaaatccacaggttttgcaagtcagctaggtggaaggagaattgctttgtacatctgtagcatctgtctgcattgaagcttccaaatactttcccgaattatctaattatcactttcaacatcccttggagagaagcaggcagcggtcaggaggtggtaataccgattctgtttcttaaaggggtagagcgaatgatttgtaccacaataagttggcttatcctgcagcgataacctctaaaaacttctgttctgttgtaaaaagaagccctttagtgtcttaaaatagcattcttctctggaattaaaagcagaggagggtggaacagcttcacaaatacctctaagtaaatgcagttctatctgaatcacgtctctccttggcaggttacaaccaccttcacagtatatctcagggtgggttctttggaacaccagtcttatgagaaccccatgaggaaaccatggtcaaatagttttgggaaacactactgatgtcatcctccctgtcaatgagtctgaccacatgttatcatgatggagcccttgtgaagttacctaatttaactttaataggtggaatctatgatttatataacagccatttgcccttaaaataatattttgtggaaaacatttaagagacatccattagcagggtgtggttggcatgcacctgtggtcccagctactcgggaggctgaggcaagaggatagcctgagcccaggagattgaggctgcagggtgttgtgtttgtgccattgcactccagtctgggcaacggagtgagaccccgtctctaaaataaaattaaaagatttttaaaaggttaaaaaaagaaagaaaagaacaagaaacatcagaccagacattttttcttcaaattttcttatctagaaagcaaaacttctggaaaatacagattatggcatgataaaattaactatcaggtatgtacttttctagacacatggttctgtttttctgccttacatattgtactttatcatcatagtgtatctgtgtggtaaataatattgttattcccatttgacagacgagcaaactgaggctcagagaggaccctgtaaatgttggcatggcaataggctgtcctcagcctcatccatctgcccacctatatatacttgtccttggtaaatgcaatcagtttcagggctttaagtaccatctttaagctgatgatcccaatctccatctccagccataaccaactgatctactgactctcattgaacctatggccctatccatcacattattatttctcaattgtttttttcccttattcaaaatgtaaaatgttgggatacccaagccactgaggaaaaggctaactggtctcttatactaacctagccatggccttcatgagccacaaaactgtgcctaactatactgctgctagagcaaactcagaaaattgagacggtccaaattttctgcccaaaaatttcctttgtcacccacctcgtgactctcatattttaaaaatacttttttcaggataacagattgcttgcttcttagtctgctcaggctgctataacacaatgccatgaactgggtggcttatgaaaaacagaaatttatttgtcacatttctggaggctgggaagtctaagatcaaggctttagcagatttgatgtctggtgaggacctgcatggtgttttatagatgatggcaccttcccactgtgtcctcacatgagacaagggtgctgtccggatcatttgttgttgtttttttaataagggcactaatcctattcttgagggtagagcctaatcacctcccaaaggacctacctcctaattccatcacatctgtgattagatttcaacttatgaattcttggaggacacaaatattcagacacatgtattaaacatcaaattattaatttttactttgtaagtcatctaagttatatgatggatatatgttaaggtatattctcagtataagactaatacaaaagtttttttatcatttctaagcaaaaacaacggcaaagtactcctttgtaaaccattctcattaggttttgtaaaattctgaaaaatagctcttgatccctaggctgggaacttctgtaatggaggggtccttgcgcccagagctcccaagatggccacgggtggcttccaagatggcgacaagcctcttgatctctgacctggggttcttggcctcacagattccaaggaatggaatcttgggccatggggtgagtgttacagctctattagaagccgtgggtcacggaagagaaccgtggaatccagcgactagtgcttagctgaattaggacaaaccgaggcacttagccgtgcaggaacaatggcaagcctttagccccatctggagcggcaaggggcacctcgctggatcaggagcacagtggacacccgcgggatccggaggggtgggagtcagcagtgggtctgcaacggcagcaaacagcagtggtggatggtgagcgaaagctcagctccagccgtaacaaacacagaccagaagagtgtgcagttgcaagatttaatagagtgaaaacagagctgccatacaatgggaggggacccaaagagggtagcccttgctggctggaatgcctgggtttatatcccgatcattgtccctccccctgtgctcttaggcgatagatgattggctatttctttacctcctgttttgcctaattagcattttaagctctctttactacctgatcgggtgtgagctaagttgcaagcctcgtgtttaaaggtggatccggtcaccttcccagctaggcttcaggattcttaatcggcctaggaaatccagctagtcctgtctctcacttccacactaaagggtttcttttatggcacttctgtttttctaagggtatgataggatctctgtttaggggctttcaagatgtgaggttgttgtgacagattgttatgtaggtctccacctgattatgtggccaggtgttgtttccaaagtaattagaagtcagtgttttcctcagttttggtcacagacccagtgatttctgcatggaagctatcttcaacatccaaacctgacctaaataacagaaagctactaggctatattgactaacctatgttctgtaataattaactccctccaaaaaaaaaaaaaaaaaaaattccagcaaacgtgaggtttttccattatgatgaaatatctccctagaacactaatattctttcagggcattcgtgtttctttgatttaacttaacccagtgagccacatttttcccaaagggtgaattaaaaagtccattaactctttcagtacatggcttcatgaaatctcagcaaggccgttagtattgtttcgccttaggctttacattttttaaaagtcagctgtcactttcaaagcaatccagaatagcacactcaacagatccctggagctttggaaatgttaatgccctccatcagcagcgaccttgccagagggaagtgatttaggcactacggagaaaagggcccactatctttatcacatcggtttacaccatcagcttcagaaattgtgtgagagaagaataatcaatagtgtgttaagaccaatctcgaggaatgccaagacaaagtaccgccgctctgcaaaatgctgagttgaaggagaacttttgaatacaacaaaagaaaaattagctgtagtggtaaaacaaaatgaattgtgtctcaagacggaatttgtcattgtgaatggcactcaggagctctctgcgtacttcagtggaatcacatcatatgcgtgatgaaaaatggttgttttagagttagacaacacagaatgaaataacaaaactggaacgaatgcgttgcaagtatactacatgcaagttaaggatcagcccatgtaaataaccccaaaaagtttactgaaggaaaaatatctagaaaaatcatctgctatggagaaatggaagaaatagaataaagttaaacttcatcaaagtttcctgaaaatgttactgcatttcctgtagttctagtaaaggtattatctctcgataaccagcacagagtgtaaagcttctaaaaacagcaaaggaagtgtctccacaccaccctgagtgaaatcactgtggaaaagaactggcagctcagtctctaagatcattacaatacaatgtttgatttcccatagcaatcttaattgtgacatgaacagctgtcaacaacaaaattagaggaagctgttattatatggatttcatccacatttgcttgtcctatttctataccactgctcaagagagtgtttttaaagaattcttccagtagagattttcattactcaaaggggagttactgaaattatttggctttatgtgctatacaatgaaataatttgtcatgataacaggaatcccaaacggatgtttatagaatgccaaattcaagtatgtaaaagtgagatacaattcatttaatcctgaaatcatcctgtggagtaactattgcaatccctatttttagtacagttgattctctttattgtagttatgttctataaagtcactgcaaacattgacttagcaaatactgaaccgttgcagcaatgagaaatacaaggttaggctcctgcaagccactgggcacaacagtttcatcaaccaatcaatatgtagccttgtgttatgtgtgtttctgtgaaaagacaccttatttaatatatattgttgattcattaacattgaactcatagcactataactcaggcttgaagtttgtctaacatacatatttttgctataagacacattacacatcttgtggttaggaaagcttgacagtacttcagcccgatgcttggggaccattttaaacattgaaatcaacaagaaaaagcacaaaaatgtgaaaaacattgtactacatagaccacaaagagaacacttgtttacagtctgagagctgaaataaggagagtgtcttctccaacctcagctgggaacatgactcagattttttggcactgtgtctctatgtccatgagagtgctgtgagtattaattctggggttacaaataaattttaatgagtaagcaaatttgcaaatatgtatctaccaataataagattgactgtgtatgctgaaactatgagtcagggattatagttggtcactgtgtatctgtctgggtaattctttctgttatattagtggttatacttgtttacatttcaaaattagagtttattggaggtaaaagtttcataagaaatgtggacaccattgcattgcacatttctgcttcatgaatttaggagaaaactcattgtatagctgtttttacttttcaatggttcttccaggtctttcagggatgtggtcagcccaaacctgctccagccctcagatctgcccgctcagctcctgaaaattttaatacacgtttcaggccctacaatcctgaggaaagaccaacaactgctgcaggcacaagcttggaccggctggtgagtattcacagattgataaccatggcggatgctttgttttaccaaggtcattctttgaaactcccaggagattctggaaaagtttgttataagagtcatctcatgcttatatctgcctctgttcttaattagaatattgaaaagtaatgggatctttcttttgggtcatgtattggattatttaagaaatctattaatccattaagaaactattaatgcatgtatgcagtgaccacattttcaacttcttatttctcatgaaatattaatttgaaaactaagttgccagttcttccagagatataattgcaatagcacatttcttactcatctgcttcagttcttttctgaaaatggttatgtattcaattatgatataatgcaagtttattatgacttcttatttgcaaagttttctgtttgaaagaccttgcccggaaaccccaaatcaatgttactatcatttttttttcttttttatgtgtctttaaaaagttggaatccttagaattagtcactctttgagctgtttagatgtgtgtcaggggacttagtgatatccatcatcaaagcagtttataatactcggaaaatacaaccataaacatagtaaatacaatttttaaatgtgttttaaagaccaaattttgccatttaaaaaagctcataatttcaaagaaatactgcctgattatttttaattcaatttcttccatttgtagtactgtaaacactttatatacctacaattgttagtgctattaatgttgctttgccaattatcttgatgtaaaattaacagataaaatccttaatgtcataaagcacttgaaccacatctgactgtgtcatataaacttagatctcaaagactgccagttatgaaaatacttttattagtcactgttataaattgctttatgattttagttaatatccttctatagtgtagaactcataagattatattggttgaatttggcctcaaagtaagtacatctcagcatttctgtctataaaaatcaaatgtgcttacaacctaaaggcctatccatgaagtatcaaaataaaggggtaactaactgttacattttgttataaatttattgccatttattagcaaataaaaccttctctctagtgtagatatttgtagttgctgcaaccttctactttacctggcttatatctattcttttttttttcccttgagacggggcttcactctgccccaggctggagtgcagtgtcatgatcatggctcactgcaaacttgacctgctgggctcaagtgatcctcctaccttagcttactgagtagctgagaccacaggcatacaccaccatgcccagctttttatttttttgtagaggcgtggttttgccatgttgtccaggctggtctcgaactcttgagctcaagcaatccacctgcctcgacctcccaaagtgctgggattacaggcatgagccaacgtgctcagcggcttacatctattctctattgcagtttcaggaaaagtttaaaaatagtcaccatttttcttttaaacaaccaattagattccaccaaataactagtcagctgttttaaagaaatgatggttttcattagattatattgtttaaattttactttacaaattgcattgtatatcaagatctttctaaccagaggacaaatggtgagtatgggtttggtcccttttttcccatttttgctggctctaacttagttattggaacaattcagtcttttctgaatttttgtaaaatctaatttaagaacaggagtacagtgtgagatgaataagttctaaagatctgaggtactacattgtgcctgcagctaacaatagtgtattgttcacttaaaaaaaaactgttaagagggtagatgtcatgttaagtatccttaccacaataaaataagaagttttaaaagaactgggtacattttgcacttagttaaaattgcactgaatttgaataatataatgatatgtatggcaactaattaattttttccctctgaaacagagaagccgttttccttcatccccgggagaaataaacacacacccttaaacaggggaagtagagcaagaaaaatatgtttctaaagacaatgtttttgcagcttagcataaactaagtaaagcatcaacacttcgagaattttctctggtgtttaaaatctgatggacatgaaaattgagatttgaaccttttataaaggaactttattggtaatgttcaaaatgctctagctataaaggtctcgagagtatagacaagtagcaaacagaatgaaaatcttctaccttttgcacccctcaaaaatatattttatccatctttttctgaaaatgattggtaatggttaaacgtatcatcacaagtaaaagccaaggaccagactctgtgcctaagtatttaaatcaataagccaattttattctaaaacattctcagacagcatgtagcatttacttcctcaaaggtgtggcttcaggctctgtaagtgaaaattgcagttttactgatttttttattaaattctgatcccttcccaaatggtaagaattagtgacgtgtaatgcacagccagccataagcccactttgctcagctcctgagaacaaggcactgtttgcgcatcaaacggagctataccgaggttattcctgagagacacgagttaggtccaaagctaataacagagtctcagcagccattggctctcctgaggccttcgtcctttggggttccaatatagctctgaacactggaaagttgggggagttatccttggccagactccagtccaacagtcaaacacgctcatctttaagaaggatgcactgcgaaactatccagatgggcctgtcatccattacagcctatttaggctgtttataaacaagtctcatattacctactcctgttttaattttccctggaaaagatgtttcctgaatatttataagaagcatgtgtctgagaaaaggaggataattggaaaagatttctcttcatttcttgaagtgtttcagcagaaaaatgcttccaaggacgatatcaaaacactactccaatcaccccaccccttttgccaaaatgaaaataactataaagcacttggagagttacttcttagtgccatttaaattagtacctgtggtaataactttgggccctgttggtaaatgttcttatatcagttattctaaagctatttttttaatgtgaactggtcgttatggggtttgttttaaaaataaaactaccaaccccaagctgagtaaactgctgctataccttatataaaataattgaaaacaaaactctctcttaaaaaatacaccagttccatcatttaacatcttattatatttataaggaacttataaattcttttgtatctctagggaacatttccatttgctcctctaaagttatatacacataagaagcagttgaggtagtcagaagctttcagacatactaccctaaagtggtttgtgttatccaagaatgagtgaatgtatttttataaatttagctgctcatggaaagccaactcatctgagtctatcgcagtccctaccgccaacagccatgatttgttgaggatactaatgttatcaactgcagtaattcagttaacagagtcatcctaccatcacgttgctttcttgtcaccaacaaactccccttagaagcccctctgtcctagctgactattaatgactttcaatcaaacaggccagagattattgtttgtactcaggaagagactggttatgttcctttattcttaaatgtgtactctgcaaattctcttacataatttgatgtgaaactataattttttaaaagacggttccaattcactggaaatgtcaagtataaaaataaatcagcacaaaatagctcgatttttaagatctgagcatcaaaaggtatttcaaattagcctctgtaaaaggcaattagttgtacagctcagaaaattagagcacaacatgttctacagctcacagacgcacttggacagggagtgtcagttactttattccagctgattcattagagtaaaaatggactgtgcatggtgtatcttagaggaatatattttataaaagtaaatttaaaaaaaaagccaggtttggaaattaactcaacaagttggtgatgacttagagccataaatctccagtaagtattcaacactgtactgtggatgtggatttctcaaatatcctactggtcattctgagggaatttggggtggggatgggtggaatgccaaccaacaaagctcaactttgtgcctgttctgtgctattatgtatagaataatctctttttctttttcctttaaatttgttttcctcttgcttcccagaggactgtgtggcggactatgcagcatagtgtaagcattggtcttattcttcctctcattcccatttgtctttgtacagtcattccggagagtccctgagaaattcctcctccactatccctttccaaattatctggagtggattgaatactgcacatagccaacttgtttagtcatttcctctctgcttgtgatttatggttaacaaccattttcatattcttttccaatggccaagttttcaatctaatcttggtggaagaccagctcatcgaatggctgatttaaattctgtcccaatgttcagacgatgcgtagtccgcctggaaaactagctcttccctgttagaatatattggcctttttcttcttgtgctaataagaacaaaccaacatcagccctcatgcataaggtgctaatgtttccattagctgagacatagaaaattcaagggattaaaaaataggttgtttgcttttcgttttctacttgaatttcctgatatctttcagagcattcagagcatttggagagggaacattggatattttttacttgaaagattacccccaatatggggctgaggacaagaacactcaggctatcttacttgactatatcaaccaaaataatcagttatctaatctggtttccacaataccattgcatgctaataacacttttttttttttttgagatggaatcttacttcttccacctcccaggttcaagtgattcacctgccttggcctcccgagtagctgggattacaggtgcacaccaccacacccagataatttttgtattcttagtagagacggagtttcaccatgttttccaggctggtcttgaacttctggcatcaagtgatccatccgtctgggcctcccaaagtgctgggattacaggcgagagccactgtgtccagccctgataacacttcttaaatacatgcactctacatggtatcatggactgaggaaggaaggtgactctcacctgaggggcacatacttatttgtgcagcacacctgtgacatcatagtgttaactgtttggccttaaatccaggcagtgataacacaatgtctaaaatcccttctttgaaatcatgtttttaaaaagaaattgtcccctgagtactatccccattcattattcctgagatcatatgcccatatccatatgccctgagaccagggcaatttgggtgaagaaagttaggaggtaaatctggaacaggaacgctgcagaaaggaagaccttgagaaggggacagggaagacaaatagctcaagggctcctgacactaagagggaaaggggaggggaaaacatcatgggtgggacaagtcagggttctgttcgattggtcccattgataactaaagtggcttcagttaagtcagtagtgtctgccctttccaacacaatctcttgggagctccaggttttcctgcagctggtccagttcagtttccttatctaatagttatcatgacccttgtagctttcctgaagagttatcacttccttgaacatactggaatgaatacatatcataacatccctgtgtgtctgctggacttccctacttgtccctataaccttatctaggccaaaacaaacaaacaacacaaaaaccagatgtctgttttgtatatgaatcttccaaaaatacactgtaacttttgaaattcatcggtaggtcactggtgacaaacatgttgttaatattattacatacatatttaagtacttacaaaagatcatcaagatatgcaacttttttaattgttctgaaacaaaatggacaaagcagctaacattctggcattatttcctgcctgatggttagtaccagtttcagtaaaatgctggtgataaaaatgttcttccatgcctctttggggctgttttggtgcgatttagaaactgttggttataagaaatcaggaaactgtctgttgttcattttaaattgccatggcatttcattgtcacctcaaaggattctgcacccagctaaatccactagtttgcatttcaaaaggatgtcaggctgtgcttaagaaactgctttattatctagaccttcagccactgtgtttaggtgaaactgatatttcccaccttccaccccaacacagacacacacgaagacacacacgcacacgcgcacgcacacacacacacacacacacatgcactcaccctcagtcttcgcttggcctgaacaaaaaaagtaaaacctcaataacaacagtaagctagattctccactttaattagttttctaaagataaatgggtcaaggccagattggctttcagcctccgctgcagctgaataaattatgtcccattcaccccagcaaacaaatggctactgcttcatccacttcaggttgtgaacgacccggtcttgcctgaacctgctttatctatttgctgcgaaaccccactgagacaccccagtttcattttcaatgaacccttggtaataacagcagcaaaatgcagtgagctttcaaagcagggagaaaataaaaaaacgttaaaaccaaaccacccaacgtattctgtctcggtttctgctcttctccgggcaacatcagcagcatgtggtagcagagagagccgcctgtcacaggcttctttccatttaggaggctgtgattgataaggcccaagtggggaacatcataagacacatatataaaatgatggcttatctccaggatattctgcttattccatggagtggaaggatgcacgaatctaattcaatggtatgcactgttggaaacctggatggaactcctgcccttatgtggatttttcagttcacacccaatgggcagtgaactatttttacatccctgagaagctattcttttgggcatgtgtaagaatagtgaaaatagaaggcacatagacctctctttcagtcctggcaaagttgtgtttaattgcacagggctgtataccctggggagaaggaagagtacactcactctggctacgtaactccctgggagatactaaagcccagtccacatcactgctttaagacatgttcagagaatcatatggattctgacaacgaaataatgttatgcaacatgttttggaaggggaacaattttgcacaacttaatattaagtgtgagttatattaaatcatattgggggcgatttgttaacaaaactcttttcaactctggattaaactctcctttatcctcagaaacacttaagcaagagctttggtgacctctgtatcataaaaaatgaaatgttacactttcagagccaaaatagggctattagagattttatatctattttatggcatgttgatatgcttattttctgcttcaggctttaaaatttctttcagaattcctagacttcagctaaacccaaattgatgcattcggtagatatcaatctatcaataaattattgattgagttattctctgttgcatagcacttagtaaaactagctgctatgtacaatctacattatagcatgttgttagtgctggcgtcatcaaaaggcaagtgactgtttagaaaagccgttactttccaagtcagttagacatgctatgtcttctccagagaacagtacatagtatagaggctcatggaatattaatattagcatacaataagtgggagtttgattttgcaatctcagattgactatgccaaaaaagaatatgtagaaggcatattaacaaatgaataatcattggccaaatatgcaaattaaaaacattaaacatctgtagcgtccttaatataggccatgtctaatagctcattttcccttcttaagccagaactttctgcccaaaccttgaacaaattaaacagaagctttgttgtcagttatgaaccagtcagatgcaaaagtccatctgcgcactcgtttcacggtaactgtcctttattctgctatgtaattggtgttttggtagattgattatggaagtctggatagacaagccacactaaactgctcaaaccatacctttaaaaatatttgttcatgagcctcatcagttgacatagatcttttattaaattattgaatagattaaagaaccttttccttgtcatggaaaatctgcgacaatattttctcttagctgtctgagatatttgcaccacaactcccaaatgtgatgttcatgcttatgagagatagagctgaagaaataggatatttcataaataccagttttgatgtatttgctgtataatcaatcagcttctaacagactctggggcctatggaatacattttaaaggactgggaatttggctattcccataacatactcggacactctttactgctagcaataaacctcagacataaacattgtagagaaaaaacagatgaaaaggaacccatctgagtgaaaattgacttcccttcataactgttaaaggtagaaagctatttgcaatacacaataactttattactaagttcattcacagtcattatcatcaaaggctctgacttcatgggtattttcttatacccataacactggctgagctatcgaaaaataaaaagtcaggttgatagtcaatgaatgaaccaccaccagcagcagctccattatattgcttactaacaaataatttgttggaagttggtttgtgtgatctctgtagaagcttttcctatgctgtattgatccagatggaccaggccaggcaaggccacacctataaacagtccccaaaatggcccacaacaacacaagtttatttcttgtatgtgccaagtgttcattatgcattggctgtgagtcagctacatgtggtcatcacccttactccagcatccggggtgacagagcagccattatctggaggttcacctgtcacaatggcaggggaaatggagaatgtggcaaaggtggctgttcatgtctctacctggaagggtcacatcatactgatcacatctcattggccaaagcaagtcacattatcaagccatcaggaagtcagggacatatgttcctatgtgcctcacatagagagagaaaaaggacatgttagtgaacagtaacattatcgaccacaaacactatgatgaaggcaagatttttaaattgataaaaatccatgtcattactttctccaaccctaagacaaaccttacatgaaaaggaacagaaaaatcagtctttcctttattcaccatatttattgtgcactaacatgaaccatgcgtaggtgactagaccataatcgaagaactcacaacactttagggcaaacttgtccaacccacagcccatggcctgcatgtggcccaggatggctttgaatgcggcccaacacaaattcgtaaacatcctgaaaacattatgagatttttttttagctcatcagccatctttagtgttagtatatcttatgtgtgtcccaagacaattcctcttcttccaaaaaacggcccagggaagccaaaagattggacacccccactttagaggatgacaggcaaaaataattataatttaaatcagaccatgctcttgtaaagattgccctgcaaatgaaccaactcttctatggtcttttgaaagaactaacttaaaaaaaaaaatttagaatcctaggagaaatctaagttcttattagagagggggtatctacattgtcctacaaaaccatcatcctttttcggtcaggctgattttcagcatcggatgccaacggagcttacctgaactttgagttcaatcatcattcaaccagagcaaaggatcccaccccaaatctgaaggcagtgtctcaaaggaggatacagaagttgttgccaagaaataggagaaaagtggcaataaagaaacagaatgggccgggcgcggtggctcacgcctgtaatcccagcactttgggaggccgaggcgggcggatcacgaggtcaggagatcgagaccatcccggctaaaacggtgaaaccccgtctctactaaaaatacaaaaaattagccgggcgtagtggcgggcgcctgtagtcccagctacttgggaggctgaggcaggagaatggcgtgaacccgggaggcagagcttgcagtgagccgagatcccgccactgcactccagcctgggcgacagagcgagactccgtctcaaaaaaaaaaaaaaaaaagaatgagcaaaaaccttttactactggcatgtagatgtctttcagatccagacaatatgtattttaaatgaggctttgatattgcacattgtgagagctgctcttgtatgacttcatgtcatgtttgcttaggcaaagcgatttttctgcttttctttctgggccaaactggctgcagcaaatcaaattgttctccctttctgtctctttcatacatcatcatttaaaatcaccaagaattcacattctggaacctgctgttgtcttcttgtacaatatcagttaatttctgaacagccttcatcgaaggagaacactttttacaggttaatcagggaaattgcactggctgacagcaacagcaaacttatccatgtcagtgatagtctcaggaatgtgtgtgtcattggcttctgcgtggaattatttgcaaaattgtagagctttgattcagctggaagaaaacttagaatacaaattcataaattatttatgcatgatgaggcaggaaaccaatgactttgtaaattttattctaagggattttgacctcagaaaactccccaaagcagccagcattcatttctgtgaaaaacactcatctctgtacttgaaaaagctaagcatttcctttgcttgttctttgcagctccttgaatgctagaacaaaagggtaaacacaaagcgtccagaagagctctgagaagaaaacatagaggcagcaaactgccctaattgatctactcacataaaatccaaaaacccagaggctatctttagtgcaagacatgtctgcacaaaaatgtttccagttactcaggaaaatcaaatcttctttatgcaaaatgtcttcaaggaacaagaagtatttcattaggattttaatggtgagggctcaagtgaaaggatcctcatgctctcttttgtcaagttttttttgacaaaatgaataaaattaaaagctttttacagtataatcattttttaaagtttcctttctccatgattttggagaatgagaagtaaaatcaatatttaggaatttttttaagaagctgactttcaataacttggatcgtagtatgacaaggaagggtatagtgtatgtgagtgtgagagtgtgtgtgtgcatgtgtgtgcatgtgtgtgtgtttcttttttaattactctccactctttgtgcccaataacaataggtggacaactcagagattgttacaattatttaccaaattgtagccaaagaatgctatttttatataaatgtttgtgattcatcactactttttaaaattcaggaacactcagttgttgtgaacaaaatgtgagtagcagcttccaatagctcctaatggcacacatgaattggcaccgctctcggcttcatggaagagtagagggaagaagataagagtatcctttccagaacaggccccaaatcttatgtatttttactgatttttgtcttatctgtttgctctatcaattactgaaagagagattttcactatgcgagtagacctatttttctttgttttgcagtagctcccctttatccatggaggctatgttccaagacccccagtgcatgcctgaaaccacccatagtaccaaaccctatatatactgtttttttcctatacatacatacctatgataaagtttcatttataaattaggcacagggagaaattaacaataactaataataaaataggacagttataacacactgtaataaaagttattgaatatcatctctcgtgcgtgcgctctctaaatatcttattgtgtaatactcacccttcttgcaattaagaagaggcagggcaggatagcatgagatttcatcacactactcagaatggtgcacagtgtaaaacttgtgaatggtttgtttctagaattgtccatttaatatttttgaactgcatttgaaaccacagaaagctgtggtttcagttactcatggtcagctgcagtctgaaaatattaaatggaaaattctagaaacaaatgtttatggatgatgtatatatttcacatctatatttatagttaaaacttttcttgtgaattgagctttatcagtatatatagtgatttcctttctctactaactgctgccttaaagtctctttctttccaatattaatgtagttacaccaaatttttaaaaatatttaactgaaatatcttttttcattttactttcaacatttctgaacccttatgttttaaatgtgtctcttataaacatcacatagctagatttattttaaaatccagaataacaatctttttatttcaattggaacacttagttcacctaaatgtactagaaatattgatatttatttcttccatctcattttgtgatttctatttgtctcatctttttagtcttctttttcttcttctttcttgtgggtcaattgaggatattttcttacttcactctttttcttttagtgtttggaacctaatactgtagtttttattcttctaataattacccttgaaattttaacatgcatcctaacttatcaaagtccaagtttaattaatacatcaatacctttccctcttttgtaacaatacaagaggaccttagaacaccttaattctgataattctcctcccaacttatatgctgttattatgggataatttcgttctgtcttatgttgtgtgtgttttacacaaaacaaaagttaagattgttattaccattttatactggaacttttaatatacaatcaaccacattttaccactttctttggttatcattccttttgcgtaaaaccatccatcagagtgacttccttggtctggaatacacattataagttttcctttactgagagttttatttgaaaatgtctttttgccctcattcttgaaagacatttgtgctgaactgtaattctaggtcaacagttattttctccaggtgcactgatgcttatatttcactatctcctggtttccactgctgctgttgagaagtttgctatcagttctcccttttaagtaatctgtattttctttcaagctgcttttagggtctcctttgttgttatataatttcgtcataatgtgtaggtatagatttctttttttattaattttgcttaggatgtattgggcttcctgaatttcatgattggtttctttgattgttctggaaaattctaagccattatgtcttcaaatattgcttcaccgtctttcactctctttctctactcatccaataactgactggacatgtgagactgtctcactccatcctccacatctcttaacctttctttctttcttgccacattcagaataatgtatttagctggtaataatgtatttacttctcagttgatttagtctctcaggtttattaaacagctaattaaattattttatttggcattaaacccagccacttagtttttaacgtcaatgattttatttttctagtacttaatgaattaattttcagatatgcttggtcctgtgttcaatagtatccgcctcctcatcacatttctaaattctaccttttccattttaaacatgttattttttactttgtgtctgatattctaatatctgaagagtttgctggtctcatctggtatttctgcagtttcttacaaatggtgctttatttccttatagatgtcatgttttcttggtttctgttgtgggttttttttgtgtgagtttatattccttggaaattaatcaatggaaagtctgggtggcctgtgttgaaaggtatttctatttcatcttatcctaaggattttcccttgggaaccccggctgtatgtggtgggttagtgatactggctcgtcactttagggaagccctgtattttactctcctgtccttgcccaccctgcaaatctgaggccatcaaggcttaaggtcatctgggtctgaggaatgtcctttggaccaaatccattcttagtactcttgttttcttttctgggtccccattttcacttagtttggagcctttgaaagtttgttactttcttgccaacttgttgactcctacatgctctatttcatgttgcagtgttagctgattttaggaaatgtgcaggaaaatacacatggaggcatgtacaaggtaacttccttcaccaactctgagttaagattgttttttaaacttttattttagattcaggggtacacatgcaggtttgttatataggtaaattgcatgtcacaaaggtttagtgtacagattatttcgccaaccagataataaccctagtagctaataggtagtgtttctatcttcgccttcctccatctcgcccccatcaagtagaccctggtgtcttttgttcctctcttttgtgtccatgtgttttcgtcatttactgcccacttataagtgagaacatgtagtatttgattttctgttcctgtgttaggataggaacagatagtggcctccagttctatccatgtagctgcaaaatacatgacctcattgtttatggctgcgtagtatttcatggtgtatatgtaccacattttctttatccgttctaccactgatggacatgtaggttgattccatgcctttgctattatgaattttgctgcgatgaacatacatgtacatgtgtctttgtggtagaatgatttgtattcctttgggaacatacctagtaatgggattgctgggtcaaatggtaattctgctttgaattctttgagaaattgccacgctgcttttcataatggctaaactaatttacactcccacctgcaatgtattaacatccccttttctccacaacctcaccagcatcatttgacttggtggcacgtcataccattttagagcagagcattggaacggttattttttgagttctctgtttctgataaatattctaggaagccctatttcattgggccatgtggtagttggtactattggttaatattgttccaggttcagccctaaacttccagtccacaaaggcaatagcccatctcagcagccccagagctccccaggcctgagcctatggaccctaggcaccacatagtttcactccaatacctaagctcttggtgctgcaaacttctccagaacccttactgttgggcttctttcatgaactattttcactaaaagatgtcacctatatccgtaaacactgaccttcagagaggcaaactcaggtacatcctttattttttctccttgctggcacctagaaagattctccttcgtacattacttaccaactgatatggttttgctgtatctccacccaaatttcatctgaattgtagctcccataattcccacgtgttgtgggagggacccggtgagagataattgaatcatgggggcagtttcccccatactgttcacgagactgtgaggaagtctcatgagatctgatggttttataagaggtttccccttttgcttggctcacattctctcttgtctgccaccatgtaagacatgtctttcaccttccaccatgattgtgaggcctccccagtcacgtggaactgtgagtccattaagcctctttttctttataaattacccagtctcaggtatgtcttagcagcagtgtgaaagcagacgactacacctacccaggccaatcaggcagagaagaggtaccaggactagacaaatccctggaatgcctggggcagggggagtctttacagaatacctttcatgggcagtgtgtctcgtacaactacttaatcaattgctattgtggaatattatgctccagactgcggtgattactgttttcagcccagttaaaatatcccttttatggaatttgctttataataatagcaatagtaataaaaaatagatttttaatttaataaaaatagaaattaaaaaataagaaaacaaaaataatatgtgcattctatttttcttaaaagaaaagcactttttagatggagatacaaaattggccatatttgtggcagcctcaggtgctaggctccacaaaagcagcagggttggtcacacggtgcggttctgctgtgggttgcagaaccagagtgaactaaactctgaaattggcagtttctccttcagaccacccagaagtctgcccaggccaaaactctggacctgatgggctagtgaagcatctagtatatagcagctagatagactggtctggcacacatgtgtattttgtttcatttatttattcatgcatttattccctgcctcagacagacagggagcaagtgaaggtagagagagaaaagaacagcctcataaaacctgcatccatgtggtccaaatgaggatgacgggattgcgaaagaagccggctccacacagtctagggatgtggctcccttaacttcctcttctcatccctcccaacccctgagcggagcctgccccagcccaccagatgcacagccccttttaatttgcacatggcacagcataaatgccaaattcaaagctttgcaagcacacaagccaagttcaaaatcctgactatgtgattgtgtgctaattacctaatctcatctcattttcggatctgtaaaatcttatttgtaatgatgatagaagccaatgtgcataaagctcctagctcagccattgtctgtactcagcctagatattcttaacaccagtgataataatagcaataacaatcatagattaagcttagctgttattcttattaatcatattaataaatacaaagtcaaatgccacatattctcacttctaaatgggagctaaataacgtgtgcatatggacataaagtgtggagtaataggcactggagggaaagggtaggagggtgggagggtgccaagagatgagaatataatgggtgcaatacaatgtacaatattcatggcataattacactgaaaacccagatttcatcactatgcaatgtattcatgtaacaagattgcacttgaaccctttaaacttatacaaatagaaaaatctcaagaacatttaagtacaaagatttaaattattcgataggatttcaagtagattttttaaaagatttttcatttattcagtgactcttcaactcaaagcctgtaggtaaacacccttgccccagccctagtctttacaggaagtggctgatatggcttcctgctgcagcatttaagatgagctaaagctactaaataaagcttttctcggcacatttaggactagtcgctgaggactagaagagaactgcaagctaatgctggcttccggcattgttgtcgaataaagttaacactggagcttctctccaagttacagccacatagcaagatgacaatgaaaagtcccagggtgaacatttgggaagctgataagagattcaagttacatgaaggtatttgggaaggatgcagctaaatggtggatgaaaataacctagaggaatgatggcacacagagaggcaggggacccatggcctctccagtgactgatttctgagagcagcgtacatgcctgtggcctcaggtcaccaccgaggaccatctatgaaagccttaaaaaaaaaaaaaaaaaaactcaagccagacaaggtagaaatactggtagaggacatgaaaaccccaaaataggtgattgaattgaatgtgaaggtgaacagcatttgaaatagcctttttaaaaaaactcccttgaaggtgaacacagggacaagttaccaactgtaatttaactgtaaaatgatcagcgcttcgagagtaggtttgactatggggaatgacagccacaagaagaatcttgcagctatttttatcttccctcatcttgacacctccccttttaaaagaataagagaaacagaggcacaaagttaagacttacggcacaaagatagcagataagaggcacagagataagggactgaggaaccagaacaagacctgggttttttgtttttttttttaatttctgttctagatttatgtccacccattgtcctatctcagaaaatgcagcatagttccagattgaagcagaatctgtgtggcagcctatagtcgttcaccaaatactaataaggatacgccacgtttgtgacatgcgtgaggatagacaaagggttttcacatcccatatctcatttgtaaaacttgaaacaactggaaccagcaatttgatgtttctcttgaagagactcccagggccgaatgttctgttcccaggggcctaacgttagaatcctcgtggtgtctgtgatgtttctattgccgtcaaaggtcaaacaagaggtgaacagacattttagggatttactgctattttgtctcttctttgtcgtccacagtactttcataagtgcctctgtttggggaaaagaaaagggaaggaagggaggagaggagggagggagggagaaaggaggaagaggagaagagaagaaagaagaaagatatgttcctttctgacaccaggactatttttagtgcccagagcaacttcagagaattctatgatgaagcctggagaagaacgcggctcactcatttgtgctcactccaaggggagtaaagaaaggaacttggtgaaaggcagggcagagggcagtcagtctggacgccagtaactactgtgtgttcccagaacgttaaatcaactatgcatctgagtttgcttttcattaaatcactgttatattctcaaagactgctgatcatgggaatttgggattcaaggtcctcattttataagcgcttcctatatactaatagtataatatcaagtaaattattttcggttgaactgatgattaggagtaaaagctatggctctattgatttaaaacaataagaagctttcagcataagttatttaaaaggctcatgggaattgtaaaaagcccttccaggattactggcttttggttaaaatccctattacatatttttgtcttctgggttcaaataattgcattttcttggattgaggtcagctccttcccaacccttttgatccgtgtgacccgaagagctctttggtttaccatgtttggctttgagctgactcacgccaaggctaaaagcaagataacttgtttgggtaagcagagcaagacgacaatgagaccagagcctgatccttagaagctctgaccatgacctccttccctcaaagacgctccttcgtggtggtcacatggggaagccagtaagatagcatccagccaggcatgcagattgacattactaccagggacaagcaattccaaacatttccagaatttgctctacattcagggatgcttagagttggaagggatgttaacatccatctccatgccctcactttaccagtgagaacactagaatccagaaagatgaaataactaaaatcactttgactgtatttatttatattttcttccactaagatcaggtatttttggtatgcttgtgcacacacacacacacacacacacacacacacaggcacatatattccaaaatagagaattatcttaccttatttatcttccctcatcttgactcctctccttttaaaataataggagaaacagaggcacaaagttaagatttatggcacaaggacagcatatcagaagtgcagagataaggagccagaacaagacctaggttttttatttctggaacagaaataaaattatttcacaaaattataatcacaaagaaaaaaagtagaatcagactccttggatccactgtccactttcacaaacaggatggatcctcttttctgacagactttattttcttagaacagttttagtttcacatcaaaagtctgcccccacgtaaatacagcctccccaaccatcacaagatgttcggtttgttaccatcaataaacctacattgactatccttttcatccaaactcatttaaaattcactgttaagaggaattctatggcctacatgttgtcactttgcagtgaaaacacagaaaatgtgctggaaactttagtgagtcctttaacctttcctcttttagttaaatggcgggaagcaacacagtgagtgaaagtaaaggagatttcgaagagtctttccagcttgcaaacacgggcactctgtgagtaaggaaaattaagtcagagtaacttgttccctcctcctatgagacaatctattatagaaatgcaagcgtgggaaaaggagggtctacctccagctcccccactggtattttatcaacaataacgttctcaagggacttttacagctaaatattttggtagtttagcgtctatcagcaccaacatgagacagcaaatattctcaggatacttttgggactcccatattccaaggcatagaaaggggaatttgttatctttttctccacatgtatgatttcatgcataattttaaaaataagggccactgccttctgctggagcctggctgttcacgtagctgtaacggttttactagttgtgtgtttgtaaaagtgcttttccccctctgtgtcagcaaactgcatggcggacggggcttggagacttggaatttcgtggagatgattaattacagagcatctcattgcagatgtttttctcttctcccttttgtgggccttttgcgtctctttcccagctcttctcttcttctctatcctctgcacccaccatgtcccccatctctacctcacagctgtggcttctctcaggaaatgctaggccacaacacaggaaaaatggtgttttcatatcacggttcgtttactgcagtcagagcaaaaaacgacagcaaaacattctaaaaatgccaagcacttggaggaatgtctgctcacgaaactgacactttactctgacccaggtccccttttcaagagtttcacttttacagtaacactgaggtggtcacattgactaaaaatatagattcaaaagtgagtgggtcggagtatttttgtgagaggtttttcgtctttgttttttcactttattaacaggaagtgtgatacccagtaaaaaaaatcactgccccttataaaatggaatctaagtgcaaagagtttcacctagttttctctttccttaaacagcttcagtgcctccttttcttagggcaggagtttagctgagagattttctaggagaggaaacagggccacattgcacacctggagatggtaaacctgccttcttcatccaagcatgcttcctcccccttcccctccgattttgttgggagaaaaaataggaaagggtgatctttcctgcttcctggagatcgcctacaaagccaacagtagagaaggatctgtggctgttgtctcaaaggattcctctgcacattagaccagcattcggaatatgtgggactcggatcatttacatgagaaacttattaaaatactgattcccaagggccaacccagggccacactaagtcagccagtggggtacaggggacagcaaatctgtatttttaacaagttcgcctgtgatcctgatagataccacctcacatgctaagtggactgctactgctttgagaacctaccttttccatctttccatgcccgatgccaatgtgttcaatgcatgtttcttggaagaatgactactcttaattagacatgtaaaatgacttcgtggctcctacatggaaggattcaccctaaagtgaggtttccagtggagagagggaaaagccacacgaagacttcctggggatgctggaacaaagctttgctttctggctgttctgtcgctgtcctgtcgttggtctcactcatggcagctgccgtctgacatcactgctctgtgtttgtcaggagcagacgtgaagagagaccccatccacagccagcagcatggccctgcctcctgcaagtctttctaggaagcaattgtatataaattataaacaaacaaataatatttctgaaccttatgttagtcactgcactgagtatttcagggaaaggaaagggggctcattccagtctgttgctccacgtccgctggggaagtgggcagcctgctgtgggaggagatgctggctggggagcccctgcatcactatgtgaccttcgacaggtcactgcccatcaccaagccttcgtttgctcatcgttaaaaccaggggtgaactgcagaggccctgcagtccctttgagcgacaggactgtaagcttctgtgtgagtgtgaaatgtgtttgctgtgacccctctgaacattgaccaatgggtccccatcaactctggagctcctgaggaagaaccccggggggggctgaaatggagttggtgagatacttcccactgacactggagttctcagctttatttcccttttgaaagagctggttagtatcttttagagtaagatttgtatttctttcttgcccaaaatggagccagagagggacaaaataaagaaactaaaatgtcctcaagaatatccaaaaagaacagaagtgcaggaaaatgatgcttaaaatttaagctcctgaaaacatttggcaaaacgctgggttctccctgcatgttcaacgttaggaattttcacatgagttcacagtgttcccagggcccaccgcaccctgggcccctcacatcttccacctcgaaggatgtcgttcccagcagcagatctgtgcctcgcagtaccgtctgcagctgccatttgcttagtctgggagatgtccaattcctccctcagaagagaatcacgctttcattttccctttgaggtagcatgtcccaaattacacagccaaggtcttcatcccaggggggaggtttattctccacaggatctgcagacagtgagaaaatgcatctgatcttgaaaactgtggttgaacaattgtgtaaatgtaattgaaattcatgtttttccagatgaaaatggacctccattcacaacatgggattgaatgggtttaggagattcagaaaatcttgggttgtctgataatttcccaatattgctttacttctcctcctcctcttcctcctcctccttcctcctactcctcctcctcctcttctcttaccttggtcctatttgggacaaaaaaaaaatccctgggtcagaaattttaccctttcccataaacatgactttttgaacctcccaagaggcagaaacgaagccaaatgtgattactcagcctctaaagtttcatcatgtagtgattcatcaaaggagctgaaggtactgcgcattgctgaacttgaatatgccttctgagaggctcctaccatgttgctttcatgaagaaatagtgatccttgaaagggaatttcacactggaacagagcaactgtgctgcctgctttctctgtgttccctcgatcaggactgataactccctgcataagtttaatcccacctttcctcttcttctctctctcacattagcaattcttatggaaacgatgcaacccttgcctatgttatgcctgcctagtaataatttttaggatcattttcaaagatcctggggccagcaaaatttttaccgtttaaagtctgtttggccactggccaagtgaccttgggcgagtcagttaatttctctgagcctctaactcaggaactctcagtcttgactgtacatgaaaattacctgggaaacattaaatactgatgcctgggcctcgtatttagagatgttgatctgtttggcttgggactgacccagcatctgtatttggaaagcttcctaaagcatgtccttggggtgcagccaaggttgctagccacttccccaagtccttgtttatcaaaatgtgattcctaaactggcagcatcagtatcacctgttaaaaaaatgaagaatcacaggtcctaccccaggcctgcagcatcagaacctgcatttcaacaagatcccaggtgattcgtaggtacatcatgctaagagaagcacagctcaaatccttgtctgttaaaggtggatgataatagtcaatatgcaatgagctctgtgctccatgtttttccctgtgtaatctcaaaaaggtacagaggagaaactgcatattcacctatatatctcttgagaccttagcctatttcaaaaagctctggatacgagatctagtgggtttgttgggttgattgctgtccttttatgtggttttcttaagaggctgattgttacattgatataaccatataagactgttctacgagtttagtatcttcctctgatctcagaaattgggcctccctccaaatatttaataaaaaaatttgcctcctttttctatcacattttagattgatttggagggtgctacatcaactctaactggcagatttaagaaactgtatgcagtgatttttaggatggggactagtacaataggtaaaccagagttggggtcagctagtcagacaagtttctttgcagcaatcagcaaactatgacctacgggccgagccacctattttaataaataaagctttattggaacacagccctgctcattcatttagatattgtctaatgctgtactgacagtacaatagcagcacttagtcatctcgatagagaccctatggtctgcaaagcctaaaataatactacctatcctttcagagaggaagtttgcccgtccctgatttacagcaacccctaaatgaggccagggttgagtgattgctgaccatctgggcccatatttttagttggttccatagcccagtgtacacccctaatcccaagcagattttaagcagctgtgtggttacatggagtcaggcagagggcccagaactgatctatctgcattgtagccacaaataagaacaaagagaggttcatccttgtccacggacagcagcatttgtctgtcaagttgttggaagtattgcttgagtgtccacctaaaatggacccttcataaattcatgcatttccaaatagtatgagaaaggatcctagtatgaaaattctgagttaaacctgggaatacaaagatttttaggcaagatggaaagcaaggatcactacttaggaaaagtaaaaggtgaattaatttgggtaccagtctttttcaagcaagagatttcttcctcagggaaagttttaagcattggaatatagatattaagccaattttggattatatcaaagagttcgtcaactaaaaacatgtgctcttctctctctttttttcttctcgtcaataagcgatggagaaatctaaagtcatgtaagattttatttctgttctccatctgagtctcagtcattgcaaactatgaggcagtaatgctttgtgcaacaggaattaaagaagggagaggtggataagagcaggctggaagaatctccccgaacaggttctagaaactggacattcctttgactattacccgatattcaaaaatttaattttttcttttataattcttttgggccccttttctcatccttttttggctttggtttcttccaataagtgcttatgaggccaagaagttggtcactgggggctttaacaaggcccatggatggcagctggattcagctgaactgtagtaattagccatcacctaatcttattcaaatggtgctcctagatctgcaatgtgataaattgtgaaagttccaagtagggggaataaaagaacaaaagaaagatactagcagtcttgggtctgacggattgctcaaattatattcttgctgttccattttgcaagtttttatcaaaatggaaaatgcgaagtctttgcctaatgtctctgtacatagtttttgttgccagtttattctctctggtgtggggctggctcagccgttggtctctggcatggagataccaaaatgcagctaatctgccttctgagtagagctcaaaacatgtgatttaaaatcttatgatagtttcatagaaataataatgccgttgtgtcgaattgttgcaagaaatagattattttcgaaaaggtttttgtttcctgtaatgttctggaattttttataaacaaaatcagtttggtggttttcactgaattgaccagtaatgagttttgctatgagcgaatttgatgtcaggagattgcaagagaagtaacagatgtgaggatctctgtttacaagaaagacacttttctctttggccactgcctgtgagttatgagagaggttaacattttcttttctctgtatgtttacatgaagtttctggaaatcattgcgaggattctgtacatgacaggattttcccaggggcgatagatgagggatttagagatgaaattggtctgtgcatcagggatgggaaaggattccagggtcttcatctgctttatgaattaatatcggtatacattaccctcttaatatagtgctgagccaggaagtcttgtgagccacctaagttagctgtgaaatactcagggcgtcccttaattttttactataaatttcttccacttcatttctaactttgaagttttaggtaaagatagtttctcaactcatattttgcccttttccagattatgcattagatgcagtcatggccataaatctcactaatggccagtgctgtacggcatcttatggtcagcatctgagtgtgcaggctctctgtgctaatcctgggattccagtaagtcataaaaacagcggcttaagaaagtttgcatttttcccctcttgtcaaactaagataaacccaattttagaagaggtacagttcctatcccttcctggtgaatcctaaaaggaaatcaatacatcaatgcattgtcctttagttgcactttgtacattttcctgagaacttatggccaaattagtaaatgaaatgtgtaagacattgggcagttttgcaatgcacttcaagtcatctgtcttaatccctgcaataaccctaagagtagggcattctctgtcttgctagtcaggaaactgaggtccatggaagctaagtatgtttccctgggattgcacaactaagtagcagaggtaggattcaagttcggatcctctgactccaattaccattccctttccactgcaacaggctgctcatgtgtaggggagcatgcaatgaagatagccagtgaagctgagtccaaatgcatgatggagaagcctgtgcaactattaggatggagaaactattaagatggtgggaaaggagaatgggtgtacagagagcagagaaggagagagaaaggtcattttaaaaaaatgaaatgacaactttgagtcaagccccttatagaagagctcaccctctttctgttttctgatgctccccacattgcctttatcaagatttggaaagatatattgaaacttggaaggtatagggtatcttctgtagttccctctatattgttttattacctagaaagagccagagggtgaatatgttagactttgcaacccagtggtctctgtcacagccattcaactctgacatttttatcttgaacgcagccatggacaatgcataaacacatgagcatggctgtgcttcactaacgtttatttacaaagcagcagccagctggagaccactgtttgctggctcctgccttaaaacagtgacttccaacctcagctgtacattacaaccacctggggaacagcagaaaataccagtgccccctgattcttctctacaataaccaaatctttctaaagtagagtgcaggtatcaatatagatgtttaaagcatgccatgaaattctagtgtaaaagtaagatggaggaccactgtcctagattctgaaacagtggccttctcattatggttcctgggacaacagcatcagcattccctggcaacttgttagacatcgagttctcaagccccattccagacctacggaaactgaaactccaagtggggccccaaaattgtgttaacaagccctccaggtggtgccaaagcacaacccagtttgagaagcacaagtctgggacctagaaaataaggattcagccccagagcccttgcttgagtgtcttcctgagcacatcaggcgtaatgttctagagccagccctggaccttccatcggaaatccagctttaagctctgccctttacttcccctccctaagccccagagtcttcatctataaaaagagtaatattaatagttatacctaatttatagctaattgatggtgattgggtgattaaaggtatgtgaaggcagtcaaactattagacaccatgcaaatgcaactatttattgtgattgtaactaacccttcagaggtagaagtacatgcagttattactcatgggcttggtccatgactctcagtccaggagtgtgctgcggcccaaagggttactactaagcataatctagaaagtacttaagagtgagttgtcttatccttaccaaaaccatggtggttctggccctctggagggcaacaacgctataaagggaagaaaacaggatcagaaagaagtccctatggagataaggtgatagagaggatactaccatatgaaagcaggaaaaagcctttcaaattaaggtggataggatatgctgaatgtccacaaacccttataggaagtagacaaagtaaaccatgtatcctcctgggatctttttccaggagtctccgagccacactgggtggtacaccttgatatataatccttgccaagaagtagtatcaggtacaatcacaaacatattcaaaaaggtccagagacctttacgaataacacacataatttgttccttagacaatctgggacacttcagaggcaaatttacagtcttttaggtttgacatctagtaggataaatagttgccataaaatgtcccttaaacactgttttagaatgaatatacaatcctgaaagaatcaggatctaacaaacagtgggttgattcttgagttcttgtgagaagaaaaccaagacactttgcaagctatctgttgttttatatgtgtgtggatttgaactgcatgtttctgaaataataaagaccttttgggaatcaactatcttatagagactccagagttattatctgaactttagggagaacatccatgccaaaatcagcaccatctgttaaattccctcatcgttctcttcctgtcttactgaaagaccctgctctcttcactgttgttgtgatttttttttttttttttccttcttgtttggtcatctgcagcataaagggtgtagagaggagagtcagagagaagtgtgtcaatctttacttggacagaagcccaggaagtattagttagacattttcttatgtagattggagagtcatttttgtgagtaaaatgccctgcaaagcattttgctggtagatgctcggaaaatgttgaggcaggttaaaatgagccatgacacacccgagccgcaggtgtagcatttagagtccagtgaggggggattacctcctgttctcctgctagctttgctgaaattgtttaatcccaaaggataaatccaggctgcttttctcagggccatataactgccttagtacatagagctgttgaaatatgaaccaagcagggtgtgaactagctcaaaatatgctgatttccagatgttctttgattctgtcaaacactgattgcccccaaagaccatcctgagttgtggctgccagtgattcctcatgtttctttccatgatcaaggcaataattttaaagccccgtagtctttcttatgagcctgtgtctgggtcttgtctaggtcatattttacttctcagtatgaaaatgcagagtctcactggattgcgctgtaaaatatctgcacgtcggtagcggttttttaatttgttgctcttcccaggatggagaacctttctgaattatgaacgaagggttggtgctcaatatagtgaccttccgtgaaagagaggttgtggaatatctgctttctctgcaacaacaacaacaacaacaaaagaaaggaaaaaacaaggaaagtaaatgtgagcatgttttagggaaagtaatcaaaatccaaaatcattgaatttatgtttacagaaggaaaaaaaaatcatttgcgaagcagacttatcactcacactattattgcattccaaaacttcattctcttaagaattaaaaaaataaataaatccagagtgtgaatatattggggatcaaaaatgctaatgcttctaggaggttcttttgaatttgttttatgatatctcagtaaaataaaggcttatagaaacccttctaactggtgggttaaatgtctaccactagaaaggagataccacaaggaggaaagaatttttacacctccttctactttcaccctgttcagagacaaatctgtggccaccagcctcagcatcccctgagcctttgaaccaacacatttgccctcatttcttatgaggagaaatgatacagaactctttggagagaactcttcagaagacctggatctgggttcacatgggggctttgactcattggcagggattttcatgtattgaagccttgatattctcatctgtaggatgcagtaaatagcgcctgatgaggaaagggccatcgtcaaataaaaatataaattttatttcatctaaattcacaacctggttaggggtgagggcagagtcaggacttggagctgccagggctagtaacatagatagtacatttaattcatgatatacattttttttcttttttttttccttttttgaggtggagtctccctctttcacccaggctggagtgcagtggcgcaatctcagctcaccacaacctccacctcctgggttcaagcgattctcctgcctcagcctcccaagtagctgggattacaggtgtgcaccaccacatctggctaatttttgtattttaggcagagacagtgtttcatcatgttggccaggctggtcttgatctcccgacctcaagtgatctacctgtcttggcctcccaaagtgctgggattacaggcgtaattcatgatatacttaaaaaggtagttagctgtgtttttcaaagtaatcagatctacatttaaataataatatccaacgggagaagacacagaaagccctcagaactgggcctagtacacagtgaggcacctgtgaacattcacacccattttccctcctcttcacgcctgtgccatctgccaagtcctccatctcatgaaacacctgaggcattccatgaccttcgagggcacacgctaagtttggacaaaggcaattcgcacacgttaagaagactttctgccctagtgattgctgctgcatcctttcacttgtctctgcattgcagtggatttctttccgtgagcattgtgattgaggttcttccttagcaacaatcgttttaaaaaatagaaatcacacttagatggtaaattctctcttttgggtcacagatgtgggagataatcacagcctcttccagggattactaattagtcaattcctagtaatctccagggattactaattaccagagattcctaatctgcttctgggtgtggctgacaccagaaagtttgggggaacccacaagcagcacccaatgcaaatggggacagagaacccactgcttcaggagcagagatgaccaatcctgcttgccagcaccatctctgcagagagcagaaactcctggctccctctgcttgcctccctctaccccaagtgacatccttgagttcacgccactcctgcagagagttactgcatctaccagattcaataattacaccatatttggtcctgaggttttctgaccagccatggtccatttttcccaagtgctccatcatgacagcaatctattgagggcaagtgtgctctgagaaaactgtactggtgatggccagcctctactgagacctaaccatctgccatgaatgaatatattcattcatttaatccagataaaaatcctgaattttacagttgaggaaatggagtccgagtggccagaagaaatttcatgaattttagaagtctgtagtaaacccatgtaaaatgcctcgaggagagcccaggcaggaactggtttctctgtcacatacatgaggctgaattagggactgagtcatggtgggagatggctgatgttttggaaatggccctaatatcgagctggtcagctttctatcttgccattgcccatagctggagaagggagtgaggccatgatctctgtctggaatgaggcattgtgctctagccattgacctagctgggtaaaccctgaatcagttagttaaaggctattaccaagggttcagtgtgaaggagtgttattttaggagttttccttttttttttttaagagacggggtcttgctctgtcatccaggctagagtgaagtggcgcaaacacagctccgtgcagcctcaacctcctgggctcaagcagtcctccggcctcagccccacaagtagctaagactactggtatgtgccaccacacccaactaatttttatatttttatagagacaagagttttgccatgttgtccagggtggtcttgaactcctgagctcagcaacttgcctgcctccgcctcccaaagtgctgggattacaggcgtgagccatcgcacccggcctattttaggagttttctttcctaatcactcccttcctaacacccgctgtcattcataagttacgcgatgtaacttatctctttgactgctcactcggggcctgtgatagtcagggatacagcctcaggaaatttactgctaaagagaaaataagttgaatgtgaatattttgcaacttagggtcactgttatgttagaactctgagaacaggaatgcatgaaaagatcaagggtggaagggggatgatctttgtaggtcaaagtagtaaaataaaagtgagctgaaatggagtgagatgtagtcctttggctctaaattttctaagaggaatgatctatggaaactaaaatctgcacaatttttaagtctgcaacctgcatactttcctttttttttttttttttttttttttttttgagacagagttttgctcttgttgcccaggctggagtgcaatggcacgatctgggcttgcctcaacctccaacttccgggttcaagcaattctcctgcttcagcctccccagtagctgggattacaggcatgcaccaccacacccagctaattttgtatttttagtagagacactgtttctctgtgttggtcagtctggtctcaaactcccgatctcaggtgatccacccgcctcaccctcccaaagtgctgggattacaggcttgagccagcgcaccagcctaatttctaagtttgcttaaagatataaatcatgagaaaattctcatttctccataaggtggtatccactcagttgcttataggtatcaaaaaggtaaagaatggttaaacggcaactgggagaaacttaaaactcctggtaatagcaggactgggatttgggggaaatcattttaattgtggagtagtcatgcattactggaaaataatccatcactaactgtggatgttgcttgttacctatgtaactcctctgaagaacattcccaaaaatttagaaaaaaaaaatctaccaattatcaagaattagaaattaaaaaataaaaaacccaaaggaaagccatggagctacattaaaatcattccattcccacagctctgtttgtgcaaattaaaagaccaaaattctggaggcatcacacaattatttggccttggggagatccttcttctttaaaggctataaaattacattcatcctgaacacctccaaaggcatgtatatattgtgatagatacatgtgtatacatgatgtgtaactatagaggtcactatgtatataaagccaaagaagggttctacgtaaataagactttaaatagtgtcatggtacttaaatggaaccactgtataagattcttaagtttcaattacaaatattaacagtattaacagtttcataaatggagacaaagaacactcgtttcttttcgtttacaatgaaaaatgagaaaaggattatccagtgtgcaaatatttgctgcacgggaatatttaatacatttctgtataaaaggttttaatatgcgccccttgctaacattaccaaatcatattaaaagtatttagtacttcaaatagtctttagtatctctggcctcattactgagaaacatctggaaggcaataggaaagaaaggtaacactggcattatcttctattgttacctcttgcttcttaggtattaatttgtaaaatgaggggaaaatcctttccaaatgcacaggttatcattattgaacgacaagataaaataatagctaatagctaatatttgttgagtattgacttccttctaggcacttctatactaacaggttctgtaattaacttcattgggcagatgaaaaaatcctatttgaaatctccttctcaactcaggctagtagtagtttccttttgcctcttagcttgttccctaatgatgcagtaaatatcatgttaaagattgttactataggctgggtgcagtaggtcacgcttataatcccagcactttgggataccaaagcaggcggatcacttgaggccaggagtttgagaccagcctggccaacatggtgaaaccctgtctctactaaaaatacaaaaaattagccagatgtggtggcgtgcacctgtaatcccagctccttgggaggctgaggcaggagaattgcttaaccggggaggtggaggttgccgtgagacgagatcacaccactgcactccagcctgggcaacaaaagcaaaactccgtctcaaaaaaaaaaaaaaaaagattgttactatgctaaagaatatatcatcaagatgaaccttaaatttttattggatttggtctaatattttcaaacaaaatggcagctcattttttaaaattcaaaggaaaatatctttcataacttgaataaatctcaaaccaatttggaaaatggataaggattacagtgacatatgatttccccgagtaaggtttcagttcacagaccagcaattaatgaatgatattaataatgcattaggactgacaatagaaatcattttatacctcacattgtaaaactgagtcaaaggtaaataagttatgtaatgtaggaaatatctgggaattagtaataagacactgataattcggggagagttaaaggtgtaccataaaacagtgtttctcaaagtagggttcccatatcactgcattggaatcactcaaatactgtaaaatgcagatcatgtgtgccaccacagggattctgcatcaacatctgccttttaaaataaacctcccagatgcttcttctcactataataaagcactttgaagaactactatttatttcgttccagtagctgaaagtatactttttggttatttaatagaaagcactactgtgagttgaattgcgtcccccaaaaagatatgtcgaagtcctaacttccactacctgcgaatgagaccttaattgagaatagggtctttgcagatgtaaccaataggtcgcataggaataggatgagccttgaatccaatgactggcttcctaataagaagggaatttggacacggagacccagaggaggcacatacagaggaagaacaccgtgtaaagacagaggcagagatggcagtgatgcagccgtcggtcaaaggatgcccaggagccaccagatgttaggagagagcagtgcacagatcctccctctgaacctccagaaagaaccaacctggtcaataccttcagactccgggcatccagaagtgtgagagaatacatttctgttgttttaagtcaccccgttgtgggactttcctggcagccccgggaaactacacgtgcgcaaagctaagaactggaatcccacggggaaattctttctccatccgtcactccctggtgcactttcttctctggccctcagtgttgggaactttatcaggaggttgcctcctgcacctcggggtcccttgtgcttctccctcctgtctctctcgtaagcccatcctcagtcctagactgtctcgccagctccccgttcaatacttcaaagagcagctgtccagggttgcagctgattttgcctgacactctcccaaaagagatttgagggatttcctgattcactggatggccaatgtcaccctgaagtatgaggtttttcacaaattaaactggaaaacatatctgaaaatctcatgccctgccagaactgattaaaagtgagaaaggcagagaataaagtaacacagaagtgatccttgtcatttttgccagattacatttcccccatgtagcaacgaggtgtctatcactccgggatcatccacttcgagggcaggctgagtgaaggtcattttggtttttattgattctatggctctggcattactcataaggatttacggtatttaacccaccaggagaagccctgaactataaatgactctccttttgccaggagagcctgctgcatcataagtgacaccggctacatggattccttcacagccatctctaatgaagcccgcagcctttgcctccgcacaaaagcacacggcctctcatttcatggggctgatccctcctttggctctgaatcagcacgaggttgtttagcttactaagtagggtaatccagatacagggacagaaaaagaactgagtgcataagactcatgctgttcctttcacgtcagcatcctccaggaccaaaactgggaataagaaaatgaaagtcgaagagcatgaaatagggaaaatagaaaattaaggctaggattattaaggcttatgaagtggtctcgcatgtgttacaaggggctcaggacacaacagaggcacaggaaatatatttgttgaagaataagggaatgaatcaactttgagagcttgtttaaaacttgttattgttgttaactttttttttgaggcaggatcttgctctgtggcccagcctggagttcagtggtgcaatcacagctcactgcagcctcaacttccccaggctcaggtgatcctcccacctcagcctcctgagtacctgggactacagacgtgtgtcatcaggcccagctaatttttgtattttttgtagagaccaggtctcactatgttgcccaggctggtgtcgaactcctgggctcaagtgagcctcccgcctcagcctcccaaagttttgggattacaggtgtgagtcactgtgcctggcccatcattattattttaactaaaaacttttcctcctcagaaaagaattaaggatgttttaaacacagggctaatgtttattgacggtgttctcacaaccaataatttgtgaacccaggactaaaatgggctcagaggcaaaaagaaaaaaatcaacaatattgatcttatctttatggaaaattttgatattttatttatcacataagcaaatgcctcccatgcctcctaggccctgccctgtgtgaacctttagaaatgtaaagaatgttttgttaaggggagaatgtgaacattcaggtttgaattaacaatgaattaggaaggaaaagccccttggaaccaaggaaggagtcttccacatgagcttgaaatgaaacaacaatctccacgaagcagtcttagtctcacaggagggatgattttcaattcacagacttttctttccccagaatctggaaatttgagtttgccgcactcataaatgcttttttgcacatatgtgcatgcaaaagcatcctgaagcttcatgactgataattttactcttcgtgactggtcattgccccgaaatgagtcaaggacatgtctgcagagaatatcagagcaacagaccgaatcccttcccaggagtatctccagcccccgctaacaccgagcatttattgtttgcacactatttttagtatttggacactgacactatctgcaactatttaaccctttctttgtcgatatgctttgtcactaataggcaactctgtctctataaggataaaaattacacttgaaaagattctactagtggaagcccatggtacttattcaatatattctggattaatccatgaattaactgtaaattcctctgctttggcttttctctttgttgaattaaagttgttcctgttttatcctaagctctcagaacattccaagaaatttccttttttggaaaaatatgggctcctagcagtcaagtgggactgggatatgaaaataaaatattcttaaattaccactactattattacatttataaaacaagtctattaactggtctatatttatagaatctcaaacgtttgaagcagataataaaattcaccctgtttctcaatttaaaatctgctagcaaaaagcacttagtcgaattatttcaaatttgtcagactataatgtctcagaagacacctgcaggtcaatatttttctgtctttcttaacctgacaccaagttttatatatatatcttgccctgtaatagtatctaatacagggctgtgctccctactttaagaaaactgagatccaaaaatctgattttgggggggaaaagaaaaagtcatacttactttgcaaaagaatttaaatagcaagctccctctgagtacttaaaatatgattcaatttaccaaatcgttactagtgcatggcagagaatgtcctgttcatctacttttatttagggctcctcagatctaagaacatgaacatgaaagaacatgcccattgcagagttacgatccttctctaaaaggggcatagtgccatctacatgcttaatgaaaaacacgtgggtctaagtttgctagaggctcaggcagacccagctctgggaatcaagaggtacagtgtaggaaagctgttcagctctcttgagaacatccacctgtcagggctggctcctggacatatgcgacaggttgttgttattgttggtatcattattatttttgctaaagagcactgtagcttcctaggattgctacaacaaagtaccacaaacggagtggcttaatacaagagaaatgtattgtctcagttctgaagcctagacgtctgaaattaaggtagcagcagaagcatgcgccccctgaaggatctaggggagagtctatttcaggccttctctaagcttctagtgaaacttctagaactagaagcttctctaagcttctagtggatttcccaacaaccctggaaaatccttggcttgcagctgtagcacttgagcctctgccttcctcatcacatggcatttccctgcatgtctgtgtctgtggtcttgtcttataaggacaccagtcatattgggttaagatcccactttattctggtatgagcccatcttaactaattacctctgcaaagacgttatttctcaccttccatactgaggttcctgggattaagacttccaggtaatgttttaggaaacataattcaacccataacaggcatttatgaatttgcagactgttgaggatggggggagtgtgagttcttaatctcattacatgttgaatgctgcgctatgtaagattcctctgataggaaccagcatcttgcttcatgatgttccactcatgtggatggatgttctgaagtttcacttctaacaagaatcactggccgggcacggtggctcacgcctctaatcccaccacattgggaggcccaggtgggtgaatcacaaggtcaggagtttgagaccagcctggccaacatgataaaacccgtctctactaaaaatacaaaaaaaatagctgggcgtagtggcgggcacctgtaatcccaggtatgcggaaggctgaggcagggaattgcttgaacctgggaggcggaggttgcagtgagccgagatcatgctactgcactccggcccgggcaacagagcaagactcctctcaaaaaaaaaaaaaaaaaaattcactgcaatacctatgtcaccctttggcgtgggaggtaggacaccatggagacagggggaggtcttgatgggagagtgaaggagggatgagactaagcatgaaaacaaaaatgaagagagcttacctggcaagtaagaagtaaagagagtgacacttccagagatgactgtaagctttgtctctcactgctcaacatcctacactttcatctagttcattattttccacagcagcctttccacccatagcataatactaacaggggtgaacagaaagaagcatcatgagtataattttccttttttcttcttcaatacctagtttgtttacatgtcattttgttcgttggaggtgagctcaaggaactgggggtgatgttatatttgagcatttcagatgcacgattcgagagttcctgaacactgctatctgaactgtagtgttgatcatggtctcttgttcttcccatatccaggatggttcttctgaaccacccagatcatgttcttctcatacccaaaatggtcttttgggagtcctgctgatttttgattggaaataaattaagtgacaaagtccaaaacctctgcaacttcttgtaggaaagatgatcaaaatgaaacaactgtcctgaaagctcccctagttttcaaatataacttttcaggactatgtgctttgatggagtatgatatacttgacagacagatttttggtcagcataatttcctttcagaagttacccagccaaatatcatgactaataatttcatactaaaacagaaattgaatttttctttgagatgaaaatgaatccactagtattttttaaatcacctatagacagaaattgatttgacataatgtaatatgattttttaaaataatttaggaatatgaatgaggccattggaagtaaggtctttccttttgttttccttactcactatgatttattcaaaagtgatgaaaaggtaccttgttatcaaacataaatgtagagatttggatgaggacttcttttaaataaagctacacaaaaaactgcagtggaaatatactccacatttaatcaagctacttccttgcataacaaccatgtttgggatagtttgggtgaaacctgaagaggcccgttaaatggttcagttgttcaccaaagcgggtgggtacccgatgtgcgagaggcagatgttacgaaaagcatgcggacagcatctatctcccgtcactgcccaggttgatcaggttctatgcagccgttcatctgattccagtcattgccaagtgccatgaaggacattactgcatcataaaatatagcctggagttagacatcgtcctaatttctaacttcccctgcccgactggttggttgaatgggtttcttttagcctataagggccttaggattctcctacacttctaccaaaatgagctttctaaaagagtatatggtacaatatcctcttatggaacatatactcttatggagtaatgtcacagtatatggcattgaccttttgccattcacctgtccccactaccttcccctgcataacatactttgtgacacaagtatttcactacaactaatgtgatcttctagaccagcacttctccaaagtcagagtttttgcaaatcacctgaagatcttgttcaaatgtaggtgctagttcaggaggcctgaggtgaggaccgagattttgcctttctgacaaactcccagataaggccaatgctgctagtttcctcgagtgggaaggatctaggaaactcccctatgtattcctgttcctatatctttgttcacattcttccttcaacctggaatttcttccctttcttcctagattttcatattcatccttagaaaccctgccttagtagctactccttgaagtggtctaggatggggctttctgtatcacaaatgcttcctcctctgaactcctatagcacacagtggctggaccaccctctgacactgctaattttatctttagctactttctcatgcatacatcttgaatccctgattaaatgtttagccccttgaggacaatctcatcatgttcactcctggcctttcccttaaatctcagatttgcaattccaaccacctgctgccttattagaatccaaattcaacagagcaaaaacgaaacaccctatcttcctcctcagaaaacttgttcagtctcaggtactcccttctcagagagttgcatttatttattttacaaatacctgtttgttttaacaaatacatgtgcctacgatggaccaggcacatagtgatgaatggagcagacgtgttttcatgatgcttgtctgaaacctgtggaacctcgaaaagccccagtcacctacaacttaaaagctgtgcacttctggaggctcaaccacccaaggtagaaactgcagggtcatcaccaatttcaccttctaacttaccttccacaaccatctgttgtgttataaatttctatctgtgccgccacagaaatgcctctcctacatgagcactcccttctttcccatttctcttgccactgtcctagaaatgtggccatcctctctggttccagtgatggcacttgtctccctactccctactcatcccttttggtttcagcttcttcatctccaactttttttgacaccaaccctgaagttatcattctccagaaacatccatctcatcacagcacttatggacttacaaagatagatggatccacattgcctgtggaattaaaccccaccttcatagcatcaagttcaatgtctctataatctatcctccactgacttttccagcttcccatcctcacacactatcccctatttctactgtgtctgagcaaacatgtgctagtctccaaatggccctgctctttgaaggctgcttgcctttggtcaacctagaagtcctctcctaattctccaactgtcaaaatgcaacagttccttaaggttcaactcaaaagccacctcatccaagaaagcttcctctgccataagtaaccacttccatggcatttcctttgtaactgtgtcacatgccctttgccacacagtctcgggtgattcttaactatgtatctatctgtctttacctccactaggtgttaagactatgtttatctaacccagtcggtgacgaacaaaatttcccgaaatccaagggaagatgttcccaacaattcgagtttgttgactgggatgatggaattgtacttctttgattcctcaatgctgagcacaaaatcctactctcggaagatgtgcaaagaaaaaatatatatatatacatatatatatatcttttgtgtgtgtgtgtgtgtttatgtgtgcagtgtgtgtgtaaacctttcatctttggtatctttgaaataggctctctccaacttcatacagcctgatgattgcatcccatcgtgcccctgtcagtggaagtccttcctgtcagagccaattgccaaggcagagtttttcaatcttggtcacatattagaatcacttggagagtttcgaaaaatctcagtgctcagtctgcaccccaggtggactaacttcatcagagtctctgtggtccagacttaggcatcagtatgtttaaagctgctcagatgattccaatatgcacccaagggtcaaaactactgtgctggagaatatttcaatttcagacttagtcataggaatatacaaagcagcagccacagcatataggacaattttaagggactcatctgaccccagacatctctcttggttgcccattgtggtacccacaatgagaaaacagaattctcttttgagtatagtattatctccagaaggcattgttaaatacatacataaatacatgagatatgaatatatataatatgatactcataatatgtgtgtatgtatcatattatatatgcaaatatgttccctggaaagagtaatctatccatcttccagctgtgtgcagaatgaaaagcaaattcccttttgtgaaagatgaggccctggaaaggaaggtctggggcacacagatggcattagggcatcctcccagtcagttctgagaagctagagagcacagtgggaatatctgatatctcagtagaacatgagggggtgagagggaaagagaggcacagtaaaggaaattggcattgggagaggacttccaccaacaaacttggctttctcaggttggccagggatgacgctgccctgaatctctgaagtttatagactttgattttcaaaaattaattactgggtaggggaaggggaagattttagatgagtgggtaagaaaatacccaggacctgggggaataaagtctcagctatactaaacttcctgagccttgaaagcaatactgaaaagattcctaaataaaaaggttagcagcatccagtcaaagccaaaagaaactgaggagaaggaacctcgtaaaaataaaaagtcatgaggaaaagtgtatatcggtggcaatttttccccaagcttacaaaaaacaccacctggggacagagaaccacggtgatccctctacactctcctgcctaatgagaatttctgaaagcaaagtatgcctagagtgagtccccatgaggtagtaatttataaagctgcccctacaccatgctgattctgaaagagactggttttctagtgtaccagagccttttgtggaaaaacaaagcaataggaaagaacttgaataacggaggcctccacagagatgagatgacacatcggggtctgtgattgcacctcagattcactcaaccacaatcttctctgagaagcctacttccttattctcataaactaagctgagcagtaatcatcctttgccttgatgggaagatctgctaattacccacagctctggagaaatgcaaatctgtggctatgtcatggatctgatctgccttctatgaccttaaccccccaccctaactccttctgtctcggatttaaacaaattaactagacatgaaacagaaagaggctgttacttaagggaattggatcctcggagcatatactcctgaatttcccttatgggtttgagtcagcagtgatgtctcagagacattccagatgacttcaaggaggcaagggcagactggtaattaaaccacaccaatcaggaaggcttagaaatagagaacaaagggcaaggagaggagagagaagaaggcaaaaaaaaaaaaaaaaaaaagaaaaagaaaaaaaataaaagaaaatagaacgaagaagcaggaaaccagagtcctggaaatgctttttcacatgttctacccactcctctctctgtctgtgttaacgaagctcctggaaagagatgtgtgctcgcctctgtataaagcagtgaggcacagaaagaatggtgtgagctgaggccaaccaggtcttaggtctgcgtgagcctggtggagcaactcaagtcagtgcaggaagaaggcagtgtgggaacagggctggtgagagtgggactgggctctcttccaggatcccaggctcaccccaccttaaccccaaatgctacaacctcatggggctgcatgtcttctctgtgcccctgctagtccactctcctctcttctccagcctgcccattgctggagggctgaggatatgaattacatccctgggcccccatgtctgctgactccagttaaccttggccattgggaggcactgtaggagctcctagaggagagtgaggccccaacattcattctcggggcttcctcactgtgaggttgcttcagactagctgagcacctcaacggaaggtcacaattcccctctgctggctagtccagagctctttccctcccccatacttcagtccttcaggccttagggtggtaactttgctccatgttactcacctcaggttctgccctattccttatggcttttctacactctgctgtcacctgtatatcaagtaccttattgaactatccttaattattgcccaagttgacttgtgctgtcagtttcattctaagacccaactgatctagcccactaactcaagatagaccagaattatgtctttattcttccatggtggggcaaccttcaaggtggcttagctactggggcattcacctgtatgtaaaaatgtctacagagaagtggctactggtggaatctgcttagtatctggagaactgtatgtcctttagctaaggaaaacacaagtgcttttctcttggtctaaagtcactttacagctcatgcagaggtggtctctgcagtgcaccaagagatataactgacagtaacgtgtgtcagggagggattcccttccttcctcagtgctaaggagagaaaaagaagtagatacgacttacaaggaagggagggagacatgagtttgcccctgtgggtcaccttccatcacagagcgcgactttcttctgctgaaccacccagcaatgggaacacactgtgcatggcatcgaagttcaagaccaccgacaagcaaaaatgagtgcggctttgcatttactgcctggaaacccatttcatcatttaatccaaaacctaatttttttagaattcaatgtttaaacaaatcatgagtgtttgatgtgacatgagattgctttatcctctctcctccccagttcctcatgaaaatgagatgctgcacctcatttggggatttgggagagaaaataaaacaaaacaatctggatctaggtcagcagaaagcctgtttgttcagcgtaaagaggcctctccactaattaacactttcctgagaaaaaagagtgaaagtcgtgtgcgaggagcatatatatatatatacacacacacacacattcctctttaaatggcaccatttcagattcagtaaaatagcacttaccccttcaaattggaatagtgatcacacatactgaaaattaaaattctggaaagcttcaatgctgaaaatttcatccagtcacctgacagagctaattaaatttcttgggctgttgattagtatttattaaattacggaactaaagctttaactctgccattcttgcttcaataattaagaagttgtggagagagagcaataaccaaggtgtcagcttgctgactcttccaaaaagtggtactcagaactttatccaactcatgccacgaatccagtgatactgaagaaaaaaaaatgcaaatctagagtagcataaaatatgctttctttcctttttaattgtgcaaacactgtggtcatataataacatgcacaatgaatttgcacccatggctacatgtgcttgataaagacaacatcatggttctttgcaacaatgaacatttcctcttacagatgcttagcttcggaggcatcttgtacagaataacatattctgttcttttcccacatgctcatctagtcaaacttctgctctccaaggaatgaataagttctgatggactccacatcagtctttatgtaagattttttctgaaaattatggggctctctccataatccagcagtcaactgaaagaatatctattgagtgtctaccatgtgttcaacactcagctcactgtcaaaaaagatacaaaaaaaaaaacaagataccattctttcccaggggcatcaagatgttttatagagataatctatatccaaatgaaacaagaaacaaaccaaatgcatgagatactgataaaataaagtgcttatttgtgtgataggatgatcaaaataaatttcactttcaggagtgccttccagctccaacactttccaatgctatgtgtagcacaaaaaatagccgaagaattcaactaaaggttctggaaggtgtgttctcatcatgagcatgccctcagcacagtccctgctattcggtaagctctaggcaaatgctgaatgaatcgatatgcaaatgagtgcaaaatgaaaagaatgcagacagcaagatgaattggcattatctgagaaggcttcagacctgagactgctcttaaaccaagctgcaaggcagagcttacaaattgtcagccatcagtgttaatctatctatacagatgtgtttcattcagcccatgctgtgatgatgatggtggtggggatgacggtgatgatgatcatgatgaagacaaggatggaagtggagagagaattttaaaaccaggagattccatgttcaaatccatatatttctattgtaaaacaaactctacctctcctggctcctgtgtccatgtggcatgatgccaaggccagtggctcttctttttttttttttgagacagagtctcactcttgttgcccaggctggagtccagtggtatgttctcaactcactccaacctctgcctcccagattgaagctattctcctgcctcagccccccaagtagctgggattacaggcacccaccaccacacctggctaatttttgtatttttagtagagacagggtttcaccatttggtcaggctggtctcaaactcctgacctcaaatgatcctcccgcgtcggcctcccaaagtgctgggattacaggggtgagccacggcgcccggccgtggctcttctctttcttcggccatcgtcctccagggttgcaccatgttccaccctctcagtcttcttcccaaccaaggccaagtgtcagttaccttttattttcatgcatgcactattgctttcttctggaagagaaaataatccccatacacatcgtactgaaagtgtaaaaatgcaaaagtagtccatgagggagtcatgtttcaagggaaaagtgtgagactatctcttgtgaaaatgaatgaggaaatgaaatgatgaaattgtatgctattaatatcaatctaaatgtgtctatgaaaagaacagaaattgcttccctacattatcagttgctaccttctcagtgaggccttccatgagcatccacctccacacatgcttccagtccccccctccactttagttttcactttagcacatgccatgtatatttttattgtataattctttttttaacttaattttaagttctgggatacatgcgcaggacatgcaggtttgttacataggtaaacgtgtgccatagtggtttgctgcacctatgaacccatcacctaggtattaaaccccgcatgcattagctatttatcctgatgctctccctccccctgcccccacaacaggccccagtgtgtattgttcccctccatgtgtccatgtatttttattgttcagctcccacttataagtgagaaaatgctgtttggttttctgttcctgtgttagctccatccatgtccctgcaaaggacatgtccctgcagctccatccatgtccctgcaaaggacatgatcttgttcctttgtctggctgcatagtattccatgctgtacatgtaccatattttctttatccagtctatccttgatgggcatttaggttgattccatgtctttgctattgtaaatagtgctgtaatgaacatacgcgtgcatgtgtctttataaccggatgatttatattcctttgggtgtatacccagtaatgggattgctgagtcaaatggcatttctggttctaggtctttgaggaatcaccacactctcttccacaatgctatatattttactggtttatttcatttgttgttggaatcttgtaatgcaaatgtaggctccataaaggaaggggtttttgccctcttttgttcactacttcatccctggtacctaggagagtacctgaaaaagagtagatgtttgatgaatgaacaaacaaactcagctcgcttctctaatttactttatctgcatgatctgcctgaaaggatgaagcagctgtggataggctaagagaagagccatcactcctggtgaaggaagttacttctggcaagtaacataagcaaaggcttgagctggcagggagcacgtggaaagggaaatagggctctgtgagaagtagagcctaattaaaatgaaaaatgtagctgggcatggtggcatgcatctgtaatccaagctacttggaaggttgaggcgggagggttgtttgagcccgggagttcaaagctgcagtgagctaggattgcaccactggactctggcctgaacaacagagtgagaccctgtctcaaaaaaagaaaaggtaaaaatgaaataatgcatttaaaatggaaaatgtgtcatggagttgccagttaagaatccatgattgatagatgtgaacaagacaccactcgtctgtcccctgtcatcaatctggaccattgcccaccccacctggctttcccagcgccatacctgtgtatccttctggaccccacctgggctgttctagcacccttcaatgattctccagaaaaaatactaaactgctcacagtagactataaaaccctgtaggatctcctggcccacttctctggccccaactcctgcctctccaacatatgcactttgcctttcagttgcaccaaactaactactttccaaacccttagtgggtttggtccacatgagcctttcaacatgggctccatctgattgggagccccaacaccagctcactcttcaagatcagctcagagagacagagagacccctgtgggagcttctccctagagcccctacttggcagacccaggacccctactctgtacctctggaccatctgatgctccgcgggtaatacttatccatcagaagctgcatgcatcgcctgtaagatacagcgtgaacacacaattctgcggcactcttggccaactgatggtacccaggccttgagaatgcctccctcgctccttgaaccctccctagaaattgattggttttctcattaagtggtcacagccctaaggtaccaccaccatgtgtctattttcactggtcctgagttaacctgttatgccctatcccctttactgtggtgtaagtgcccttaccttttcccatttgatctcagtttaattaactttgggtcactggtttctgctcttgaaaatacatactctacactcagctttcattcttctcaactcagttcttgtcaatgttgacatcacgttgtactactgtctgtttttatgtctatacctccacagaagagaaagctccttgaaagtagaaccgatgtcttttcatctttgtagccccaatgcctaatgcggtatcttgcacagagaaaacccttaatgaatgtttgttgactgaatgcatgaacacatgcagcgatacagccattgccattggtctttaagagaaaggaccatggcactttgggaagccgaggagggtgaattacctgacatcaggagttcgagaccagcctgaccagtatggtgaaaccccatctctactaaaaatacaaaaattagcctggtgtggtggcatgcacctgtagttccagctactcaggaggctgagacaggagaatcacttgaacccggaagcagaggttgcagtgagctgagatagtgccaccgcactccagcctaggcgacagagcaagactccgtcaaaaaaaaaaaaaaagaaaaaggaaaaaaagaaaaaggaccatgaattaagttatggcagcagtactacatattcaaaaaactaagtaaagaaaataaagacagattttttttaattactgcaatcagattcattggtcatgagaacctgacctataggcttagaagaagtgaaaagatggatataaaaagctagactaaatctgaaaattaaaagacctttcagagaaagaaaacaaagttgaagtcacagggttgagcttgccctggagagatcacactgtctactctttaaccccatgggtctgagttttcagatttcccgtgtatcaggatgagttggggatacaagttaagagtgcgaatctccagactgcaggtctagtacctgtgtctgtactgagagcacattgtgtgaacaccttggcatggtgaccccaggaccacctatgccttaaccatttttgatcagggaaaagctcttttccttgtaaagatgactacagagtttccatgattttctaggatactcagcatgtttttcctgaaatcctctttttcatcatgttttaggaaagcctgttctaatggctttgttttcagaaaaaaactgtttttaaaatgtcaagcgaaagagatttctaagtgtctcttcttgttgtggagtcacctttttggaccaaaaaaagtaaaatcaagttctggacaaaagttctagctcctctgaagtttgtcctttcctctcgaccatataaataatggagaaggggaacttactggtatatctcatttaggcacttggataaataacaccccactttcagttatctttggaaaaaacattgagaaaccctcttacctttttgaggacaaaagaagcaaattgaaaatgcactaggccttttttaaatatttgtgatttggcttgaaaaagaaggtcggttttccacataggaaataatttgaagaaataaaatgaaaactattttcaaaagactgtttaactttcctttaattatactaaaaagaataataaagagcatgaagcatattggaatttgtcatttatggatcaccatggcatagtataaaaattcagaagtagcttctaatgagaaaaatacaaaaaataatatcagtgaattttatatttattaatctaggggaaaaattgagaggttagggttccattctgttcagaaagactcacagtgtaacctcacatgccagcatgatcattatactatgactttccagtgcatcaggaataaaacataaggctcgtcaaagaagtaatagaaaagcaacctaatattgaggctaacttgacacaaatcattctaattatttacattcagagctccttttgctgagacctttttttttttgaagagataaaggctattttctaaataccactgcttagctaccaaatctattaacagaaagcccctggcgtttgatctttcagattccagtgtgcttccagtactgtttttatacttatctgcaataaaaaggtgattcctccaagcgctttggatttggttgaatcagatttactgtctggcttctcaaccttattcccaagtacaatgtaataggaaaatgcaaagccctttcaagtccccatgggttcctatggcagggtggtgaaaattttgttttctttactacttttcatttcataagagaaatagtctcaaggagaggatttctaatgcaatgttgttagatacagaccattaaatatgtagggctggctttccagcctacatatgcagccctatgggaaaactctccctttgtcatggaaacccaggggaggagttggtctgtgctgttttatgaataaaaaatccagaaggggaactctttttccattttaaagccaggaggagtttttaggactttcattttttcacacttgcctgttagagaaatggcataagttttatggtattgtgcatctagaatgttcttagcaccacctgaaaattattatttccgctgatagttaagacagatgatagatgactgatcgatgatagatgattgattgattgattgattcagggacagtataatccactgttatacataaccagaagcataattgggcaaatagcatttgattcatctgtctttggacctcctaaaggaagatgggctgatttaaaatgttatcttgaaaaatgtatagtcttgtatttgtttggagggttctagacataggcattgttagaaatggtttagaaaattaggaaaggctactcaaaccatagtggcgttaaaaaaaaggccaagaattaggaaattgtttgtagggctgctagaatcacaatgatgttggagaaggtctagaacattagcatggactgataattcagggaagagtaccaagatttccagagtgctatcctcctccccccaaatatattttccatcttttttgaaatgagtgagacctaccaataggcacagggcttttcaaatgcattcacactctccagttcaccagttctgttgtaatggttaatttgagactgcaggctctgggcccccactgccaaggctcaaaaccaggccctactacttgtgctatgtgatcaaggccaagagacttcactcttcactgcctcagtgtgttcactgttcttgtgaggttgtggtgattaaacaataagataggagtgatgggtgtagcatggggccagccacttagtgaggatttgatgacatctcactaaacaaaaaggtcaccatagaaatgcaattctcagttattgcatctgtaaagttgagacatcaacagctacctttcaacattttttacaaattggaggcaattatggatttggttgctgagtgtccaataggtatggtagccatcactgttgttatcataatttttatcaacacctgtctcactccttgttgtacaggtcaagaaaacccaactagatcatagcttcttgaagacaagcaggcttcatgggatactacctgcatagttgcacaaggcccagtgtttagaagtacctgacactctgtagttgccacgttcaaattcctaataatatttaaacagggaaccctgcattttcattttgcactgggctctacaaattacgtagctgatcctgaggacagggactgtttctaacttggttttataaactttgtcttccaggcacagttctttatacacagtaggtttgcattagatgtttcttgaagtgaatgggcattgccactaattaataataactgaacatgaaaatcatttattcaatgcccactttcggaaatccaggctcctcctgagcttataaagtccttttgtggacaggcctttggccaataacaagaatcaatggtgacaataatcgttccaagtaaatcttgtaaatgtagaaatggattgagtatttgcaggatgtacttcataaattcagacaggaaggttggttaaatgtttaaaattgttgtttggaacagattaaagggtgcaaaaaatgttagcaaaatcacttgggaaaggtggtttctaatgtttttaatattggcacagttagtaactgactttaaatccttccttgatcaacataaaaagacatttcaagggaaaggaaataaatggtaatgccattaaccatcacacattgtagaagtacctattataaaaaatcctttctaagttttactgttctggatctaagcttatttcatagaaatacagaattaaatactacacttgatttcattttggaatattaatgagactgaaataagctttaaatttttctttgactcattaagctggaaagtcaaagtgctaaaaatacatacttttgcttcaacataggctgaaatggatacaaagaattttgtgtcagggggagtttaacttagagtaaaaggacctatcgggggaaatttgaagcaattgtaatgtagaatttggctattatacataaacatatgtctatattcatcatgtagctttacttgtcagaaaatatctatcttaaaacttgtacagtcagaaaaagtatcaataacataaaatttcacagcccccttttagaactatggccttaacattttgtagggaaataaagctttggttaaccttggctctggtagacctcattaaaataacagcctgtcagtttcaagtttaaaataacagggttgtcagttttatatgcagtggaacaatctacagttttattctcggggataagactggtaagggggtgaaaggtggacaaagactggacaacactgccatctggtggttataatgaaggtggcctctaaatgcctggagacgaggctggaccatcttgaaggaaaagagggtgacgtcagcctgctttaagcaagtcactgttcgactttttgatagccttttgcctttaaaatgtaggtacatgcccagagcctagatgcaatttataatctcaaagttacagtaaatcaataataaactctgctctttggtaatctttaatccctgcatatccatgatttgagaaaattaattttcaagagaatgaaatcttgtgaaaagaattagattcaacaaaaactttattttactttaagttctgggatacatgtgcagaacgtgcaggtttggtacataggtatacatgtgccatggtggtttgctgcacctatcagcccatcatctacgttttaagccccacatgcattacgtatttgtcctaatgctctccttccccttgcccccaccccccgacaggccctggtgtgtgatgttgcccttcccgtgtccatgtgttctcgttagattcaacgaaaactttaaaaaatattttcctttattaaaaccaccacatatctggtgttttattgcatgagtatcttgtgagaaattcatcaaactgatgatatatgatttgtttacttttctggatgattattaaacttcagtaaaaataaataaatgcaaaccaaaaaaagctgttcataggcaaaattttgatggctgtcacaaagctggatggaacatgttcccatttatataaactgaagcaattctagacataggctggattcaaacagacttctactgtaacctaacttcgattcagttctttcctgctgtacttcggacagttgactgggggtatggagcaggggcaggagagtgaggtcagagaaaaatgagttctgttgatttgaaatgcaacctactcaaaaagttcagaagaagatactgaactctctaatgttgagctaatagcccacctttagttcattcagacaacaacccctagcctaggaaccatgctcaacccctctcagtagcaactggccccctctcctgacgtgcttaggaaggaccttagaccatgccctcaatatggtagccaccagccatacatggctattgaccactagggatgtgctgtagacagaactgagatgagctctaagcgaaaaacccacaacagattttgaaacctgtgccatctaacatggcagccattaacaatgtgtgactattgagcaatggagatgtccggtggaatgaactgagatggactgtaagtataaaatacaaactaggctttaaagacttagtaccagaaaataataaagaatatacaatatctcatttaaatgtttcgtgttcactatgtattgaaacaatgttttgaataagttgtgttaaacaaaacataacattgaagttagcttcaacttactttttttaaaatgtggcaactagaaaatttaaaattacacctgtagctcctttgtggcttacatgatgtttctactggatattgctgccttcaggctctcattgcttcttcgaacaggatggccattttgctattttacaagttgttttctctctcactggagctaaagtgggctgcctatgacacttctgcagcttgtaggagactaagaggacccatttaggttattggatgcttatgatgcaaaggtgaaagtcaagcaaaattatgtcacctgggtctaatcataagcagagtaaatcgtactccctggttggtgccccatggggtaaattggatctttaaggtaaccagatggctctcaggaacaggtaatttacctcaccggggtaagaacttgatttgcaagaaagaatacagtttagtcccccaatgccatatgtccccatggtgacatttgtactcattaagtacttccagttccaagtgccctagcaatgtatgaactttctttctcccttattgtaaaatattgattttacttctcacaccctacaacccttaaatgtgtgagccatttttaatgctcgtttatgtgtatatatcatctttcctccactgggtggttaattgaaggcaggaccacgtcccttaaatcactgtatgcccaggaccttaaaaaggcccagtacattgtagatacgaatcaagtgtgtgtgcctgcctgtgtgcagctgtgtgtgggggtgggggtgtttagttggagtgactatccataaacagaccctaagcaaccaattatctataatatagggaagcttacaaggaagatgcccctccctatggcagtaaacttattttgcaaataagggcatgtcgaatttacatgtcatttacaatttcatttgaagacccagaatttgaacttgcccttctgcctactctgccgattgttcatttattcattcgctattattgaatacaaccaaaaaccaggcattgtgctaggagatgggacacacatctgctaggaggtggtgagcacaaaggacagaggccctgcccctatgtcacctgcagctgggagggaggcccacaaccatgatgaataggcaaatctttatggtaggtaaaaccaaacggatctctgtgagcacatattctggggaggtcctagttgaaacccatagaaagactttcagctaaatcatactcttctctccaatgtgtagactttacatttgagtaagagttcatagacagccttgggtgctgtggtttacattcttagacatatttattagtatctcatcctattgttcctagaattcccttaggctaaaatctttggtatttgaactcgaaccagttcccagttaaacccaggaagaaaaaaggcagatcattgcattatagcataaatataacacaagaaatgtaaaagtagcatttattatgcaccacacaatgcaagtctacatagttaagtacaaatcaaatcatatatgcccaaaagacatttatatgcttttggctgcctattccataaaagatttatggcaatccgtctctaccctaaatggctttagaatttagataaatctgatttccacctactagttgctgaatattttcctatgctgcatctaaattacttttccaatgtgtgtacatccttgtgggtactctcactgttggatggaatcatgtttgcaatatcttacgtaagataagtaagatatcatgctcagtgacaccactcttgggtgagcaaaaggtgtttcttgtttcctggtaagttccaaatgtctgtaggcttcagagaaacagaccagaatacacatctatttctcagcttcggtgtggaagaataaagccaccaaactgttggaattaaataacgaattctaaaatattcaggaatgcctaaacttgaagtgaaatgctttgcaatgcctcctcccccttttttaattagcagacttacttgtcctggatttcattccctgaagatgaaatttcaatattttcagagtaacttcaggtagctatgagcttaactgaatcactgtggtatgccaatcacaggtagaaatagagatggaaattctctatgagtttcctaagtatcatcaaaggccctgtgaaggggttgtacatttgaagtaagagttggcaaagaatctgaatttttcagcaaaactaaatgttcaaacattaaactttttctcacattggcaaaattgagctattaaatattggagtggtctctggcagttttccaaatcagggctaatttccaggttagtcctatacaaaggggtcaatcctatgccactagcatcatcttgttagctatatcaggaaattgaggaaatatgggggaaatttgcctttcaaaccacaaagaacttccaaaaggtttcattccataatgatgatagaatagatgatggtaggagcagaggtcaggtttaaaataaaatatccaaaatgcttcaaggtgccttatataactgctagaaatactgaattcattctcttcttttgaaagcgcacttgagatcttccaatccagcattatgaagaccgcatatctaatgacctaatttagaatcagcacttgtcacaatccatgctctaaatcatggcaagttccttggggatttctgcctctatacagcaaaaataatgcctgagaaaagatagaggccgaagttagccaccaaggagaatagagctgttctccaaagcagagagcgagagagcagatgggacagacctttggtcagcagcgaatcaaaaggagcatttaccaggggctaggcagagaaaaacagaatccactcacaatttgaaaccaggtagagcttgcaaaggaacaaagccaggcaagagagaaaagttgagggctcagtctcaatgccaagagaggaggaagaataagaatgtgtttctgctatgtgctcaagccctgttcataaagacccagaactgcctagcgaggggagatgacttggcttaggtcaaagcaacaaatcccaagtcctccttcattgatatctgtcattagaaacatttaaatagagtctaaatgagcctgtcaagaatgctctagaagcgttggactgactgtgagagctctgctaagcctttaaattccataattcagcaataaaactactcctttaaatcattgctatttctcagtcttgaaaagtaaatagtgccacatttgaggtaccttgctgcaaagcaatactttgacttggtctggattcccaaagaacaaatgacttcttgtgtttttcttttcactattgaattcaatagatattagttcaatgtcagactgtgtcatctctcaaggacgtataggatgcctactgcacttaatgccatagggaatgaggcacaatcagaacatcaggtacaaacatgaagatttgaaagtttgttgttgttttcttaaaatctgctgcaaaaatctaacctgaacagcagtaggaagatatttctgatgtctcccacatttatcccaatttgaggaccaggattttgcctgaaaaggaccccatctatcttttcaggggcatgcatgcccttaatatggtgtgatcagctatccaagaaactccaagcctaaaaccagacaggattattcagactgaacttttcaacacattctcaattccctacgaaactcaacaaaactaagcattgtgttttcaaaccttcaaagattcacttcctacttttttaaaatttttatttatatccttcttagtctttcctacaaaacatgtgtttgtcaacttgggagtaatgttaaaagtaccggccgggcaccatggctcacacctgtaatcccagcactttgggaggctgaggcgggcggatcatgaggtcaaaagatcaagaccatcctggccaacatggtgaaaccccatctctactaaaaatacaaaaattagctgggcatggtgacacacgtctgtagtcccagctactcgggaagctgaagcaggagaatcgcttgaacccaggaggcgggggttgcagtgagccgagatcgcaccactgcactccagcctggtgacagagcaagactctgtctcaaaaaaaaaaaaaaaaaaagtaccacaccaccgcgaaaatatatgtcatgtggaaacagactagaaattatcattgaactccctgggaacatatgatagagcccaaaatgttggagtggttttaggttgaatagtgtcttgagggctctgtaaaatgctgggtgtaacatatggtcaaagtcggctttagattcactgacaaactgcattcaacagaaccctgctatcatccccaagacttatttagaagtttcctgaaagaaaacatgttattagtacaagcaatttctccaccaagcattacaaaacctacccaaacattacattacagaggggccaatctgagacatgaaaaatgacaccaaagagtttcataaacacagaataaagggaaaactgatattctagtgaagacagtgctaaaagccattatcagaagatatggattacatcctctaagaatacgagggagggagattgtgtttatagatatttggccatgtcagaaaaaaaaaatattctacctgagacttaggaactttaaatactctcctccagagtgcatgtgtttcccgagggagtgagagaagctgtgaacaggtacattcacagaccttgtttggttgctgaaggagtatgcatgacttgaattctgatgcaggctcacacagtgaatcaaatgatttggtgctgtcagaaaagaccattcttctctagagtaaagctggatgaggtcactgtctccaaaactggattatattaaattcttaggttgcaaaaattgttttgtgtatggtgactttcccttaacttgaccaagtaaaacggccttgtccctgagcaaaaaccagcctgccttcatgtctttaaacagattgttttccaaagcttacaaatgacctccagcctataaaatattcacattggtttttttccttcaatatttattatttagagtgtagccctttaaatattcatcatatttttctaaagatatggtatatattatttacatctggtcacattatattttcatagtgatgaaatggacacattggaatctttctgaagtcaggaacaaatagggtattgggccagatgcacacaacaggtagccagtgaggtggatttgcgtccagagatgattgagggaaaatggcaggtggccttctcacagtgactactcaggaaagatccagaggaaataaagggtccagggtagatggacttggggcctcctgtgggtaggtagacagccatgggctgaaggagaaagtcaaatatgtctcatcagagaattcacatgggatacaaaagcaataatggagttcacaaacacaactcagaattcaacaggtcacctccttagaaaaccaaagggaaggtgttggaatgtgtttatgaggattgcaaagaccctttaagatgggatttattccatttttaattaatttctcatgctttttccttaagccaaggtttttgaggtcccccaggtgtccatcttacctgtgtaaattacaactggaatgacatttaagacaatagtagtctggaatcctaattagaagattggggggatcatctgagatctctctctctctcttgctctgggggtaatcgggtcaaggaaaatgagttttggtgtttttttgttttttggggttttttttccctaaaagcctgaatgaatttgtccatgcctcctttactctctaaagttacatttggaaagaagtcgctggcaggtaatcaatcatttttgaaatcttacttcccttagcagatcatcagcaatgctgttcgtgtatttattcatttgacaaatatttatgaagcactggtacacacaaagctctgtttactgagtctctggctgtggagcagttattccctgggagccaagaagtacagctgttctttagcaaatgagtagctgaagattagagtggtggctaaaagccatggcttctacatggacaaaatcatcctgttcttggaggctaaaacttgggaggctgtaatgcattatttttgtttttgatccctgggtgaaacttattaattattctgcttcctaatctttcccatgacaagagttcagcaaccacaaaagaacaaatagcagcgaagccttatttgcttgagaaggaatatggtggtgttcccagggagggaatttccagacaaattaatatgtgctcccatagccctttgcttagctaggactataatgtttgttccttgtctgttacccctactaggcagtgctacaaacccttcaaggatagagactgtgtacaagtcatattttgcattcccagagtctactataaaacctgtcttataaaaggcacgttagaagtgtttaatgaaggaatactagccacaaaagccttttttcttatttaaccaatgttttggaactttttctgaactgtactacattttcttgtctcattaaatcgatttcgttgaatgttattgaatttttacttgctaagtcactgatttaaaatatatggtatgagtccctgtgctatagactggcgatctgcaaacatttttggtcttgcacctctatcagcaaaatattccgaatgataaacaaccagagtacctataaatatttatacataaattgtaacataagcactactgaattaacacattcagtacctcatgaaatttacataaaaacagaaacttttgaaagatgagaaaaagatattcttttttatttctattttgtaatgttccagatgtatcaagaataagaggaatatgatgcctgccattatattgtttacttgtgcttgctttgtttgaaatgaaagaaatccaaagtttcttttcaaaagctatttaagtcctattccattgaatgagttagttaaaactaattaatctaatccataaatgccttagccagtacatatgctggatcaatacaccagcagcaagttaatggtggtggaggtgccaatgctgcccctccccactatgaaagtcttactctgtccctaagataattgagaaatggcgatccctgtacggactgattgaaatatcaatctctagattaaatattaggaaagcttaattcctcttgtatttttataaagatagaaataggaattctaatcctgaatcacattgaatctcttgcacacccccagagatgcacacacactcctgtcaccaacccaacacacacacttcaaaaaccatagttatcaactatggccatagtaagcctagtggttaagagtaatgattccagcatctgcatttgaatttgaatctcatctccaccatttactagatgtgtggcaagttttttagcctttctaaggcctgtttcctttttgtataagggtgtaatgataatattttagcaccgtcagagttgtgaagatcgaatgcacgtgagggcctcagctcagtgaaagctcacagttaatccccatttctttgagtcaattactgccctctgctgaacccagcagttgccatgtgccctgacaacaaagtcttgtctctttcccaacttttcattatttttaactttttcaatactgaaatggtggggaaaaaaatagtaaaatgaacatccatataacccccatacagattcaataatggttgactattttgctattttcaagtaagtaaaagatgcagtgacacattatccctaagtatctcagcgtgaatctcctaaaagcaaggacagtctcctatacagccacaacatcatgatcacacttaagaaaattagcacttattcaataatatcaactactatttattcaacattcaaaattatcaaagttcttacttacagctgggtccctacctccaaatccaggagtcagtttctcttccttccttcctttctcttccttctttccttccctccctccttccttcctttctcttttttccttctctttgtttctttcttgcttgcttactttcttgctttcttctttcacttgccctcttttgaagcattaaggccagttgtctcatataatatctcatcactggggggaggagccaagatggccgaataggaacagctccagtctacagctcccagcgtgagtgacgcagaagacgggtgatttctgcatttccaactgaggtaccaggttcatctcactagggagtgccagacagtgggcgcaggtcagtgggtgcgcgcaccgtgcgcgagccgaagcagggcgaggcattgcctcacttgggaagcgcaaggggtcagggagttccctttccgagtcaaagaaaggggtgactgacggcacctggaaaatcgggtcactcccacccgaatactgcacttttccgacgggcttaaaaaacggcgcaccacgagagtatatcccgcacctggctcggagggtcctacgcccacggagtctcgctgattgctagcacagcagtctgagatcaaactgcaaggcggcagcgaggctgggggaggggcgcccgccattgcccaggcttgattaggtaaacaaagcagcctggaagctcgaactgggtggagcccaccacagctcaaggaggcctgcctgcctctgtaggctccacctctgggggcagggcacaaacaaacaaaaagacagcagtaacctctgcagacttaaatgtccctgtctgacagctttgaagagagcagtggttctcccagcaggcagctggagatctgagaatgggcagactgcctcctcaagtgggtccctgacccctgacccccaagcagcctaactgggaggcaccccccagcaggagcacactgacacctcacacggcagggtattccaacagacctgcagctgagggtcctatctgttagaaggaaaactaaaaaacagaaaggacatccacaccaaaaccccatctgtacatcaccatcatcaaagaccaaaagtagataaaaccacaaaaatggagaaaaaacagaacagaaaaactggaaactctaaaaagcagagcgcctctcctcctccaaaggaacgcagttcctcaccagcaatggaacaaagctggatggagaatgactttgacgagctgagagaagaaggcttcagacgatcaaattactctgagctacgggaggacattcaaaccaaaggcaaagaagttgaaaactttgaaaaaaatttagaagaatgtataactagaataaccaatacagagaagtgcttaaaggagctgatggagctgaaaaccaaggctcgagaactacgtgaaaaatgcagaagcctcaggagccgatgagatcaattggaagaaagcgtatcagcaatggaagatgaaatgaattaaatgaagcgagaacggaagtttagagaaaaaagaataaaaagaaatgatcaaagcctccaagaaatatgggactatgtgaaaagaccaaatctacgtctgattggcgtacctgaaagtgatggggagaatggaaccaagttggaaaacactctgcaggatattatccaggagaacttccccaatctagcaaggcaggccaacattcacattcaggaaatacagagaacgccacaaagatactcctcgagaagaggaacttcaagacacataattgtcagattcaccaaatttgaaatgaaggaaaaaatgttaagggcagccagagagaaaggtcgggttaccctcaaagggaagcccatcagactaacagcggatctctcggcagaaaccctacaagccagaagagagtgggggccaatattcaacattcttaaacaaaagaattttcaacccagaatttcatatccagccaaactaagcttcataagtgaaggagaaataaaatactttacagacaagcaaatgctgagagattttgtcaccaccagtcctgccctaaaagagctcctgaaggaagcgctaaacatggaaaggaacaaccgataccagccactgcaaaatcatgccaaagtgtaaagaccatcgagactaggaagaaactgcatcaactaacgagcaaaatcaccagctaacatcataatgacaggatcaaattcacacataacaatattaactttaaatgtaaatggactaaatgctccaattaaaagacacagactggcaaattggatgaagagtcaagacccatcagtgtgctgtattcaggaaacccatctcacgtgcagagacccacataggctcaaaataaaaggatggaggaagatctaccaagcaaatggaaaacaaaaaaaggcaggggttgcaatcctagtctctgataaaacagactttaaaccaacaaagatcaaaagagacaaggccattacataatggtaaagggatcaattcaacaagaagagctaactgtcctaaatatatatgcacccaatacaggagcaccaagattcataaagcaagtcctgagtgacctacaaagagacttagactcccacacattaataatgggagactttaacaccccactgtcaacattagacagttcaacgagacagaaagtcaacaaggaaacccaggaattgaactcagctctgcaccaagcggacctaatagacatctacagaactctccaccccaaatcaacagaatatacatttttttcagcaccacaccacacctattccaaaattgaccacatacttggaagtaaagctctcctcagcaaatgtaaaagaacagaaattataacaaactatctctcagaccacagtgcaatcaaactagaactcaggattaagaatctcactcaaaactgctcaactacatggaaactgaacaacctgctcctgaatgactactgggtacataacgaaatgaaggcagaaataaagatgttctttgaaaccaacgagaacaaagacacaacataccagaatctctgggacgcattcaaagcagtgtgtagaaggaaatttatagcactaaatgcccacaagagacagcaggaaagatccaaaattgacaccctaacatcacaattaaaagaactagaaaagcaagagcaaacacattcaaaagctagcagaaggcaagaaataactaaaatcagagcagaactgaaggaaatagagacacaaaaaattaatgaatccaggagctggttttttgaaaggatcaacaaaattgatagacttctagcaagactaataaagaaaaaaagagagaagaatcaagtagacacaataaaaaaataagggggatatcaccaccgatcccacagaaatacaaactaccatcagagaatactacaaacacctctatgcaaataaactagaaaatctagaagaaatggataaattccttgacacatacactctcccaagactaaaccaggaagaaattgaatctctgaatagaccaataacaggatctgaaattgtggcaataatcaatagcttaccaaccaaaaagagtccagaaccagatggattcacagccgaattctaccagaggtacaaggaggaactggtaccattccttctgaaactattccaatcaatagaaaaagagggaatcctccctaactcattttatgaggccagcatcattctgataccaaagccaggcagagacacaacaaaaaaagagaattttagaccaatatccttgatgaacattgatgcaaaaatcctcaataaaatactggcaaaatgaatccagcagcacatcaaaaagcttatccaccatgatcaagtgggcttcatccctgggatgcaaggctggttcaatatacgcaaatcaataaatgtaatccagcatataaacagagccaaagacaaaaaccacatgattatctcaatagatgcagaaaaagcctttgacaaaattcaacaacccttcatgctaaaaactctcaataaattaggtattgatgggacgtatttcaaaataataagagctatctatgacaaacccacagccaatatcatactgaatgggcaaaaactggaagcattccctttgaaaactggcacaagacagggatgccctctctcaccactcctattcaacatagtgttggaagttctggccagggcaattaggcaggagaaggaaataaagggtattcaattaggaaaagaggaagtcaaattgtccctgtttgcagacgacatgattatatatctggaaaaccccattgtctcagcccaaaatctccttaagctgataagcaacttcagcaaagtctcaggatacaaaatcaatgtagaaaaatcacaagcattcttatacaccaacaacagacaaacagagagccaaatcatgagtgaactcccattcacaattgcttcaaagagaattaaatacctaggaatccaacttacaagggatatgaaggacctcttcaaggagaactacaaaccactgctcaaggaaataaaagaggatacaaacaaatggaagaacattccatgctcatgggtaggaagaatcaatatcgtgaaaatggccatactgcccaaggtaatttacagattcaatgccatccccatcaagctaccaatgacttccttcacagaattggaaaaaactactttaaagttcatatggaaccaaaaaagagcccgcatcgccaagacaatcctaagccaaaagaacaaagctggagacatcacactacctgacttcaaactatactacaaggctacagtaaccaaaacagcatggtactggtaccaaaacagagatatagatcaatggaacagaacagagccctcagaaataacgcagcatatctacaactatctgatctttgacaaacctgagaaaaacaagcaatggggaaaggattccctatttaataaatggtgctgggaaaactggctagccatatgtagaaagctgaaactggatcccttccttacacattatacaaaaatcaattcaagatggattaaagacttaaacattagacctaaaaccataaaaaccctagaagaaaacctaggcattaccattcaggacataggcatgggcaaggacttcatgtctaaaacaccaaaagcaatggcaacaaaagacacaattgacaaatgggatctaattaaagagcttctgcacagcaaaagaaactaccatcagagtgaacaggcaacctacaaaatgggagaaaatttttgcaacctactcatctgacaaagggctaatatccagaatctacaatgaactcaaacaaatttacaagaaaaaaacaaacaaccccatcaaaaagtgggcaaaggacatgaacagacacttctcaaaagaagacatttatgcagccaaaaaacacatgaaaaaatgctcatcatcactggccatcagagaaatgcaaatcaaaaccacaatgagataccatctcacagcagttagaatggcaatcattaaaaagtcaggaaacaacaggtgctggagaggatgtggagaaataggaacacttttacactgttggtgggactgtaaactagttcaaccattgtggaagtcagtgtggcgattcctcagggatctagaactggtaataccatttgacccagccatcccattactgggtatatacccaaaggactataaatcatgctgctataaagacacatgcacacgtatgtttactgtggcattattcacaatagcaaagacttggaaccaacccaaatgtccaacaatgatagactggattaagaaattgtggcacatatacaccatggaatactatgcagccataaaaaatgatgagttcatgtcctttgtagggacatggatgaaactggaaatcatcattctcagtaaactatcacaagaacaaaaaaccaaacaccgcatattctcactcataagtgggaattgaacaatgagaacacatggacaaaggaaggggaacatcacactctggggactgttgtggggtggggggagacgtgagggatagcattgggagatatacctaatgctagatgacgagttagtgggtgcagtgcaccagcatggcacatgtatacatatgtaactaacctgcacaatgtgcacatgtaccctaaaacttaaagtataataataaaataataataataataataatatctcatcactggatgtgtctgattatttatggtgttacttagttttttcctctattgccagtatttcctgtaaactgatttttttaagtcagaaacttgatgggattcaggtgaaatatttggagcaagattaattcttaggtgaatttgtcacagaagagtacttagatagttctttctggtcattggctttgctattctgtttttagcaatcattccaccttgtcaccttcctccctcttttgtctaattttacagtactgtaatggtaggtatgagaaggatgccctctcttcctaatagagtcaagtgttcatggtccttttgacaggtcttaaactaagagtgtttgtctctactgacatcagaagttgcaattatcagaaatcagaatcagctccagataaatcctaaaagagggctcatgtttttcctatggaccccaacagtatatgtttggatcagtttccagagacataacagtagttgttgtttaacttccagaatctatcaatagcatagatgaaaaaagtaatacttaaatattactgggattactaatattacagcattactaatacaatattggagcgatcgtaaatactgttcacaagtattggtaagagttcatttgtcctagaatagctcatccaggaatcagagaaaggaaattgttctaaattttgtattttatcccaagtccttgttcccatctggtgtgttattaatgaattagggctcactgtcattgtcagtaatatatttgtactaagagtgtttgttaacataaagcttaattcacagttgtgtgcacttaagtttccaggaaaaaaaaccaaaaaaacaaaaaaacaaaaacctcaggtccggagctacagcagagcagttacatatattattcagaaatataaataaataaaatgagaaaaacatttctaaatgatgtgcaagttgaaaggccttcctgatattgaaaaataaactgccatcattcagatataaatgaatcaaaggcatgttcttttccagtggctaatagtgtccattttttcagccgtctgcctcaccatcaccgtctgcaggtgaattggccagtgtttccgtgcagaatgttaaaacggcatctacatttctcactgctcctttgatgttatctccttcaactgcacaatgaaaacgcacagctactgaaatgccagagggaacacactctgattataaatgtgctggggtaaacaatgagagaaaacccacatccccatcatcgcgacgggctcctcacttagccaaatacaaccccacagttttctcccacccctcttgggacgatgaacacacagtattgtgaccccagctaatttgtgttaaccatacagtctatgaccttgtaatagaatgggacaattcaatccattatcttaaccaacatttattgagcatgtactgtgtgcttagacctgtgtgaccaactaatcctggtttacctgggacgttcccattttagtgctgaaaactcgtcaccctggaatcccctaagctgtggcaaataggactattagtcacttgacccatactggacactgtggataaagataaattacaaccctatttctgccaacaaaaagcatgttgtctaaaagagaatcagaaaaataagccaattattagagtttggagtgatcagtagttagaatcatcaagagggcatagcgcagcgcagaaagctgaatctaaatctaagctggggacccaagaacgcaccccgaagaagacaacgtttgagaataatttaaagaatgagtagtgcaacatccaccattaaattctgcacatactgaaaggagacacctgtggggcggcatgcaactttgttctttatctgagtctcaaaatctgtgtatctggtttagattcccataacgtggaggtaggattgtagtacaaaatcagaagaaagagaatgctcattcttagtttattttattatgggacagaataaacctgacagtatttcagtcctaaaggtcgtggtcattttctgaaccagatataaatataaaacatgtatttctttctctgaggattgttttgaaaagagtaagaatgagtggcctattgtgggcacgcctttaatggaggttagggcaccaaagtggacactacgtagaacaaataaaatgtgagaaattgtttttcacattttcacattttactttgaaaaaaaagtcaaacttaactgaaaattgcattttttgaaaaattttatactcttcatctagctttgccggatattaaaaagttgccacatttaccttttctctttttctttatacatctgtatatttattgttattcttgattattactgagctgttgtagagcaagttgtggaaattatacccctttcattttaaatcctctagcgtgtgtctcccaagagtacagtattctcctgtgttaccacagtatgattttatgtccaggaaatttaacactacataatactattatctaatagagagccagcatacaaattttgcccactatcacaataatgtcttttattggcaattatccttctgacctagcatttagtccagagccctctgctgcatttggctatcatgtctcttattcttcatctggaaggactcttcagctttttcttgtcttttatgatggacatttttgatgagtagaggccagctggttttcagaatgcccctgagtttcggtttgtctgatatgtcctcatgattagattcagattataaatttggggctgcctaagtgatgtgtccatcttgggacatcacatcaggaggaacaagtgaccaatttgtccccttgcttcatcacttgatgaaggtggcagcctgccaagtttccacactgtaaaattactagttttccttttgtaattaataaataatctgtgttactaggtactttgagattctgtaaatatcccattccccatcaaatgttgactcaacatttttttacgtctgtattcgtttgctaaggccgtcataacaaagtaccacaaactgagttacttaaaacaacagacatttactatcccacagttctggggctggaagtctgaaatcaaggtgtcggcggggttgggtccttctgagggctaggaggaaaggatcccttctagacctctctccttcgcttgtaaatgggcatcttcttcctgtgtctcttcatattttctttcctctgtgtgtgtctgtgtgctcaaatttcccctttttatcagcacatatcatattgagtgagggcccacccacatgacttcactttaacttctttagctctgtcatgaccctatctcaaaataaagtcacattctgaggtaccaagggttaggaatttaacacgttaaggggaggaaaagaattcaattcataacagatgcattccagccatctctggactttcccaatgttcattatgaagccaaaatgaaattaaattcctcttcctaccctttctgcaagtgaaaagtcagtgttcagcctgaagacacttaagatgctggcactaagcttttcctggccatccatccacagggctgtgaattttacacttacccgtatttagaatgacttctctttcagttctagagatttttaagagggtttggtttattgcttaccacccatgtgtgtgctctaagggcctgtcatttgcactagagcataagtaccagcagctgaattagtggcaatatttattttttgcagaaacaaggagtccattgggaaaagtatttatctcttggtgcatttgttttggtacagttgtctgacatgcaagcaaatgaattctagagactatacttggggtgttcacaatagggactctcagcaggagagggacccgaagccaggcgtgatgcttcgtaagtttttaattcaaaggattgaaggacagaaaagatggaaaacaaaaagccaattacctgagaactctcgtctagaggaggactgagggagaggaaaggaggctttcccgggcaataaaccctgcagtgcagtgtctctctcttaaaactgttaaagagttcctgctggtcatatcacaggttctataaccctcgcctgcgtacgtccttgtgtagaaatggggaaagcctgagcagaatactcacttgctttccttggtttcttgatcaggtcacagacataaaagagaaattgaagctctctaaaaaggtctggtcagcattaccctacactatctgcaaggacgagagcgtgacagcgggcacgtccaacgaggaggaatgctggaacgggcacagcaaagccaggtgagggtgactcgatgtgtgcatggatgggggcacagcacacccagccttggaagactctcctggcacaactctacaaacctgtttatgcaaaaagcaacagagggtggagggacaagtcatcacttagcaacagctgttgagagtgacaggtttgatgggcacctgggagcacttactcttaaggtgccattaagcgtggaatcctcattcagaatgtcttgcctctggatgaggacagaggaatggtggcagatgccaggtttcagataccctgagatcacaaagagccctttcatgttcacttaatggctttaagatactgaagttatttttatccatagttaaatttccagggctctttttttcatcaaaagttaaataggaaatgaaaattcaactgtttttttcactcttgttggaaaaaaaattgaagtgttcattggcaacgtaacagaaaatgtctgagggacactgagaaatggttctaataggcaacacactttgggaagtcccatcggaacctcctgacaagagacagcagttttcatcattctgctctgctgaccagtgctgtggggacttgatatggaatttctgaatttgttgattcagcccagaaacgggcttggcctggattttcatagggtggggaggctggatgggaggactggttgggagttggcaggcagggcaggacacgaggacaggaatctgccaaagccctcagcaatggggttgcaagcgggtaaagtagctggtaaattggactcaagggatctttgaggattgaccagtgggtggagatgctaagaggggagtctgttctggggcttgactgagcagtttcaagcatatgaagcagctgtgatcaaaaggaaacaagaaggtgtgtggttgccaggagcggtggctcacgcctgtaatcccaacactttggggggccaaggtgggaagatagcttgagcccaagagtttgaaaccagcctgagcaacattgtgaaaccatgtctctacaaaaataaatataaatctttggctattaatataaagtgcatggctattaagttgagaagaaactgcagaagttaagcaggaggtgcaagggaggtgcacgttaggtgttatttcttaccctgctgagttgcattttttagcatctgttgctttattagtccattctcatgctgctataaagaacttccctgagactgggtaatttataaaggaaagaggcttgattgacccacagttccctatagctggggaggcctcaggaaacttacaatcatggcagaagacaaaggcgaagcaggtgccttcctcacaaggtggcaggagagagaagtacaagtaaagggggaagaggcccttataaaagcaccacatctcatgagaactcactcactatcatgagaacagcatgagggaaaccacccccttgatccaaggtcctgttctcaacacatagggattatggggattgcaattcaagatgggaattggtggggacacagagccaaaccataccaattgctaatgacattattaaccataccaggaagagtttagcaaggtgaaagcaagatacctacacaaagagctctaaccatttcaaaatgctcaaaatatcaatatcaaatcatagatcatgagaaggaaattagttatgatattaacaacatgccactaaaaaatatttagcattttaccagtgtctggctttttagctaggagacctttggccagaaaattcagctatgaattaacagcttctagtgtgtattttcccgatgactgtacagaaagacactgtgaagaatggccagatggcctaatgaataaaatgcttggttttttgagcttctctgtttcccatctgtgtttacctttaagccttggctaacataaagcctgggttttgaactgctattcccacagattgtcacacaggttgctgatattagtccatatgcaatttcttacaaaaggaaatatttttttaaaaaaaggccatgggcgaagttaggggaagagactaaacactaccaagaatatgaatggggaatataaagaccactgaagttagagctggaggagatcaggatggcagacaagttcctcattgtgcagattaagaactcagacagggtaaacaattagtccactgttacccaatgaacaagggtgaaagctgggaatctcccaaatcctagcccagtattttttttatggcaataccctacctcttaagcaaacaacagctaaatactgtcctccccaagttaggagaacaaatgagacagatcctaagtgctataaaagcttcagtggttctacagcattcattgagtcagtccaccagtccatcagcagtatgattaagtactccctgtgtcccaggctctgtgcaaggccctgtagattaagtgctgtaagatggcaatgggaggccaaggcaggcagatcacctgaggtcaggagttcgagaccatcctagccaagatacagaaaccctgtctctactaaaaatacaaaaattagctgggtgtggtggcacatgcctgtagtcccagctacttaggaagctaaggcaggagaatcgcttgaacccaggaaaaggaggttgcagtgagccaagatcataccactgcactccagcctgggtgacagagtgagactccatctcaaaaaaaaaaaaaaatggcaatgggatcaatacctgaaaaggtacagtgactggggtgagcccagtgaacctggaaacatcagtaccctactgctagactgcaggtttaggaacggaccacactggtagagaaacacctggatcagtcctcaggaaaaagatttaaatttcatcctgagatcaatgggaagccattggaagattttatgcaggtgggaaaatgatccagtttaatgcaatgaaatcacttgtaggaatagtccagaatttggtccaataaaatatatcttttattatgcataagtatattattaaaagatgaagctgtcaaatatttgtgattcaaattatgtacccattgaacaattacaattccatggtttcctttagttcttttttttaattattccactagcagggaatcctaatattatatttttatatactagcatagtaaatggatcaccaataaagacttgctgaattaaatgtaattgaagctttcttcttatccaaatattaattcatctagaaaaacatcaaagaaatttttcacttaaatttactaaactattttgtaagaatccatttataatgcagataataacattttttcacacttttgaattatgagttttaagatgacaggtctttttaattgtttaggaatggttgttaaaaaaagaaaagaaaaagaaagaaaagttacttttatcacctatgtgaaataaaagaactagaaactttatttgtagaaaatctggccagaggcaatgactcacacctgtaatcccaacactttgagaagctgaggcaggaggatcacttgagctcaagagtttaagactagcctgggcagcctgtaatcccagcactttgggaggccaaggcgggcggatgatgaggtcagcagatcgagaccatcctggctaacatggtgaaaccccgtctctactaaaaaatacaaaaaattagctgggtgtggtggtgggtgcctgtagtcccagctactcgggaggctgaggcaggagaatggcatgagcctgggaggcagagcttgcagtgagcagagatcacaccactgcactccagcctgggcgagagagcaagactctgtctcaaaaaaaaaaaaagaaaagaaaagaaagaaagactagcctgggcaacatagtgagaccctgtctctacaaaaaatattaaagtagctaggcatggtggcaggcgcctataatcttaactactcagaaggctgaggcaggaggatcacttaagcccaggaatttgaggctgcagtaagctattattgtgccactgtactccagcctgagcaacagagtgagattctatctctaaaaaataaaaataaaaaataagaagaaataatttttttaaaaaatccatcacgtattaatagatatgaagcagagatgcttattagaactgatagagattgtcatgcctgaagtttataaactcaagcctgtgtgataggtctccaataaaccagacatttcttcctctctttctgttttatccatcagactctttcggccacatttttctgtttgtacccgctcctgcagccttttgtcctatctaagtgtttaatcaggcttgtcttccatcaccttatttttcctgattactttctgaatcttgctccatagctctctaccgtacttccttgattcagaaacatacctatttcaaatgttaacatttctgacatcaaaatgactcttacagtagatatgtctatttactccagtgattatcttattttttaaaaagctgttattaagtaatggcaccagttgaaattgatgatgacttcaaatagaacaggatacacagcagtatgggtgctgtggcagtctgcagggtgcaatctgcagtgttgagactgtggttaagggtgtgtaagcagtggctcccctaaggtttgaacccactttcatccccctgctcccccaagtcactccaccctcacccatctctgacagatctcactctgcctctgtagctcaacaggtctgcaacaggaggcagggtaagaggagactctgccctttgatgggaggaaattgcaagtgtgcccaatcacagtgacctgatcagcatttaaattttcattctgaaaacaagaatgggttaaacaaagtggttaagggaatgtcttccctgcttcctctttctcctgggacaatgtgaagatcaatgagataatctcaatacaaatagtttgtaatcctaaaacagtgcttctcaaactttagggtgcaggctaaactcttggagatcttattaaaatgcagattctgattcagtaagtgctatggattgactgtttgtgtcccccgaaaattcatagttgaaatcctcaccccttgtgcaatcatctttggaggtggggactttgggagataattaggtcttgagggtgcagccctcattaatgggattactacccttgtaagaggagacatgagtttctctctctctctctctctctctctctctctctctgccgtgtgaggacacaacaaggcagccatcagcaaactaggaagagagccctaatcagacacaggatatgccagcaccttggtcttggacaccatggtcccaagaattgtgagaaataaatgtgcattgtttaaactgcccagtctgtgggatttttgtcatagaagcccaagctaagacggtaagtctagggtagaacctgagtgagattcagcatttctaacaagcttttaggtgatgcagttattgttgatccagggaccacttggagtagcaaggcttgaaggcaggattgccagatctagcacataaagataatagacaacaaatggaacacacttatactaaaaaaaggattcgttgttcacctgaaattcacatttaattggcaaccatgtgttttatctggtgttttaaatgtccctattaacatgtaagatattacctttttcagtccacacacaagcctcagggagcatgttgcaattttgggggtttcttcactgatacccttgatgtttcctttaatggggcttttcttatattaaaaataacaacagcaatatgagctaggagttcacgtcgttcaattataacatcacccactaatgatagacaggttatggacaaggttgaagtcttctcaacaatgaattgcataggcttcacatgtgcatcaggagagaattttaagttagaaatacagcacagccttcgcaatgcagaatatcatccacacaaacctctggtctttaatagtgccattttgatacatggcaaggatgaatactttgtatctttggtcagcattttattcaattagtgtcttagctcaaaaaataccacagatataatagactaaacaacagaaatttatttctcatagttctagaggctgggaagtccaagatcagggtgccggcagattgggttctcttcctggcttatagacaatggcctccttactgtagccttagagagacagagagtcctggttcctttctcttataagggagctagtatgagaaatcatctaccctcatgatctcattcaaccgtaagagggtacctaagaggtaccaaaggccctatctccaggtaccatcacactggggattagggcttcaacatgtggattttggtggcacacagacattgtgttcagaatcacatcctacttatcagaagagctaatacaggatttttcttagagttcatggcaatgtctgtcacttgagaaagacagcctagtcgtcttcagtgaccagcaggagcaagtgtaatttctactccttctatttttcacttacctaagcaacttctcaggggtaaatgtgagaagacacagcaacattctgactccactcagacaaataggaactgaaaggaagctagtaagttacagaggaaaatcgataataatctagaaggccaaagggaaaaaaattaaagactcatggtgcaggttacaaatctaggcctcccaaagttcctggggtgaactgagagaccctaggaggacatttgcagtcatcagtcatccctgagaagggcgttctgggcagtcggtggccataatgagctgtctgtacagaagctagaaaagaatgattagataggaggcaggaaagcataggcttggagggaaataaagcttttatatggttagcatatacaggttagaactttgtcaggcagcagcaaaagaaaaaataaagccctaatggtgttcaaataggcccttacctttttgctcataaagaggcagattcttgcttttttagaacatagccatgttaaactgcatcacctctaacttcttgtagcattgttttctcttcacgcagaccctttttccaaactcagagggattaaaaagaaaaggagagtatgacagacaatgagacagggcaggaaaaatgaaagccagtctgagagccaagtcccactggcacacatgttatctgataggacataaattatttcagagccttcagaggtcttgagtcagtcatttccagactcctccctctcccccataaaactgacaaaacagctttctgacgttgctccttgtaaggcagtgttgagctttcactgtgtcctttctttaaaatgctttctgggaggaggctatcaaggagctggctgagggacaaaattaatcggacccgttggaaacatggcttttgcagggagcccctgctgtttttcaaggcacctgatcctgacagaaatattgtgtccccaaggaaatccttcccaaggccaagaggtaaacacagtaaattgtaagaaataggaaaagtagaaaaatctagaaaatagatcagtcactctcatcacagagtgtgggttgactaaccaacgaaaacagcaagtcatgactgggtaagtctaaacagatggaaggagatggaatgatgcacgatgatggcaaatctgtcaaagatagtgacttggccgtcttgaggacaatattgttttaacctaattgtggggtgtggcccaaagcactctaactgcattttaaagaactgtaaaatatccaatatataccaagtcaaacaccttggaaaggtgggtgtattcatccgttctcacactgctataaagaaataactgagagtgggtaacttataaagaaaagaggtttaattgtctcacagttccacaggctgtataggaagcatggctggggaggcctcaggaaacttacaaccatggtggaaggcgaagggaaagcagacatgtcttacatggctggagcaggaggaagagagggaagggggtggtgccacacaattttaaacaaccagctctcgagagaaatctatcatgagaacaacaccaaaggggaaacccacccccatgatccaatcacctcccaccatcacccatctccaacattggagattaaaatttgacatgagatttgaacacaaatccaaaccatatcagtgggaattctgtcttaggaaagaactggctactgtcaagccaggtgttctaaaatgcccacttcccttcttcagacacacttgaagagagaggaccccataaagtcttcctgactgtcctggcagggaggaagctgtgtgaacctcttgcaaatgggaaaaaaaaaataaatgttaggcagagctggctgcaaataggaagaagggagcatgtttcttgttcacaacatggcattcctgaaaactggctcgtgagtctttttttcctttctggtctgtagtttgctaactgcaggtctactaagaaagaatgggtttggggagttcctgccaatgaattaagaggccaagtcaaagaattttgctcctgcttactgctgcaatcaatgagctatgtgttctccaaaagcatccccaaaccatttcctgcctcacattctccaactggaaaagagccacagcaaattctttttctgaacatgaattcaggctttaaaatttcagattctgctaccgtcatccactcacaagaaattagtttggcaatttggggagccatgttaacaacttaattttcataagactacattaaaattgcataattatataaagtagctaaatgacttgtccatggtcacactgcggggtcccagagagatcacaggtgacccagtcatacatagcccttatgcgcttaaccgtattttgatgtcagatctcatgaagtcccctagtgcctcagacaaccctagcttaatgatcttcaagaatttataattacacttaaagcagaaggtcacagtttacgttgaataatccaactttccatccaagaaaaatggaaagggaaaaaagtaattcttatcaagaactttagtaaagttataactaaaacttgaatttttaacattgtggtgaaatataccaaacataaaaacatgtaccattgtacgatgaatagttttgtggcattaagtgcagtcacgtggttgtgcaaccatcatcaccatccatccacagaacttttttatcttcctaaactgaaactctgtacccattaaacataaattccctcccctctacccccaggccctgctgaccaccattctattttctgtctctttgaatttgcctattttaggtacctcatataagtggaatcataaaatatttgtccttttgtgactgtcttatttcacttactataatgtcctcaaggttcatctatgtggtatcacatgtcaattttcttcctttctaaggctgaattatatttccactctatgtgtataccatattttatttctccattcatccataaatggacacctttcaccttttggttattatgaatggtactgtgagcagaggtatataaatatctgctcaagtccttgcctttcattctttgggatatcccaaagatatctgtatacttctcttcacagtaccattattcatgtatataataatgagatttgaaagccaatagttctgagaaataaggcactagcaaggaaggttagcctggtggtgcttagtaggggtgtcatgaatccaagtagcagctgtaataataatatatgtattattcatatatataataataatggtactatgaacattggttcttggtacttggggtgtgtatatatgcaattgctggatcatatggtaattctatttttaatttttttttttttttttttttttttttttggagatggagtttagctcttgtggcccaggctggagtgcaatggccgtgatctcagctcaccacaacctccgcatcccaggttcaagtgattctcctgtctcagcctcccaagtagctggaattacaggcatgcgccaccacgcgtggctaattttgtatttttagtagagatggggtttctccatgttggtcaggctggtctcgaactctcgacctcaggtgatccaccctcttggtcaggctggtctcgaactctcgacctcaggtgatccaccctcttggtcaggctggtctcgaactctcgacctcaggtgatccaccctcttggtcaggctggtctcgaactctcgacctcaggtgatccaccctcttggtcaggctggtctcgaactctcgacctcaggtgatccaccctcctcggcctcccaaagtgctgggattataggtgtgagccactgcacccggccctgtttttaattttttgaggaattgccatgcagttttctgcagcaactacaccatgtcacattcccaagagcagtgcacagggttccaatctctccacatttttaccaacacttgttattttttgtttgtttattttaaattatagccatcctaatatgtgggaagtttaaaacttagatttttaagaaatcttctagaagaggttgctgatagcataggcttgtagtcccttatttgagacccttgaaaccacatgtgtttcagaatccataacttcttagatttcagaaaatgaccacagtgaatatgctatatattacatcgtatctccagtggggtctggggttgcaatccacaatcaaacatattagtatttctgcagcaaaatgtattaaaattcacactgagtgagataaatgaggactataattaaccttgtttcagacgagatgaagttttgctaacaagcagattgaaggaaaaaatggggggtcttgaattttggcactgcacatagggatttacatctacttagatgagtaaaactcttaagcctgcttaacatgaatgaataggtagcttagaatttgaagagatgtgtattgagtggagctcatttgtggcaacaaacagtactgaaattgctttcgctttacccttctcattgtgccttgaggcagtagcagtcaggggaagaatcatgcacctgagaagaagcccagaccggcacccaagctccccatttctccccattcctcccttagctcctacttggattcatgacacccccaccaagcaccaccaggctaaccttccttgctagtgcctcacttctcagacctactggcttttaaatttcattaaatcttgagagtcatgtgacctactcccccaatatgcagtgccttacatcaaaacagctaccagcattaacgtgatgatgagaaatactaagcacattcacatatcaacagggtctttctggaagcattggtttaactgtcaggagtgatgttgaatgttgagaatagcgggggctgtggttggctgctgggaaacttctgtggggatggtcctgtttaatatctctcagatgacaagaactgtcaattctacccacagggctggatgtatcagccctctcacccccaaatttccataggactcttctaccctaatcggttctaatgtttggatgtagtcaaggacactcacatttataatatgcagttagatgcaaagaaaaataattctgtaaaactgccaaagatttagttcctagccatgctcttccagaacagaaggcaaccaaaatgaggaagctgtgcttggctgttcatgaatgccacccacttgcccagggcaagccgcattggcaaaccatgacatccctgctcaactctccaggttgtcctcacttctggcttctcccaaggctggatccaccaggtaaacttgcatccagccttggaacatgggctctctgtgccaaaattctccttctatgtctcccagggatatgatggtgcaaaaacaggatgctgtcatgtcaaaaaactgtgcaaaacccaataaaaggaataacattgtgggctcaaagacatatctattcttgcaggacaggagtgttatgtaaagaaaccaaatgtgagagggaagaaataaatgggctcatgaggtcctcatgctgagtggggctttcacagaccctttccgggggtcgcacaatggacatctatagatttagattcaggacttacctctggagtgacaaaatgaccatttttattttcagctattttaggtttaagttttcacaatgtctccaaagtcatcttttgaatacaccaaaaggagaaaaggctcttgaggatacggatgcgctgttacttgtttttattgtaagcagctgagcatcagtaggcacagttagaggctgggtttacttggcagtctcttattgttcctggatgttcagactcccaggggtagcattcccatgtaagctattgcagtgagcttctgataaatgactctcagctaaccatgcagtgcacacagcatctgaaagaaacaaagctcgcctctgactcagcataggtacaactgcaggagtcatttcccaaaatgtagaggagcaatgccagaatcgaccatcacctctcagctctggtgtcagcaaaagatgggctgcacctgctattgtttattccaataggctgtaataattaggtagagctcacggagcctggctcatataattgcctgtcagtaatagtcaatccaatggcatattttagaagttacatcaggaaaacagtctcaggatcaaacaggaatttatttgcatatgagatatagtaaaaggcaggacagaagttatgctttatggcaaaagaaagagatatgagtccacggcttttaaaattttctatgaggccattttttagagcagtaaatacttaaagcttcatggaaaagaatttacaatgcactctgtgtgttttattattcattatttagtgagcattgtgaagtcgattttgttcaagatatggatgaagacatggagcttattcatgggacctctgatttaaaatgagtaaaccaattcatacacaaacacatcaagcatagattcaatacctgaaaaatagcttaaataccaaagtttctctgtgtagttcttcttttggaggttgatggatagagcttttggtttccagaacttggaaaatcacttgcaggaagggaagaatttcaagcatatggatattatgcaagaatatgtagataggaataataaaatagaggaaaagatgttttttgagctttcaagcaacaacagtagagcaagtaaaagaataacagtaatggcaattaggtagggctgtcccaggcctgtagagggccagagctggatgtcctgattccctgtcagacccaatcttcatcaatccactgtggccctggccctccaggaccctctacaagctatatcatctgggctcccttgcccaccagcttccagttggatcagccaatgggaggcagcagctggaggtcaagaggcgggactaaaggggtcagggcatcctgccccggtcccctccctgataggtcttggtttggcagttactgtgtctttgggtgcctctctgtggtatcagttcttgttcattccactaacaacttcttccctttatcccctggggccccctctcctgtggccagccccagggcgcttcacctctctgggctggtttcctttaacttgtccacacgtttataaatagcgtcttctttaaactctctttattacccctttgagtgtgctgtctgtttcttaccaggacacagacaaatatagcaccttggtaggaattagaaaaacgcacccagatgggtgcatgggggttcattatgttattgtctttactttaacatgtattgaagttttctaaaataaaaagagtaccaaaaagaaaagaataaaggcacgtcttttggtggatggtgccctgcaggggtgtagcttggtgaccacagaagtgaggctggatttcagcaccaactcactcctgcagcttcaaggggtgagtttgtgcagtgcacgaaatgcccaaccaaacctggcccccttacaaaagggtgggcagatccctgaaagctgggaaatatcttgaggagaaagtgaggataggcctgggtctttaagggtatttgggacttaaatgggaaattgcactatgcaaggaaaacctgtaggacaggaaggcatgggatggctacagtgagttgactctataagacaaggagggtccctggagagagtatgagaaattagaagtgggtggagaccctttgattgctgagctataacatgtgaattctagttgatgatcctccaggcagtctggggcagtgtttttgcactggggctccagagctagactgggagtaagtcatggttttgccagctattagctctgtgactttgcacatttgcttattctcactaagcctcagttttctgtttcataaaacaaggataaaatactccccatctcctagatttgctgttgggctgaatttaaagatgtgcgtcaaatgttttactgcagtgcctggtagttattggacattagctactatcctcaaaagtttttaaagagaagggtgatatgatgaaagcaatattttttgaaaactaatcatacagcatgtgcaggatgctctagagaggaaagaagggcattggggaggtcactttgaggctacaggggggtgtctctccagtgagagaaatgggaaatgggaaaatagaagcaagcataagaagctctgtgagaagaggaagaggactggaagatggacagattgtgagagtaaggagtcagagagggccccaagcacatttccaagatctttagcctccacttatataaatacccctaggcagcttaggcagctcacattgaaggactgacaattttgacattttggtacaagggaaagaaatgtgaaactcagaatcatttgattttacccttctgttttactgaacattggtaaatctacctaatcgaacccaagattctattacaaaataaaaaccctaatagacacctcaatcattccagtaaccactgcttacttctgaaatgtccccaaagcaggtttttcatatccagaatttcttctgattaagatctgaggtagggcctctgcagttgagaatgggcatcctcacagagaactctcttgaatcatatgtaatttataagcccagttcttactaccaaaattagcagaactgaggaaggcattgaatccttgacctaagctaacatttgggatggagggaggaaagagtcattaatgttaagtagtggtgatgtggtttggctgtgtcccctcccaaatcccatcttgacttgtagttccataatccccaagtgtcatgagagggaactggtgggaggtaattgaatcatgggggctgttaccccatgctgctgttctcatgatagtgagttctcacaacatctgatggttttataaggggcatttcccccttttacttggcacttctcttgcctgccaccatgtgagatgtgcctttgctcctcttccaccatgattgtgaggtctctccagctatgtggaactgtgaatctattaaacctctttttctttctaaattacccagtctcaggtatgtatgtttcagtgtgagaacagactaatacaagtggtttcttataggtccccaatttcgcatttatctgtaggcagacctacctaagaactcagtgccatttaaaaaaaaaaaaaaaactagtctgaggctattttagccacatcttcatctgaaaaaatgtattccatgttttcactatttggcattttttttccaggaactagatccagtttttgccaggtgtcttggctgactgtcagagacagtcatctggttttgcatggcagcatctggttttacagtttctgtggcatctccctgaggtgttctctcactctctgccttgcagatacttgcctgagatcatgaatgatgggctcaccaaccagatcaacaatcccgaggtggatgtggacatcactcggcctgacactttcatcagacagcagattatggctctccgtgtgatgaccaacaaactaaaaaacgcctacaatggcaatgatgtcaatttccaggacacaagtaagaaaatccttcccagcaccagaaattttcaaagtaaaaaatggttttagaagatgatgccctgactttcttcaagagcaatatgcccttttaatttattctcattcttcctcaggctgtgattcttgttatagtcttttggacagagagctctgatccacaaaacataggatacgaataaaatcataaattccacaacacaaggaataattgcaatggattacattcagccataccaaagctgaaattgagtttcatctaccagttgattcattaatgacaaaacagcaaagtaattttttcactttctcctgtcctcatcactattcacatctgacccaaacttctgccctgttcccaccaaaagaagaaagctcagcagattgcttagacaagcctaagctagaatccctgtcttattctttattaattagagtctctacaaattactctacttcttgagtctcaggttcctcttctatagaatgggaagcatccctgcttcagaggcttttagaagcctcatttgaggagctatgatagtgtctggtgggtagatgtagctgactacatcatttccctctctatccagctatgcacatacacaacccatagacatttatatctgaaatattgagagaaattgtaaaattctagtgcaatattacacacgactatttcattaaggatcaaagaagcatcaaaaattatttggaagactattaagtgaacattgacatgaaactatatatgggttttgtctgagtagtttcaagatgactaactacaaaaaaagagttttttctgtcattgttgcttgttgctttttaaaaatattacccttacaaagagaattcccaggacaaggattcttgaacataagatgtgaagttgccagtgattctgtaatttggtcactgaatcataagatgatgcttgtgtgcttggattaatgagatagaaagaaataagttacagatagaagacctcaagtcatttcagtcatagttatcagcctaccaagttatcccctgcaaaaaatttttgtgctttattccattttaaagaactcaaaaaaatgattttctaaacacagaataattaccaacccaatggacgttatggctgtaaaattcctcaaaataatcccattatctctcctccttttactaaacccctcctttcctcttcagaagagaacattacacaggtttcagccattgttgcttcacccttgttagcacttagcctcacacctctcattttatccattgtcttctgtattaaataaagtgctctatcatctagagagtggctgttggaatgaataattcaagatacataagaattagttggtttggctttgttgcttctcactcctctctgacctaaagaggttatgcacatatcaagctgcaaagctcagggaatggccaggaggcagagatcttactccatttcccctcaaaagaaaataaaatcaacaattaagaggatccctgagttctaacccaagcaccaaatgtggccctctattttaggctggtgtctgtcatacaaaccattatcacatcttataagcatcagcatccttattgctttgaacatttttttaagttactcatcccaccccttaatatttgcatttgtgattccttttcaaaaagagatggggccattattttttccagccaaaatctcctgtcatatttgcttcccacattttttaatattctaaatcattttaataatatctctgtaaaggttgtattacttcttgttcatgacaccagtgttcagaacaattcccttagcaattctgatatctctgaatttaattaacaggaattttcccccttgtaaaggccactaaaggtaaatcagagaaaatgttgaaaacctagtatagtgtattgaagtgatcttatctggtatttagatgtcccattaaaaaaagaaactgtgctcattctctaattgtgtctttctcattcaagaggacattagaagagtccctacactgccccagatttacttaagtagcatccagcagctaaggatggccctggtttctcaggagcagctcaacagagcatcaccacttcggactagcagggaggagtttagggacattggttggaaatcattgagcaagtgagagaaatagctaatgtccttacaaagcttccagtttcctgagcccttccaggaacatcatttctcctaacagatagatgttattactctcatttttacgggtgaggaaacggagcctcagtaagtctaactggcttaccctggtgcatttaaataacaaatgtcagggtacattccaggtcgcctttgctgtaggaaccatgttttttccatcaggcatcattggcagcactgggtttggtgtcctcgagcactctagtgatttgtcttcacacactctctccaaggtcaatattgtcatctgtatttgtttaagtgaggaaactgcaaaagttgagtaactgcccaaagcacatttatttattcagcaagtatttgttgagcacttgctgtatgccaggggccactgaagaccttagaggtacagaaatgaacaggatttaccaaatctctaccctctcaaagattatgtcctcagttaacattcttgagaaggagataaacagtaagcaagtgaacaggcacgtaaataataccacctccaagcggtgaaaagtactttcataaagctagtaattggcagcctgatctgggccaggtttgagtgacaggatttgtcaaacaagaaggaatcaagccttgagaagtggaaatagggaagaaagcaagttgggcaggaagggacgatgctaccctgggtcgacatactctgtgggtaccaaggccttggtttcaagcagagaatggccaactgtttctgtcaagggccgtatattaaatatgttaatctttgagggccacatcgtctctgccaccactaccccacactgctggtctaacgtgataatatgtatgtgaacgggtagttggattctaataaaacttcatatatggatgctgaaatgtgaatttcacatacactttttacatgtcataaaatattcttcacttgatttttttcaaacacttaaaactataaaaaccaccaggtacagaggcacatgcctatagtcccagctacttaggaggctaaggcaggaagatcacttaggcccaggagtttggggctgcagtgagttatgatggcgccactacactccagcctgggcaacagagccagaccctatgattgattgattgattgatagatagatagatagatagatagataatagactttatggatatctataaaatatatacttttatgtaaataaaccattttggagttatggaccatacaaaagcaagcagcaggtcatagtttgtcaacttctggtttaaagggacaagctggctgggacagagtccagccttgctctcaggagaacacaggtggggaaaaggtggacaaaagtcatattgatagagacctctcactactattgctgctgctcctctcatttcctatttgtagaacttgttttcctctatttttcttttaaaatcctttaaaaagcatggtatcttcctagagcaatggctctgagtataaaaagagcaaagaatggaatttcttaaacttaagtactggccagaagaaatgtctaaggccaacatggtaggtgtggcctccccttgagtctggggttcacacattccttgggttgcataactcaggtatcagttgatattgttcttcaaacacctatttctgtacagtccacccactcatcacaccactgcctattaaaaacaatcctgttgggtagggtgggggaccatggatggggagattttgcctcccaccaccatgccccatatctgctgagctctgtttccactctttcctggttggttgtattagtccgttttcatactgctataaagaactgcccgagactgggtaatttataaaggaaagtggttaattaactcacagttcagcatggctggggaggcctcaggaaaattacaatcatggtggaaggcgaaggggaagcaaaagaccttcttcacaaggtgacaggaaagagaagtgccaagccgtgggggaagagccccttaaaaaaccatcagatctcgtgagaactcactcactatcacgagaacaggatgggggaaaccaccaccatgattgaattacctccacatggcctctcccctgacaggtggggattatggggattacaattcaagatgagatttgggtggggccacaaagcctaaacatatcagtggtctaactttctttttcaatctttccacactaggtgatgaatccagtggctcagggagtggcagtgggtgcatggatgacgtgtgtcccacggagtttgagtttgtcaccacagaggcccccgcagtggatcccgaccggagagaggtggactcttctgcagcccagcgtggccactccctgctctcctggtctctcacctgcattgtcctggcactgcagagactgtgcagataatcttgggtttttggtcagatgaaactgcattttagctatctgaatggccaactcacttcttttcttacactcttggacaatggaccatgccacaaaaacttaccgttttctatgagaagagagcagtaatgcaatctgcctccctttttgttttcccaaagagtaccgggtgccagactgaactgcttcctctttccttcagctatctgtggggaccttgtttattctagagagaattcttactcaaatttttcgtaccaggagattttcttaccttcatttgcttttatgctgcagaagtaaaggaatctcacgttgtgagggttttttttttctcatttaaaataaaaaaggaagaaagaaaataattttccttgtaaaatcgggccaaaccccaagacagctacattttcaacaaaaaagcaaacagagaaaaataaatgaactttaacactgtaagttcagcattgacagccaacttccagtgtaagcttttttgtgacaaatccgggtttaaaaatgcttatggggagaaagcttaaagtttgttctaaatgtagtgaaaatgcactgttgtcttggaggtatcatcttgcactctaaccaaacaacaccaaattaatctggaggtactgatactaaatttggaatcccgtctttaatatgagaacacaaattactacaactcagtacctctgtcttactctgcccaatttcaatttagtaatggcaccattattcttaattcccttaatgtctgtccgctgtatccaattggcacagattttccccttcatcttcaattactagtagctacccccatcaattcaccttcctcaagagtctcaattgaaaataatctttgatgatacaatctctgcttttgccacaggtttgacattaactagacgtttctgcccctgtgctcattaccctcccaaaacaatagtttttttaatgaattgaaacacaattagatccattcctgagttttcatttttaactatttactttgtgtcagttggtttctgcatcacaagggcattctcttacaaaacaactcacaacagaaaaaaaaagtcaagacaaaaaatatatatatatagtattgacatggagatttctttcacttttttagtcttagtatgatcatctatttttatatctatgtatatataaatcacagattttaacttcttaattccaagctcagggttgacacacctttgtaagaaaatgttttgtcaaccagctcttcttgttttgtgctgctcaaagaagggattcctcagtgatcggtgagcaccaagaatcaagaaagagaactttttatgtatctaactgtccatttattaaaaatttgccagggcacacccttctgcatgagtgtgcttcagcctgggtgctccagactacaccaaactcatgggatgagccattggtgtgcagggctttaccggtgatggaaactgtatgtgtaaagaatgttattcatgaaaaaccattgctttcatgtaaaacaccttcggcctaggattcctgcctggcacttggatacattacctaactcaataggccagtttagagccacagcctaacctgttcaccaagtaggccaaagccaggcctttcgctccccctgacagagagaagcaaaataaacccaactgggggctttatgaatacagttggctatccatatgtttcttagtttttatgatgcatctggagtagggaaaagtaatgtttcaagacaccatagtaggccagttacattttaattaactcatcgacagtattgacacgtaaatggtatttttcaatctgttctcatcaaaattaaaattagttattgatttagtcatcacatttaagtagaacacatgtggcacaatagtattaagtatatttgagcacttttgcaagacagaaagtatttacaagcatctattgctactttatgcctaatgaaatataaaatgtaggatgatgagagactttgtggcattctttcatttaaacctttatgaaattaaccatctagttcatcattacatactcctagaaaaccatccatttcactgcccacattttggcttcctaccacaaattccacataagacttctctatgaaggaccagtcatttacattgctcatttcattctgtgttcagaagtcagtattgtctttctccaataattaaggtgcaatacaaattaaatcaaccttgattttccagactatttgaataataacttgcttttatggctttaaactccaggtctttcctttttaaaatatttctgcattctcttttatgaactagatcaggatgccttgtttttcctgtgctttcacccccaaaaggttttgtgcatgtgtatgaatacacataatattagtgaatgtgaacccatgttctatacgcactaaacacacagttaatatataaacgcctgcttcatttgtttcaacaccttcattatcaatatgattcatattgatgagatatagtgatgcataatgagccaggcagagagctgaaatgatatcagttaatgatgtcacagtgttagcaccctgcatggatgtggtcaaaatatcattcaagttgtacttcctagtttttatcatcatactactatgtcatatgattttcagactaatttaacatgagaaatgttttggccctaaaggatttcacttaacctagttaccctatttcagtaagtattttggaattcaaccctcgaattattttttctcatttcagcatagtgataggggatgcaatgaggcttcattattttttatgacctgcccctcatttgctctgatgttccctaaattctgtaatcatatcataacttttgttatgaatagagaggaatgggctcactgaaacctgacactagaaattggtgggtgatgctcataactgcaaacacttagcttattgaagtgcctctatttacatgttctttagttataatatgtatttttctaacagaaatacacgtctgtaattggtatatattatactttgtatgtgtcacaacaaaagctaaacagaggctaaagtctttagcagagaagaatgaattacaaatttaccaataagagctctgtttatggttctgtattgaaggacaaccatgacaaccttctgtcattttcacgaaggccaagttggtactttgattatagccatcgtagaacattagcactagaaatctgtctcccttacaatgacttacctagctagcatcaagtaacttgtatcacctgctttaaatgtaagggatagaaaatactattttgtctacactgaaaaacattattattcattgataagtagtaataattataaaagtaacattctttaaagcaaacacattgaaaatattattacaggcagaaccctgatttttaatttatattccctgctgcagacattagccttctttaattcttttgccattacatacatgtttcggctacagactgaacacgaactaaagtccctaaggaggaaaaaaccttaacatattcctgagatgtgattcttttattacttctttttgcaaagctaattatcaaatgatttgattaaacctagacgcattaggaaatgcaagttttacctaaaacttgcagaaatttaaacacatttccatttacttactaacgaacagacctgatttttatttaaaaacacaatttagctttgccaacagaagagtaaaggaaaccataacttataaatttgtaatgtgttcctccttgttggagacattagccagtgtttagttttagaccaacttatacaaagagagtattgatttgtacacattctggagacttgctatatcatggtttgctatggcacagactcagcttagcatggggacattttgaacttcattcaaagttgagtagttactggaacctttgacattgccttgtaatgaggtacttccaaaaaaagacccctaacaatggcataatagtgaggtctctctgtgcatatacataatatatatgcaggataaatgtgtgcaccaatcaaatctaaaattttatgtgactgtcaaatgaatattatttgggttaagatttttcatttctgatttggatagaaaattgctattaatcttgtattaaaatagtttttaaaaatctaccagtgccctttctgcattttcttaattattgtcatagtctaaatttcagagccatggaattttttgtgtttgagacatttttagaagcttcaatattaaaaaacaacaacaaacctcgtatattaaaacagtgccactctcctaagtacactcagcatctgaaatcaggaactatttgaactttagaacatttagagcttcccaaatgtgtatggaaaatactgtagcgctgttcttttgtactgatttcttctcagaggataaatttagtgacttgaaaactgatgtcaatactttataaatgaggtcagaaaataagatcaaatgtgaaaagactaataatttcccaatttagccaattgcattgatttttatacttctgaaatgtttccatcctctcaggcatgctaaatattgtataacctgctaaagatttatttcacaaatgcttattgaactcttattctctataaaccctgctctaggggatttatcactggctgtgaaaaaccaccagttgaaaattattcattccttaatgcagctaatcataattattacagataaataatgtatttcaagaatgatcttataaataaaggaacccatacaaacaaaggtaccaagaatacagcatttaactgtaagaaatactgtgatttagctcacattattactattttggtttttattgagaaaagtgactattacaaaacaattaaggaatgttagaataattccatctataagatcaaaatataacaaattttatttggaagcaacagaaaccaatttattgggcaggaaaaacatccaagtgtttttcatccaaatgaaaccagacacttttatcaggtaacaacaatatttattttaatttgctctttggataagtggacagggatatagttaaagtatatgcacaaatgtggtaacagaattacattgatttaaaaaatccaacttgtaaaacagtggcaatgagggataaagtgtttttgtatcttgagagctagaaacatgcaggcacaaatttaagtctgtttaaatagacgttgacaactgacttagtgcagacacatttccattccatagacatatttctttgctggtgtaaacatgtggccaaacatattttgctggctcataaatagggcatgcaacaaagccaggaggaattagatgcctgcctttatagcctgcttaaggagcgcaagctcatgtataccttgaagcataaagcaaaacgagaaattgggaaaatgggacttttaccctgtgaatgctcaagtttggagagaaggtgaaagaaggattacaaactggattcaagagagcagaagaatatttaccttgactaaagccaccttccctttaataagaacaagcatctgtggatttttttaattaaaacaaaattactgacctcagcaattattcactttttcaaaagatatataatgagaaatcatcccatgccaaacagttctgggtgcaagagcaagacactaaaatttccgccctctccctttagtgaggaagagacagacaacatgtaagccaataaatgaacacgaagattcagaaagtgaaaggcgccatgaaggaatgaaacaggaaatgggatagcgaccaggaaggaaactctcctttaggttagtggtccaggagagcctggggtgatggagctgtgatgaatgacagggaaagagacaaccatgagcagagccggggatagaaatttccaagcagagaaagtgcaaatgcagagatctcagttcaggaatgacctgtacttcagcgtgactgcagtgaggtgctgagcggtgagatgactgaagagctgactttgggaattatccactttttttcaaaagatagataatgagaaattatcgcatgccaaacatggtcctgggtgcaagagcaagacgctaaaattggggcagccatgttaagcctaatggccaaagctatggtcttatcccctggtgaagccagaaccctcgtgggacacagcagccctgctggtcgcactcactaacattttttttttgcggggggtgggtggggcagacggagtctcgttctgctggagtctctcgctctgtcgccca

SEQ ID NO: 236 - DNA, 233022 bp, Homo sapiens
  source 1..233022: mol_type = genomic DNA
atcatatatatttaaggtgtgcagcatgatgttttgatatacaaagtgaaatgattaccacagtcaagcaaagtaaggtgtctgtcatcttccacagtgactttttgtgtgtgttgcacctaaaatggactctctctgcaaattttcaatctacattgcaacattattaactgttgtcctgtggctgtatgataaatctgtagacttattcattttgtcctttgacctacatgtccccatttcctctccctcccaggccttggtaaccacctttctactctttgtttctatgtatttaactttattttatattccacatctgagtaagaccttgctctcactcactcttttatggccttggggaagcataggtcctccagacagcagaattgcttcatctttaaaatgattgcatcgatgtggcgattgggataattcagagatgttttcagcacagagggcttgtgctaggcccctagaatgtacagataaaggggatccatgttcttcctttgaggcagaggttctgactttgactttgccactccctggcaaggggcatttagcaatgtctggagacatttggctgtccctatggatgtgtgtatgcaggtgctaaacatcctagaacgcataaggcagccttcctcccccttcattgctcattccctctgattgtggaattaaaagacgaaaatgggtccattcgagggaaaaggtcatgatccttaatgctgtttttacatgacggccttgtcagagccttcagctcctcctgctgtcttcgacgttctaggcacagctccctccggagggcatgcttcccacctggggcttgctggcggagtgccatcctcatccatatacatgtccccaattaaaagacgtcccgctgccgggaaagcggctgcaccttggagcgaaactgaaagaagagaccccggggtcttcgcgtccctccgtgggaaggcgaggcagggccctgcgcagaacaccggcaggctctggggaaaggcagggattctatagtgaatcctgcaagcctgcttggggccgacttcctggagcagcggctgcaagcagcgcagagcccagctgtccttggcaaacaccccacagaggaggcgagggcttgctggctcctctgggacgccccggtcaagccaccaccaaacgggccgtgacctcgccttcgaagggggcccccagggcagcggtggacgtgggggcagtgcgggcgagaggaagtttgtctttctcccagctcgggagggtcgccagcttccccggggctgcacctccttgggacgcttgtcgggttggagcgccgcagctgcctctgcggctgccgcctgggtgacggagggtggggcgggggtgggtcgctcgtagctcgagagccacgatctgatttcagggaccgtgcctatgtgctgagtcaaaccccgccgctgggctgggtctgcagccgggccgctgagcacaatccgctgtggttaatgattaatcgctgaccaccccgcctcccgcagctcgggagagggtgctctgggaatgtggaccggggctctcaagtgccggcagctggaaaggaagaggagtgctgcgaggcggagtgcgccctcggcgaagaggggcagaggcggagcgccaggtgctgcggtctcactcccagccagccaggagtttagaacgttcttcctccgccctctccccgcctcgccccagccacatacactcccaaacctcaacacccaggcgcctcctgggcctctcctaggttgggctgctccagcaagtttccatgaaagcacctgaaatactaagttaccttcgcgaggagaactcgagtgagataaaatcgtgcgcccacgcaggtgagtttgcagccaagaattttggacgctgctgggaggagaaagggaagttgagaaagtctttggacctggtagcctggtgctctttctcatggcttcacccagcctcccgggcagtgactgctcccaaatcattgatcacagtcatgtccccgagtttgaggtggccacctggatcaaaatcacccttattctggtgtacctgatcatcttcgtgatgggccttctggggaacagcgccaccattcgggtcacccaggtgctgcagaagaaaggatacttgcagaaggaggtgacagaccacatggtgagtttggcttgctcggacatcttggtgttcctcatcggcatgcccatggagttctacagcatcatctggaatcccctgaccacgtccagctacaccctgtcctgcaagctgcacactttcctcttcgaggcctgcagctacgctacgctgctgcacgtgctgacactcagctttgagcgctacatcgccatctgtcaccccttcaggtacaaggctgtgtcgggaccttgccaggtgaagctgctgattggcttcgtctgggtcacctccgccctggtggcactgcccttgctgtttgccatgggtactgagtaccccctggtgaacgtgcccagccaccggggtctcacttgcaaccgctccagcacccgccaccacgagcagcccgagacctccaatatgtccatctgtaccaacctctccagccgctggaccgtgttccagtccagcatcttcggcgccttcgtggtctacctcgtggtcctgctctccgtagccttcatgtgctggaacatgatgcaggtgctcatgaaaagccagaagggctcgctggccgggggcacgcggcctccgcagctgaggaagtccgagagcgaagagagcaggaccgccaggaggcagaccatcatcttcctgagtgagtcctaagtcgggggcaacacgtgagcagcttcccaaccttcccccacgacccgtgccactgcctgtggccctctccagggcaagtcttgccctagaattgcacacttaagtttactaaggtggaagagtcttgtagcagtatgagggcattgctctgggtctctgaatgtttcttctctgtgtttcggggattcatggtagattatggtgaaaagagcacgagaccagaacccagaaggtttgggtatattccagaacatcactgctgtgacctttgggaagtcacaaaaatctttggtaaaatggggacaataatactagagaatatgacggacaaattaggtaatgcaggacaggtgaaagtcctttgcaaaagaccaagttctgcagagatacagggaaccgtcttatctagctcttttacccggggaagactttcttgtgcaattagattttgttcccatttttctcctcctttggagaaagcaggctgtgagcgacacacactctcgggctgctattttattccttggagcctcttcgacccaatcttaagacatgggagctctcagcactccccagggcttgggtttctgccactgtgggtctgttccttaccagaccagagcaacctggcaggacggcctgtttatctgatccagaaaatctggcttcaccgattcctaggatttgaataatcacctcacagacccaattcttatgcttgttttccaaacttttgttgtgatacaagtatttaaagttgaggcctcgtctatttaaaaagagcccacaggtctgttgaccccagagccttcagaagagggacctagtggctgggagacaaggctttaatggagacacatgaaatgtgtgtgaacaaagggttttaaaatatatttttttagcagaaacaataaaaaggatgtattgtgcgtgtgtgaatcaaaaaggaatagatataacaaacatttcccttcttccctctcccctgtggcatcaggaaaaggaataaatcatggtgctgtttgttttggtgtgggcaactgggcagcaggttccagggacaggaggtagacatgagagagagttggaaggcacttggagaatgatggaaagacctgggtcttgcctcagaccagcccctggcttccagtgtgtcattaattgttaaaagcttagggtctaattttactctttattcgatttgaaataattgccctaatgaatttcaaagtactcagaggcagccatggattgcccccagggagctgggctttgagagctgtggcaggtgaccagctgacttgactttactctgtgtctgcacaaaatgagaatatttggatgctactctgcattaggggctgtgccaggtgactgatatttccatcttctagaggaggaatttgagacttagagaagacctagttcagaatcacctcagtgcagctcaaagagtcccactgtgcttttcagggcagagaaatgcatgtctgtttgtgactttcacaggcgtgtggtgaaaggaaaatgaaacaaggcaggactttgacaagcataggtaagcctggtggtgttgctgcctcttagggccagcctttctggaagttgtagtaggtaacgttatcttgggacttgggaagcgtacccaactcagtctatcacccactggttgctactactcaaatattacagagaggaatggacattgtatttgcttaaagcttgagtgtttgttgaaatactagttctcccttcctccataaatattcccttaggcatatcttaaactgtaaggtgtaatttatactttagtgtgagttaattaaatttcctttttttttgatcggaggagactggcatgagtggataagaattagggggtagataagcattagcaagtggtcttcaagtatctcccagtctaacttaggaattaaggctgcctttgaccaaagggaaaatcattgatttatcgttactctatttgaccaatctctgtgtttcctgtatttctctgagtagatgtctgttctccccacagcaggtgctccaagttaaagccagtctccatttgcagcataaaatcagaatgccacagacttttatttagagatggataggaccttggagatcatcagatcccattagtaattgtctggaatgagtttgttcttgctgctgctctcgttcttttcttctggctctttccttctttcctataccaactgtatgttaatcgcccactgtgttctcagcataaagattgttgaatggcaatcaggtgctcaatgtgcgataatgtcctgggggaatttaccgtttgtatttagcccattttctctgcggtaggttttcaaagcagttctcgcaaatgtcctcctctcccaatgaatttcaaagagcttttaaaaataggaacctcactaattaactcaagttaggaaataaattaatggagtgaagaggaagaaatcatggcctgcattcatcagattaattcaatgcaatttactttgtaagtttcataaaacttgtgctttggggcatttttaacccagaacaaatgaacatataaattgtttacaaatcgctgaatttaatatagtaatttagttgtctttttagtatttcatttcacagatgggtcaaattaaaataaatatttgcttatttcaaacattttaaatttaatgtgaaatgtaaatggcgacatatcacaagtagttcttggagctcttaaggcaataaagaaaacaattaagattgttcgccgctcgttgttaaaaatgctaacttctgcatgacagaaacaaaattcataaatctacgcaagatgaggaagcccatgtaaaaaatattaattttccttcatctttcactattgtgcctcagtctagtcgatgtgctgggctggtgaataaggaaaacacattgggaactctgggagagaaagagaggctgggatacctactagctctcaagcaatttacaggagaacacaatagtgatgcaaaagtgcacattcctggaaataggagtgtcttgtcttgcctcttgtcagcccagtgacaaatcagtactagacttggtttctgtttcaaggtttcagccagtgtggcatggtaatatttgtccgatgtcagaacagaggttgctggtctggatttctgcctcttctggaggaaaggaactgataatttgattatctgtcctgtcccttcaatgatgaggatgtgtaaaatgagacttcctttcaagcaagtctttccccagacctcccatcttctctttctgaagtctcctttggagttgttctcaatgcagatagcatccaggtctgtggacacttgtgtgtgtctattgcacacatggcttgctatcaagtgtcacccactcaaagtggaatgacaaagtaattttaaaaaaagcatagttttaatttgtataataactttcaagtgattgggactcagctgcaactacctcctagagaactagagggcagtgattggctttcaactatagttatgaaaaaagattttacagacagtcatgaggttattaaataaaagaaacatcatagaagattcataactctagaataattacactcttttgcattctgatttgctctcctgagtcagaaggaaagggaagaagttacatctagtggcagggattacacatcaacttggtttgctcatattgaatatagacattattcatcacgtgtatttggatggaacaaaggttagcagttgctgctgaaatgaactactctaaaaataaggttgatatacatttagatatttgtggcatggttcagggagaagcaaagagaaggagctcagaatcacatcctctgggtttttagaccacagaattaggtcaaaccaagcagggccagggaagaagaagagagagaagagagggtagagggtagaggggaatgagatattgacagtgggtcctctttacctgaggacaatcgttacctgaaaagaactcataaagttggttcctttaaagtggggttgaaaacatttgaaaagaggtctcattgggacttgaaagtgaaaattatgaaaagaaatttatttgtatgttacaaatataagttatagttacaactatatattaattcttataatgattattcagaatgaatccaatgtggcttgagggcacaatttttctaacaaaaccatctgataacctttgtgttttattttctcagtaagattataaaaagggcctctcttcattctttgttatttaaatcaccctcatggaagcacctatccttgcattatccttatcagttttccattctttcataattatctggtctaattcgagcaaatctttgcttgtcagtggcgtggcatttgaatcatctgtttcttcagcttccttttcattgacttcatgaaattctgtaccctgtgtgcaggccataaccaaaaatataattaatttaaaaaccaatccctatactctactgtatatttcgtattacacagaagtggatgccttgaaatgctttgacagtgcccataagaatttttagtagttgttttcttcactaggttaaatgcttatcttacaatcatgttttcatcattagttttcttagcaaaggctttttatttgatatgaaaggatatgtcaacacagtctttgagggaaataccatcaacattaaattagtgacttttttagtgtaagatattattttgactccaatgtttcaatatttcagaaaaaagttttgcctcaaatattttatgtttattaccctatttgtgatagctttcataaattgcaagtgtcctgtgatcagcctggcagacaaatataataatgctgcattatttttataatcaggctgtctcaaagatttcatttctctgttggagagatgcatagtttccgaggaaggggagattgaaatcccagtccccatttattagcaagcctgttcatctgtcagcctcctgggggctgctgaagtgtaataagagaggcctcagttgcacaaagcatttggcttattagtgctaaaaccattcagaataaaagccatttacgagttgagacagcgccgtggaagaatattgaattgggagtcaaggagcccctctggctgtacaaggcaaggtccgctggtctaccatttggaggacactgtcgactcctatcccttttccctctgcacatgtcccctgccaggctgcagccctgggaccactcaactgactctccacctctactcttggctatttactgaggactggagacatgattggtcatcctttctgctgcacattcttgtagatgaatagctgtcttctcattgtgtcctgacctggccttctctgcacatgtgttctcctggtgtctcttgctcttcttataaggatgctggtcttatcagattagggccccacccttacaactttattttacccgaattacctcccaaaggcccaatctccaaatacaatcacaccggggcttaggccttcaacatgtgaatttgcaggggacacagttcagtttataacaccccttaactgccttattccactggctccccttcaagttcttcaagtgaccatgactggctctcttcccccatgctgcctgtgtatgggttgtttcctctgcctggcatgcttttctatcttactctattctctacctgctccccacttccatccccttccccaggttaatatctttctcctctctcagatctccccagggaaactggcccatcctccctgacttcattaaacctcccacaaaacaagactcactgttgtcattttacatttaattgtgcaattactcgactgatgtctgtcttccttctaattccttgtggataggtgcatgccctaatttccctcaacactgtacctcattccagcatagtgtctagacatagtaggtaatgaatatttgttgactgaacaaatgaatgaatgagcctcagcttggaattgagaagcaatgttctgttttcccttgggcatgcattcgtatagaggtttatcattcctcaaaagtgttctggttcatctgaaccaaagatgctatctttgaaagggttatgattcctctgaggcctctgaagtcaaaccaacatgcaaaacatttaagatttgcttgcccctgagcaaatgaacactatgtgctaatcagaccctgaatgttagctttaaccatgtatatctgccagaagtaaccgtgagatgaaagtgactagggtggtgaatggtccttgttaaaatctattgaacaagatgttaaatgcaatgatacaactctacacattatttcttagcaggctctttcaccactttttaacaaggggtcctcaaggtaatgaggatacagtgggggtgacattttgaaaatattaaaccatgtgtttatgtctccaccttaaattgcatccacttgcagccatctctctcaagagtgagccacacttatcaccccagggtaggaataagcagctactgcctgggacaaaggtgttgtggatccatcctgggtccagaggatggaattactgacctctttagctgggcaattatcttaaaagccagactttgtgaaggatgaaaaaggattgcctaacttcatatctctccctttaatgtatcatgagcccagcctagtggactggatcagccagttccagatgaaaccatagctaaggggtttggaatttatccttggaagccattgcagggttttaagaagttaaacagcacagttggatttctagtgctgcccctagagtgacagcatttgttgcattccaatttgggtcaaagtacaggcctggctgtgtttatagaataaaaaaacagacaacccttcattggaacacagttctggcagagcagctgacactggtgagttctcctttccattaggcagacctctggcccttggtttctccaagtcttgctgctgccactgtcctccatggccagacagtgactgcttccattcagcaactcccactttcccagcacggaggcccaaaccgcccccatgttgctcaggccctgattaggaggtggccctagggagctaaactaggtcacagtagctctcacctgtcatctctattgctcaatggtctattcgttcttcaacgacaatctccagctacgaccaactcatatatctcccatgacaaaacttcctaccacttacactagcattctgcatatgatatatctcagtgcctcccacttcttccatgaagccttcctggactacgacagcctatactgatgttcctatgcatggtgagccatcttagacatttctcagaagggggcacagatgatgtctctcgactatattggaactccctaagatcagggacccttcactgttgtacatcttcaaccttccttactgggttgggggcagagtagccatgcattgcttgagagattgatggattgaagttctctgacagtggctgctgctcctgaaatggaggaaaagcaccctcactgtgatcctcaggcagctctcttggctctaccttcctttccttctttccctgtgctaggcagaattctgaaatggcctccaaaatgcctggtccataaggtatacgtatcttctcccagttattcaatcaaacactaatctagtgctgcaaggaaggaaagtaattaagttcccaaatctgttgaccttaaaatagggagattttctgtgtggatttaaccaagtcacatgagcctttaaatctgggtctagaggtcagaggcaggagaactaagagtcaaagcatgagaggcatttgaccagggagaaattctctgttgctggctttggagatggagggagctggcagagaatataggtaggttctaggagctgagcaccagcaagaaaatgggccctgaataagcttagaggtaaaattcccccccagaacttctagaaaagaattcagcctggcctacatgttgagaacccaggcataccttgcctggatctctgatctacagatttgtgtgctaataaataggtgttattttaagccactaaatttttgataattcactatgtaccaatagaaaacgaatggattcactgaactctgctgaaaggagctcccaggtaaacacatggcctaccttagttataacttccaagacaggttcaatctccagaagcttctctttgaaaagtctcaccttccaagaattgcctttggcccagccattcacagatccaccaaccacttgttggtcacctgctcagtgctcagtgatctggaagtttaacaagatccagggcaccatggaatgttcactggacttttaaactctcgtttggagaattacaaaatttgtgggtttgagtcccactggctggattttcagaatgctgatgccttgatagtcagaaaggaaaacagtattgaattgatcttataattatcatccttttggtagctctatttcgtcatagcctggcaatgactaggcgctgcataaaggtttggtggataagctgatgcctaggcagctctgctgctttccagagtcctcctcaccagaagggagatgcctgtacccctcatcatttggcttcagatggaaaaagtgtgtcagggaggaagccaaccctggtgctgaagcaagtctgaataacagaaatgtcttgggctaacagactttatcattttctgattttagagcctttcccgatttagaaacttgacaaaaagtcttgtttgtacttactgagtgtaagagccattctggcaagcagagggtttaacactcaggccactgctttgcacaccgcaaaggtggctaggtagttggagagcagtggtgttactggtacctaacagacagatcgggaggcaaggctgcagcatcaaagttgccattgtacttgttcagtgtctaactgtccatgaaactaacggcatgcagaaatgggggcaggcccagctgggagtgatgacgctcattaaacttgcagagagaagccactctctttctttagtgaagaggaaaaagatcaactctgctttagaaataaaacactttacacagggtgcttgagccagagatgaagtcatttgaatatatatatatatgtacctatatatataatatacatatataggtacatatatatataatatacatatataggtacatatatatatatatatatatatatatatatatatgaaatttttttttttttgagacggagtcttgctccgtcgcccaggctggagtgcagtggcacaatctcagctcactgcaagctctgcctcccaggttcatgccatactcctgcctcagcccccgagtggctgagactacaggcgcctgccaccacacctggctaatatatttttttttatttttagtagagatggtgtttcactgtgttagccaggatgtctcgatctcctgacctcgtgatccacccacctcccaaagtgctgggattacaggcgtgagccactgcgcctggcctgactttacatattctattctatttggttttatatattatatatgttatatattgtatgagtatgtaatataacataatatcttatacatataattctttggagacatatactcagcagaaataaaatttctggcatatttttgagtctactttctatgtgctgccattctgaaggattaaatatcacattgaaatgacagctacatctttttgttttttcagttacatttggaagagaaggatgggaaggagtctcagtaagttgcctaggctggagtatagtgactattcacagacatgatcatagtgtcctgaggcctcgaactcctgggctcaagcaatccttctgccttagcctcttggtagctaggactacaggtgtgcactaccatacttggcttttaagctgtacttcatatatatatataatatatatataatataaaattatatttaaatatatatattatatatagttatatatattatatatagttatatttatatttaaatatatatatatttaaaagacagctgatgggttttcactgtttttcaagttcaagtttacccttgataggggtgacaaatgagtcaccttggtgattgaagcttgctgtagatatcctctagagaagatgaaaaaaacttctgtaggaactagctgttctccttgttagacctggggttttcctcattattgaatctcttacaagctgacttcctccaagaagcctgcctggactggctttacccttctctcattattccagcagatcttcacatttcatttgtttgttcattcatcaagtatttatgaaacttaagttgtgcttaacatcgtttgtaccatagagatcaaaatgctggttcctcctttcaaggagcttaatacttgtctcattgggacatcaaagtataagggcagagccttgtagaagcctaaatgtaccacttgatgcagggtctgggttgtggctgtttatgaagtaagctagttctagtaaatgttctgccagaacttttaatagactggctaactgggcttcactccagagatgttgttagtctcgatattcacagtatggtccagggacccgcagcatcagcatcacctgggaaattgtaaaaggcagagtattgggccacacccctaccagttgaattgtaatctgcattgtaagcagatccctggaatacctatgtcctaacatcagggtatgagaagcactgatctacaacacttggggattctttaatgtcaatactagaaaagggtgaattgggaaggactaaactcactagttgtgataagaactgtcaatcacttgttgtgtagttgtaacaggtgggaatttgctccatgacacttagacataaaaaagttgcattatttctaaaaagaaacttaaatctggctccaagctctcatttggaaggtggtgaaaatgttaatcttagtaacattgggggtcggggtttcccctttctcatgttgtgtcaaaattcaaggggcttatgagatgcccagaaaatgaggcattgggtctgttgttcaaagttcttcctattgccaattctgctctatgattttgctgccagggctgaccagagcactagggccagccagccaaagggctggcctttatattttatcttcaatcctcatagtatcattagcatgaaggtatcgttatcctcactttgcagaactgcctgaggtcatcaaacattgagattggagctgggatctggcatgttttgcagtccacgttctttacatgagcagagggtgagtctctcaaaagaaaacgctctgtagtctctcaaaagagaatactcttcagtgggggaacttgttttggatggtcagtgtcagggaggcaagaaattatgatgccaagtctggtggatgtttatcttgcttttaggctacccagcagcttttggctgctttttatctctgggaaatttccatctttttgagtcctgcttcctcaagatagtggtcagaagcttgctttcccagcatccctcacagccagagtgcagcatgtggcctgggctgcgccagtcacgtgcactggcatgagagtctcatttggaagagaaggatgggaaagagcagtagccacatggactctctttggggttaaagccagtgtgtgacaaatggggttaaaagagtgtaaaggagcctttagagagagcaaagacagaaaagctaaagacagcatcctaagccagatgtttgcagcacctctacattggtgcattctgatgggataaccttatgtgattctctggccctcctaggggttatatgaaataactaatagcctcatttctggatgaaactggaatgggctctgctgtttgtcctaagaactctgcatgtccagaaagtaggtaatagaatgattggactggagtagggaaatctagaaggtagcagtgatgaatttagactgaaaagtagactgagttaaatatggaggaagttgatagctaggctaatggattcagactatgtattggaggccatgggagccatggaaagcttttgagaagaggagtggcaggaaggagtgcaaaaacactgatgtggccatgtggccaaggtgtgtgttgctggcagagagaggcagtgtgaggggcacaggtgtggaagtgatcatgggttctgatgacggtttgtggttaggtttagtcatgaaggggtggtagttatcaaccctgctaaacattacaatcacctgtggaactattaaaaatgccctactccagtctatttatatcaaaacctttgtgggtggagccctggacattggcattatttaagccttcaggtgactccaatgtgtagccagggttgagaatgggagaagaaggagctggaaaggcaggctgggggtggctggggagaccttgactttagtaactgtgccaaggttctttgactagaggccaccaaaccggattcttcttatttagcaagtaagaaggaatttattggaagtatgggaggtagctcactgagtcaaagggaaggctaaataaagaaccagatttatcagggacctagggagtagaaattcatggaccaccagcttgggctctaccatcaagaaggtatcagcttcaggcatcatcccatctttgttgccactccatccagggatgagaaccttgttggactggctagggctgctcatccagcccctgtgaggctgagatgagggcaggtgatggacagtgccgtcaagactgcatgcagtgagaggcgtggtccccaaaggagacccatgttctacccaggagagcgggttacagagccagggagcagaaacaacagacaccccctgtggggaccttcgtaagcttagtgatgtgctctgacattgttgagttccttctttgttccatgcagactttccccagattctattctctcttatatccctggacttccccttccccctggctgagtcctgggtgatatttcccagggatctggtcatcttagtgcatgagcagtttagaggggtggggaggaggggtcagcagcagagcctcctgcttctgaaatgctgctgccagaagctggttggtgccaaatccccagggcatgtctcctgccttgtaagctgactcactcactcacctaggtcactcactgaccaagtatcaggttgtggctgctcattaccatgaaatcaggttgtatttgaaacttggcctggaaaacaaagatctctggctgtgcttcagcatcagatgcaacacctatttctagaattgggcattttctagttatgtcttaatatgatattggccttaagccaggactccttatttcagatgtaagatcctacctttgatgtcaagcatattgaccatggaaaataggaaacatatgagttgcattcattgccttctggaaatctaaaaagttatttaagaaagaaaaactagtaaaatttattaaagttttgttcataaaatgttttagtttcacattggaatgctgattgatctttgattttgatgtcagtcacattctgtctctagggcagttactgttttctctccctgcaaattgagaggccaggaggctgctctccaaggcagcttctcagagtcttcacttctcttggtgatgtttttttgaacgagagtcaccatacgccaggtgagccttccccgtggaacttggcagtgagctgtgtgcattgagaatatgtggagggagtgtggtgtgtgtggacttcacattcagtgggtagggcctaagtatgtgactactgtatcttaagtggtggggatgatggcaaatggggagtatattagtttcctgtggctgctgtaacaagttactacacatttgacggcttaaaacagtagacatttattttctcacagttctggaggccagaagtccaaaataagtttctctgggccaaaatcaaggtgtcagcaggaccttagagcttaggctttaggagagaattcactctttcaaccttccagttgctggtgactgctggtgttccttggcttgtggttgtgttaccccagtctccaaggccaacatcttcagatttctccctgctctgtcttcaagtcatcttcttgtttgtcttgctccatttgggctgttatatcgaaataccataaactgggtggtttgtaagcaacagacattattttctcagggttctagaggctgggaagtccaagatcaaggtattagcagatttggtgtctggtgatggcctgctttcaggttgcaaactgctgacttctcgctgtgtcctcacatggtggaaggggcaaggcagctctctgggacctcatttataaggacacaaaccccatgagggatgtactatcatgatgcaatcacttcccaaaggccacacctaataccatcacattggtgactaggtttccaacatacagatttgaaggacacaaaaattcagaccatagcatcctctgtgtgtgtcaaatctccctctgcctccctcttctgagaatgcatctgatgaaatctagggcctactctgataatgcaggatcatctctctacctcaaaatccttcgcttaatcacatctgccaagattctttttcttataaagtgacatttactgtatccagagattaggacctggtattctcggaggacatttttcagcctactgcagggagcaaagggataccagaaagtacaaaaatttaatgtggtacatgagcatagccttcccacctacagagagacactgctgtgcataggtatatgtcccaatctcctttccatcacctactagtgtgtgtgacttgacaaattactcaggacctcagttttatcatctctgcattagacataaactggtctaaggttgatttgagcatgcagtgagaagtatatggaggccacctgtgcagtgcctagcatatggtaggtcgtcattgaaaactacatttgacccttgaacaacatggatttgaactacttgggtcttcttatacatgattttttcccaataaacgtattataatactttttggagatttgtgacaatttgaacaaacaaatggtaaagcttagaagtagaaaaaagttaagaaaaagatatgtcatgaatgcataaaatatatgtagattcttgcctattttattatttactatcataaaatatacacaaatcttttataaaaccttaaaatttatcaaaacttacatacacacaaatacagattgtacatggtgccatttgcagttgagaaatataaacaaatgtaaacatgcagtattaaatcataactgcataaaaattagctacagtaattttttgtagctacctcctgttgctatcgaggtaagcttaagtgttcctagtgtccacttgcaactctgtgtgacgctaatcatctcagcatgagcagtttgtctctccagtaaaatattgcagtaaaaaagtgatctcgtgggcttctcacataaatttcatcatgtttagtgcaaataccataaaccttgactaacatcatgggactcatacaaagtgccactagtggtgctggaagtgctgccaagaagtaaagtcatgatatcacaagaaaaagctgaattttgacatgtactatacattgaagtctgcaactgcagttgccctccatttcaagataaatgactccagtgtaaggaccattaaaaaaaaaaattcatgaagccgtcacttgcaagaagtattttgcaaaaagtgtgaggttgtcatgcctgctattactacagctatgccagcaggcatgacaacctcatactttttgcagaatagttttttatattgtattggaaatgcagcttttatgttggtgcaggattgctattagaaatagcaattgctatagactctaatatgattcaagaaaaagcgaagtcattatatgacaacttaaagcacaatgaaggtgaagggcctaaagctggagactttaatgtcagcaaaggatggtttaataattttagacatttggcttaagaaatgacaagataacaggagaagcagcttctgatgatcaagaggcagcagatgagttcctgtacaccattaagaaaatcattgaggagaaaggatatctgcctggagaggtatttaatgcagatgagagtgctctattctgaaaaaaaatgccatgaaggacgtttattagtaagaaagagaagtgagcatcaagatttaaggcaggaagggataggctaactctactgttttgttcaaatgctgttgggtttataatcaggaactcctttatttataaagctgctaactcctgagtcttgaagggaaaagataaacaccagttgctaagtcttttggttgtacagcaagaaggcctggacaataagaacactttttctggattggttatgttgatgctttgtccttgaagtcaggaggtaccttaccagtaaggaactgccttttaaaattcttttaatattggacagtgcccttggccactcagagccccatgaggtcaacactgaaggtgttgaagtggtctacttgcccccaaacagaacatctctaattcagcctctagattggggccataaagacctttaagtctcattacacgtggtactctatggaaaggattgtcagcattatggaagaaaaccccaagtctggaaggatgacactattgaagatgccatcattgttacagaaaaagtcatgaaagccaccaagcccaaaacaataaattcctggtggagaaaactgtccagatatgcatgacttcacaggatttacaatagagccgattcagaaaattataaaagagattgtggatatggcaaaacatcaggtgggggtgaagggtttcaagatatgggtcttagagacatacaagagctaagacaccacaccagaggaaataacagaagatgacttgacggagatgagtgcttccaaatcaacgccagatgacgaggaagatgacataaaagaagcagtgccagaaacaaatggacaatattagacaatctggccaaagcttctaattattcgagactctttttggcttcttttactacatggatcattctatgatacagacacagacactgaaagtaaagcaaacggtgaaagaagggctggtaccatatggaaacatctttagagaaatacaaaggcaaaaaagacagaaattatggtgtatttctgtaaagttgacccgagtgtgcctgcctctcctgctccccgcacacctccttcaccccttctgcctctgccacccctgagacagtaaaaccaacccctccttcctcgttctcctcagcctattcaacatgaagatgatgaggatgaagacctttatgatgatccactttcacttagtaaacagaaatatactttctcttctctatgattgtctaataactttctctttctctagcttactttatggtatgtatacaatacatacacaaaatatgtgttaatcgactgtttgttattggtaaggcttccagtcaacagtaggtaattagtagttaagtctttggggagtccaaggttacatacagatttttgactgtgcagggaagggtgtgttagaccctgaatgcctgcactgttcaagggtcaactgtagttgcctatagtgaccttgtgatattacagaaagaattttggttgaggactcaagagaacttggttctagtcattgccaggccacagacttgtaacattttgagcaaatctccacatattttctcgtgtaaagcttgaagtggtaaacttgaggagtttgtctcaaaagtccccatagacataagacatgaaggggatatgggttccagacttaagcactccaaggaatagaaagagtgtgaagattatatagtaaagatgcatggacatttgcttttcattccattgtatgtcaatgtctgatacaatagaaaaatgttttaagttcgttttcagaaagcaaaagtgtcagcccaggaagggcaattcctgatggctataaggagcctctgaaagactctcaggtggccccagctgtgtgctcattccagaaagagagctttaggccctgaggccccccgagtccctaagcttttgaaattgtttgcctttgacctttgtcctgtgagaagttactggaagagcaagagcagcagctccaggccctggcagcccattctaggcgggagcttttgacaaattaccacgttgatgccttcttcacgcacctgtaaggccaaggcattattggccaaggcaatcgatatatcaaaatgaatttttggaagagtgtcatcaagctcagctttatttccaaaacaaactctgccccagggagggaaaaatgactttcactgtgaagtaaacagttgattgtttagacattacttatgtcatgctagtccatctgagatgtaggcaccatggtaaccaattgtccccagaattcatatttttgaggcccattaaaactcgaggctgctggagtcatgttctccgcattttggccattttaataataataatgagaacgttaaaatgacatttggaatttatatcacacttgtctgtgaggtgctctcagcactttacaatgtatcatccatcctcatcacagagatgggaaatatcagaggtgggtagtatttgtgattatattcagcttagtaaagagccccccggcttgaaggaatttcagtgatgtggcatggtgcttgccgacttgtggggacagaagaggctggtgctggcttggtgcttctgctcggtccatctctctctgcctcagtttccatcaatcaaatcagataacagcagtgtgtctcctcatcccgcagcgtggttatgtggatcattgtattaatcatattaactaacgttttaaaaaatttacttgctatgtgccaggtgttctaagatctttttgtatgctcattcattgaattctcccaaggccctatgaggcaggtgcagttaattatcctattttagagataagcaaattgaaacacggagagtttaaggaacttgcctcaggtaacacagcaattaagaacctgaggtgtatctgacccaggcaggttggctacagagcttgcagtattaaccactgtgttagagttgcttaaactttgatatagcaagacaatacacacacatgcacaagtgcacacacccgcacaggcagagcaaacaaaagtttcactgaacgatattcacccatccttacctttgaatgtgaagtgcattttgatcttttctcttctattcatttcattaacgaaaatgccaatctgaagccagtaaactgagtttatgatcatgagtaagtctgacatacattttgaaagccttagcactacaccatactccttcatagatgctcctggggaagcatttgagaagagacatgcagggagtgtgtgtgattggctggggagggtcgtggagaccagaatgtgtgaagtgtaggccctggctctgctcccacggtgctacctcctgaggcagctgctccgtgtcatgtctgggcctgtgggttggcgggcagaggctgccccactctcctcttctactttgtgtcataatagtctttgggggtcttctctgccagcctccatgggcttcagctctgagttaaccccaggtatttactgaatagacattatgtactgggcctcgtaggtatccagctctgactgggaggctacagagaggcattagacatgttccttgactgcaaggaaattgcaagacaccagggaaggaaggctgacatgtcaagggagaattaggggcaggtcccccagtgctgtatgtagggagcatagattttggagctagatggctcctcctagtaatgtgacctcgggcaacatacttgacctctgagagcctaactctggggctgcacctgcagcctgagtgatattatcctggctagtgaaactgtttggtgaaccatgaagtgttactaagaggttagtatttagaggtcatgttgtcataacagtattgccaaaagtctggcaacagccataaacattggggtttcagggaagggacggagtgttgcagcaatcctggaagccttcctggaggaggcagcatttaatctgaagcaggtattttcagttcctgactggaaggatcatgggtcacttagagatggaaacagatacgcaaggtccaaccattcatgtagaaaccatgcttatatataattaggtcatagctctgactccaataggaggatcctgagtgctttcataagttgttggggttttgttgttgttgttgtttgtttttagagacaagatcttgctatgttgcccaggctggccttgaactcctgggctcaagtgatcctcctgtcttagcttcccaagtagctgagactgcaggctcaagtcactcagtacactgctttcctaagtttgacatgccctgctggcttgaggtcactggcagacaaccacttgattcccttaggtcaggggttagcaaattacgtatgggcaatccctgtttctatatagctcatgatacctgtaatgtcagcaagctttttttttttttttttttttttttacatttttttgagtgttgtagaaaaaaaaatatgcgacagtactatgtggtcccataaaacctaaaatatttactatctggccctttaaagaaaaaaatttaccaactgatgccttaagtctcaaagtatacaatccttgtttcaagttgaaggtcttccttagttctgcatcatcctttagtcattctccaggcccttctgtcataccctgagggtacacagggcccaagccctggagagaaggggaaagtaggcctccattagtcatttcctggcttccatggctgtcggaattcccctgctctgccatggcagcatattaatatgtcgcagcgagcatgtgtatgtttaattctgatgacatgtggcgcataagtgattagtggcaaatgccaaaatgctaggctggagccctgatgctattcataataacattcataagagtattcccccaggatgcagctttctgtttctccaacataaatagcttgggaggccaaatcacaaacacgatttctcttcatgctccacctggccattcgtaacaagcattagatgtgaaatttgatttaaagcagcagttaaactcggaaaatcacaatggtgtcaagcccattgtttattttaaagatcaagagaaaaccaaaggtgagcaactaattctttattttattttatttttttgtggtaacagtgtcttgatgacaggctaatgtgcagctcaaaataaaggtacctgggtagaaataacccctcaaacatcattgaggcaatatgccaagaggcgcttggtaaatggctgtgaaggaggacagattatcctgttgaaaggctgctgagatgcggctccacttgacaatggtgggacttttgtcacaggaaaattagatgcctttggataggtctgagattgttcttatcttttccatatagcaaaaagctaccactcagaaagaaaacagagagttgaaggagtaccctgattgaatgccttccagaaaaaggattgttttgagagaaacactttaatttgcttcagatgattctgtggaggcttattgctgaagtggttccatttcagcacaggtttagctggctctgaagagagaagtgatttttaaaaatcttagggaatacaaagcatttatccattaacctgagtcaccaaccagttttcacaacaaggcagcctaggagctagtggtggccaggatatgttttgtttgtttggctcagtgtttgctgcttgttttttaaagaatttgaacaccgctggactgcttgtgctgtctccagtttctcacagcatgcccacttcctatggggctgctccaggctgcctcccatatttgtctacaaagggattggagtccaaggtgcattgttacagcttgtgggttccatcgaaacatgacacctagttattcccatcctactttgtatcttgtgaccacagaaccctcctaacaaaggtttgtggatggtaggtgactccctgaagctcagccctagtcctagagaaatattacagagtccccctgtgctgatggtaggtcacggaccctagccatctccaaaggacagagtccttttcttgctagtgcccctactgatagaaatgttgaacaaagggccagtggccgttttctagcagtggttaattgcagtgagttctattgtggcagaaaggtttgaaaaccatctctcgcctgccctcacaataacctgaattgtggttcttggttagactagggcaaaggggtggtgacatgagaacacgaaccctggagctggactgctgggttccaatcccagttccctttttgctccttcctaggggtgtgaactgagatgcaggggcagctttttaggggaaggatgtataagttgggtgacagattgatgcaggaaagaggaagaacaattggaaatggctttgacattagtttgaattccaaaagtgggcaagtaaataccaacgcggtgcttggattaatgagagggtggaaatggaaagggatccactagttaacaaagtttaacaaccactgacatcagggtcagtgtggaaggaaggaactcatggcgtgctcagccaaagtactttagagaatgtcctagtttgaaactttttcagtcactgagatttaaaataataataataataatggcaaaattgtcatgaaaaaaagtcaaaagaggctaaagtggctcagttgcaacaagacccaggaaggatatgagaggcacatgtgcccttgcagggcgtgactttccacaaccggtgtgtgtggtgggggtgctcagagcagtcctgccccacattccctccagcctacttgcctttgtctgcctgaaggacacgctcttctctgctgtttgtctatgtgggtaaaggtctcagccaagagaaatttttaagtaaattaaaaactcaagcaggctgatccatagccatgctcataagaagcctgcctcaagtgactgtttattttctttattccttgatttttttcacaaataagtatagttacatgcctgttatatgccagcctctgttctgggcccaaagtgagggtaacatcttcaacccctgtgtgctcccagaacaggaaatgagatgcatatacaaacaagtgggatgcagagccctgggagggatcatggtcagggcagacagttccctgtttacagatacgctgcatttcaaaagttagctttcaaactcttggttaagaatctggattcattttccagtacagactttcttttcatgcatatatgcttttttttttgttgttgttgttgttgcagatagcaaatgtttattgaatgcctaccatggaaagaactgaaaataccaggaagataaaactttgaatccccttcaagtcagggagtcatctatacttaacaaaccagcaaaatgaaatgctgggcttggtgctgtgtgtgggaagtggcaatggaagggccccaggcagggccctaatgaatggagtgattaatacacttgacttctttttctttttcttccccttctctatcacaccgaagcttccatttcttccatttagctgttatgctaggtgctaggaggaaagcaatagtttaaactaatttaagtttagatgtgactagaactgatgggagattgtcaataacctctgaggggaaactttctgtgtcttaatgatctaagactcaggcttggggttttatatgactgaaagtcacaaaataccttaatccgctcttcacgcagaggggagatcttgccgtgtgcttgcactcacacccatgaatttcacctgcttctggagatgattttgctccagttcctatggtgtgtgttcccagggtgtttctccttgaaaatgcagttttttttcttcattctttgctttgggacttcaggttctaaagtcagtgtcaaggcaaaaaagcctgtagagtcacaattgtccttgaaaatcacttagcaagggattacattggagacccaattttaccctgtctcagtgagtaccacccaaccactttttccttccctcttagaaaaagggacgtgattgttcagttggaaagcaggagaggtagttgggtccaagaaatagaaaaacacaaatcgtgaaacaaacatttcactcagagtggtgactgatcactcccttagaagcatgaggtcgttgcaacaaacccatgtagacaactgtagatgcccaggtctcatctcaaatttgctgcctgccttagagacatgggattctgcagttgagtccttatggctgggcgtgggggtggaggggggctcctttcctgtaaagagcacacagatgctctaaatgtccgctccctgaccgccattaacaccgctcaggccccagggaaatgctttccttcatctctggtcctgcgtccttgaaacagaaggtgggcctgtctgattgccaggaaggcttttggctcatgcccctgtgaaaggcagagtcagacacagctttggacttcagagaagatttaagcagcaaaactgcttaggtaagaagagaaaacaaatgaattaccttgtcggaggcttcctctcacatatcagcgatgcaatagattcatgtataatgaactgtggtttcacagcagtactgagtgcccatttccttgctgcttttttttcttacaatttgtggtttcggagatattcacagattcccaacacttgcacatggtgactgaggaacattttttcaacattaaaaaatttatatcgctcttcactctgcatatttaggcaatattgattctttgcattggcaactggagaggcatggactgctataattaggaatactcttattttttaaatggttaataagatttaatttacattaaaatgaataaaaattagctttaaatatctctgatataaatagttggaatatattcagtatagttaatattttatgttttaattttcatttacattttaaaatttaatgtaatttgaattttttattacaaatgttcaaattttatacattgaatacaatcacattttattttagaataaacattatattaaaactattgatttgaataacattagcaattttgctgaaatgaaagcaaggaaagttagttttgtgaaacaaatatataataacttatgaattatttatgcttttattgcgtaactcatccaatattactaaagtacagatggtacctgacttacgatggagtgacttatgatattttgatgttaggatgacataaaagcgatacacattcgggagaaagcactctgtgagtacccatacaaccattctttttttcactttcagttcagtattcaataaattacatgagatattcaacactttcctagaaaataggctttgtgttagatgattttgcccaaccgtaggctaatataagcgttctgagcacatttaaggtaagctaggctgagctatgatgtgggttaggtgtattaaatgtgttttcaacttatgttattttcaatgtatgatgaatttatcgggatgtaggcccacagtaagttgaggaatatctgaattaacagaacacccagacatgtacaatgattagtcaatttgctgatctttggtattttgtgactttcagtcatataaaaccctaactttaaacatatttttaaaattttgtcagccaggcacagtggctcaagcctgtaatcccagcactttgagaggccaaggagggtgaatctcttgagcccaggtgttcgagaccaacctgggcaacatagggaaaccctgtctctatcacaaaaatacaaaacctatctaggtttggtggtggcatgcacctgtagtcctagctacttgggaggctgaggtgggaggatcgcttgagcctgggaggtggaggttgcagtgagccatgattgccccactgcactccagcctaggcaatagagtgagaccctctctcaaaaaaatggtcattatgaaggtgtatttgtcagggaaggaggatagaacactttattgaacaattcatcagcttggtttgtaactttaaaatatttatgtggccttccatttgtattctcatactgactacaagtcagaattacccgaactattgaactgttacctagtctcactagcatatagttgaattctataaattactagtctatggcattatgggaatttttttttttaaagacagggtctcactcttgtcaccttaggctgtgcagtggtacaatcatagctcatagtcgcctcaactcttgggctcaagccgtcttcccacctcagtctcccaagtagctgggaatgcaggcacacgcccatacccagttgacttttattttttgtagagatggggttctcactatgttgtgtaggctgattttgaactcctgacctcaagcagtcttcctgcctcagcctcccacagtgttaagattacaggcgtgagctaccacaccggctatgagattttattctaacactgtgatttaattaggcttctgaactcatgcatctgctggagtctggcagtgtttggccgcttcatttaaaaacttgatgctaatggccaggtaattgtttcaaagatcaccattgatgaagtgtccagatctatcagccacaaatgctgtgaaggagagaatggctatcttccatttcctttgggtttgctgtacttttagttcagagtagcagtggcccttcaaggtttgaaaaagctgaaaacatcagagaggatgcagtggacaaatattgagtcagtccttattaaagaaaagaaatttttgagtgggcgacatatcccaaaaggtaccagtttcctaagagccagataagataagaacacagataagatctgtgtacagatcttaggtttatcaaatggcttcagctcccctaccgcccatccattccctttatttaaattgggtgtcaatgtgatagtttttaaaaaattatagaataatcatttaaaaatcattcatgactcatcatcctaacacacctgtttttattgttacatgttaacttactcgtacatgtaaactactgcattgttccaatcagcatccatatgttattctgattttttgttttaaatgttacattgtatatttttctatgttcccatagtccttataattcccattttagagtctatataatatgatgacatgattttacatgcctttttttgtaacatggaaatttgagaacaaaagaagaaactgattcatatccctagatcctttgagtttttattagtcttatcactctttaaaacccctactgacttatttccatgatgcaagcaagataatttgttaatcaaaagtttaattaacacacatactagagttacatatttattttaggccaaattttaaaatgtaatagacttaaccttgatatatggcacccccatgtaattgatgtatataggacatttatgcctgttttctaggtcttttctttcattgctttataaggctttaaaaatgtatacagggatttattgttgtgtcttcgcttctatgacaaattgtttgccatacctgtgatttatttttcactaatttgttcccagagaacaaccttgaaatgtagctctccaatacaatgctgaccctatgaggaaatgatgatctgccttctagaaacacattagggtaaacagtagacactgctggtatttgcaccaagtaccagtcaagggcaggcccctgtatgaataagaggcgaaggtcagtggtcaccagcgggctcaggaggagacaggggcttgtctggcatagcccactatcatgggcatttcgtcagtcacagagatcagcacaggagacctcgcaggagaaatggcaagccagaagcgggggtgtgttttgaggaagggggtgaagtgcagagatgtgactcctcagagaagcatgtgggcaagtcttgaaataacagagaaagaactagttagtagattaaagcagattttcaaattacatttaaaaaattctcttaattggcatagagatctctagaccagggcaatctacatttttattgagactctatactgagtgcccagcatggcaatagcgtactgcactcacccttttattcacccattaatagtgagcacccactatgtgccaggcatgtgctgggcctcagagacacaaagccatgaagaaatggtctccaccttccattttcttctggtgtaatgagaaagacagacacgcacataaaccagatgttgcaattcagagcaaaaagtcttaaaacagtgttagggccaagtgccttggaagcattcatttattcagtaagcgtttattgagtttctgttgtgcaccaggcattgtgctaggtgctggacatgtaggagagaacaaagagggtaaaactcctagcattgtggaattgacagcttggtgacgctagaattcctcttagagaaagaattttgtgcctctgcctgtgtcttggaaagcttcctggagatgctggcaaggctaagtttacagggcagtaggaatgaggaagtggaaatgaaggtgggataggggcagcaaaggagtatgggagagatagaggtggagcaggggcagtaatggagatgagatgggagcagaaatggaatggagtggagtagagagcagggatggggctgcaatgagggtagggtggagatagggtagattgtggggacagggatgaaggtgaggtggacaggcagatctttttctagtatgcagagacaagtgtgcaatggcacagaaaagtgaagcaacatggttagggcctgaatatatgccccatatgtaaagatccagatgacccagccaggtcccaaggggcatgtaatagtgttgggcagacaaggtgaatgcatgaaacgggcaaagcaatgccccacctggtcaagagagctgctgaattttgcacctttggttgtaaattgctcattagcagaatctgagtagcgggcctgttgcagtaaccgccagcctggtctctgtacctcggtcttcatccctgtcctatcccttctgtcattcattaaatatttactaacacctcctaagtcctgggcccagtagattctgttcatatatagttaatttaaagacaaagtctgtctccagagcctaggagctattagataagtttgtacaatcccaaggagttaagagctttctcaggaatagaaaccaaatctaagtggaatgtaaagaggagctggctaatattatcaggggcgctttgttgctgacatttcgttacaattttctgaatgcttcatgtattttccttcattcttaactgacatttttgctgaagcttgcttctcaccctcttgcttagagatatcttcagctgctaggctcaccgtggtccaggtccacaaatctctcaaatttgtattataactattataacaattaactgaacatgtgtattgggtgcctgctcagactgaaaactgcttaaggacaggagacttcttttggagccttaactaagaacattacaggtgttccaaaaatatttgttttttagcaaaattggagcaattagaaaagaatccattaagtttagcaactgaagcaattagagaataattcatttttaaaaactttagaatatcagagttaaagtgtatggcttggctttttgataaagctattgacctttggattccttttgtcaaattctgactctccaaatatcaccagcacacaaccagttgaggagagaaaactgaatttattgtttgctgcagtaaggaagaaaaccaccttgacagctttggtggtgtcttggaacagggcaaagcatggttggaatttgttgagaagtggaagtttgatttaaggcagacctagatctttcaatggggaggacttgattagaatgggtaaggatcatgatagaaaagtttagaattggtggaaatagcaaggtaaggatttttgaggcagaagacttaaagaattttagggaataaactgctcttgatgaattctttttatgagagttctttgggtcctttgagaagttcctataatgaacagtcaaattatctgcctggacaagactctcctggcatactaagatggtgctagtgatgacaatgaaatagtaaagtcatgtatgtagacagtaagctgtgtggggtgtggatagttttggttctcacttgctagccaagcaggaagtaattgatggctagaaaacaaaacacaaaaggctttctctaacgttttgtttgggagtttgaattttcacttaggcacatgcagaggcaaagaggtctcctgtccatggaaatgtgtttcatggataagaagaggtcagtcgtcaggttactgggtgctgacccctgggatttgtcaaacacacgtcagcggctggcttccttaacggctttcttaacagctgatgccgagtgctgcctgcaatgatgcagtgagtttccatgttcccttgtttctgtgtcacatctttctcttgacatttatccttctatgagatgtttactaatgcagagacccaccagatgaaaatgtccaataacatcatgatactttatttcatattttattgggtcagaaaactgcaatgtctcttccatttcatgctgactgccaccaactcacttctaagtatactgtaagaatcatgcctttctttaatcatgcggcaaaatctcacccaaggaatctgaaattggtttttctccccttctgtccagacactgcagccccagacatctttttggtacctttctgagtaaaatgggaggacaatggtgtgatgcagatttcagcaataaataattttgtctcttacagccagctctccgcaaccccctgcaggctgtttgcaaactgcagtttttcaaataccaccttgcatggtattaaaccctcttgagctgagcattggagaatagtcaaaataagctattgagttctgggtgatagcaggtgggcagaaactgaagccagagctgccattgccacacggcaaggtttctgcaaatcgccttcctccccaacagagaatttgactctggtgctttcttttctttttcctttccttcgtgtttttttgtttgtttgtttgttttgttttgttttgagacagagtctcgctctgtcacgcaggctggagtacaatggcgcgatcttggctcactgcaacctccgcctcaaggttcaagggattctccagcctcagcctcctgaatagctgggagtacaggcatgcgccaccatgcctggctaatttttgtatttttagtagagacagggtttcaccgtgttgtggtcaggctagtcttgaactcctgacctcgtgatccgcctgcctcagcctcccaaagtgctgggattacagacatgagccaccgtgcctggcctagtgcttactttattaatggaagctgtttgaattttcatttggttgtcttgggtttgagggcttctcatcagcccttttttattgtttcacttttcaaaaacattccactttgcttctcatcatctttgttcctcagttgaactgagagcaagtgtgattttaatgaagcactgatccttttttttaagagcttttcagcaggcctagatgattggcatttattatcattttgtgtctgccttctgctcagaatataaaggaatcttggaattattttctctcttctcttataggcccaaaggggtctcacttctctcccccttccttgctttttaaaattttacatctcctacaccttctagcatcccctggtacaatctcctacaggcccttcaaaatcttttgggcacaagtggctgggctgagtcagacagcttggaaatgcaaaaaggcaggccaggcagaaagattgatggtggaatgtcagcttgctgccagtgtctgtaccatgtggaaccatcagggtttcccttgccctttgtctgttccaatatactttgcttatcacccaggctctggcaggtcaaggaagacctgacgtggcagcttctagggctgagatttgcatgaaagtgctggaatcaaaactacctgactgatgtctgcatggagctcataggtccctaggttgtaactgtacctgctagggccaccactgctgatcagcatagaattgatgcaaagcagatggccaccaacattgagctttctgctcagctcctctcctggctgtgcttcatagaatgcaaaggtaagtgggctttccactggcacctactttgtaatggacatttgattataggcacttggctgagaggcctgtacattttttaacatatttaccttctgacttttcatttcttatctgcatatggttgttacctacacctgggattcgtaaaagttcatcaggaaagcacatgtaaggtaccagaaacagtgccaggcacagggcagcctctctatagctgtttattcctttctttcctgcttccttcacctataccctctgacacctcagccaggctgctggttgctagtaggtgccaagggaatggtgctgaagtgagtgccctcagagaagagacaagaaagctttctgagtggggtttgaacttcttccctctactctgccagccaactgagctaacagaagttcagcaacagctcaccatttcctttgaatcggtgtctccaattctcagtcttcaaatagctccagcagacagcagggttttgtttttcctttatttagaaccaattatggtctggaaccaatttggtgaaaggtgcctgagttttccttagcaacctaattctgtttgccttatgtgcttgacttttgctgattttcagcccaaattccagctatgtccagtgctcaaaggtggatgccagaggaaaagggctggtgggatcaacctgccccaggtgcttgaacagaaatgctctgggaagaggtagaggggatgctattttttagcatggggctgtgggaagctctggaggctagctgagagccattgctatctttgaggctgtgtgtgtgtgtgtgtgtgtgtgtgtgcacgcgcgtgaaatgctttgccctttgatagtcacaagggtcacccattctttcattctgtcctctgataccttctcaccgccactctcccattactctctatttccactctgctttattgttcatcatagtactcacctctacttggcattatgttgtacagttatttgtttataacgtgtctttccaattaaatgtaagctctttgaaggcagagtcttgcccatgttgctcattgctctattctcagtgccttgagccatacccagtgcatattaggcactcaataaatattcattgaatgaatggatgagtggataggtaaatgtctttggtgtttgggacaccaagcagcaaggtgagaggttattatatgacatgggcttgacaacaggctacatagggaggaaacctggcagattaatgttcttttagtcttttctttctttccttcccttgcctctcatcctctactctatttcacttgttttactatattcttaggatttacctttgggctgttaaataaatttatttaccagtttctaatgatatcttttgacttcttagctatagaagataatacagtagcttcttccttccccttctgttagttatattagatctacattttcagggtttataatatttacctgtttttaatcataaatcccaacttgctttagtcttagtcctacatttaaatagattcagtcttcttcactaggcctttgctgttgttttccattcaactcttgggtggctgaaaacttcttcccctaatagtttcttcaagacataacaaaatgtcttgaattgttgtaagttcaaatatggttcatttcttttataatgaatgatagtttttgctgggtataaaatttttgagtcacactgttttttggaggactagtaccaaaggtatcactccactatcttctaatggtaaatgatacaatggtaaagtctgaggccaatctcatttttccccatcataaggaaggagtgactgcctgcccaaatattctttctttatctttggagtctcataaatgtactagattatggttgtcacttttttccaggatactctgtgactttcaagatgtagtcaagtacaatgtattcaagtcttcttttatttctggaaaatgtattgagttacacctttaaatattcttttatgtcttttgctaatcttccttacctatcattttctttctaatccctttaaatttcttatttccatttcattctgttcttacttttttcaatcactgttctttcctttctgtttctttctgtatttttttaaattatactttaagttctagggtacatgtgcacagcatgcaggtttgatacataggtatacatgtgccatgttggtttgctgcaccaatcaactcatcatttacattaggtgtttctcctaatgctatccctcccccagtcccccaccccccaataggccccagtgtttgatgttccctgtcctgtgtccaagtgatctctttgttcaattcccacctatgagtgagaacatgcggtgtttgtttttctgtccttgtgatagttagcggagaatgacggtttccagcttcattcatgtccctgaaaaggacatgaactcattctttttttatggctgcatagtattccacgctgtatatatgccacattttcttaatccagttctattcattgatggatatttgtgttggttctaagtctttgctattgtaaatagtgctgcaataaacatacatgtgcatgtgtctttatggtagcatgctttataatcctttgggcttatacccagtaatgggattgctgggtcaaatggtaattctagttctacatccttgaggaatcaccacactgtcttctacaatggttgaagtaatttacactcccaccaacagtgtaaaagtgttcctatttctctacatcctctccagcatctgttgtttcctgactttttaatgattgacattctaactgatgtgagatggtatctcattgtggttttgatttgcatttctctgatgaccagtgatgatgagcattttttcatgtgtctgttggtggcatagatgtcttcttttgagaagtgtctgttcatatcctttgcctaattttgttggggttgtttgttttttacttgtaaatttgtttgagttttttgtagtgtttggatattagccttttgtcagatgagtagattgcaaaaattttttcccattctgtaggttgcctgttcactctgacagtagtttcttttgctgtgcagaagctctttagtttaattagatcccatttatctattttggcttttgttgccattgcttttggtgttttagtcatgaggtccttgcccatgcctatgtcctgaatgatattccctaggttttcttctagtgcttttaggttttaggtctaacatttaagtctttaatccatcttgaattaatttttgtataaggtgtaatgaagggatccagtttcagctttctgcatatggctagtcagttttcccagcaccatttattaaatagggatgccctttccccatttcttgtttttgtcaggttggtcaaagatcagatggttgtagatatttggtgttatttctgaggcctctcttctgtttcattggtctatatgtctgttttggtatcagcaccatgctgttttggttactgtagcctcgtagtatagtttaaagtcaggtagtgtgatgcctccagctttgttcctttggcttaggattgtcctggcaatgtgggctcttttttggttccatatgaactttaaagtagttttttccaattctgtgaagaaagtaataggtagcttgatgcagatggcattgaatctataaattactttgggcagtatggccattttcatgatattgattcttcctatccatgatcatggaatgttcttccatttgtttgtgtcctcttttattttgttgagctgtgctttgtagttctccttgaagaggtccttcacatcccttgtaaattgaattcctaggtattttattctctttgtagcaattgtgaatgggagttcactcattatttggctctctgtttgtctgttaatggtgtataggaatgcttgtgatttttgcacattgattttgtatcctgagactttgcttaagttgcttatcagattaaggagattttgggctgagatgatggggttttctaaatatacaatcaggtaatctgcaaacaggaacaatttgacttcctcatttcctaattgaataccctttatttctttctcttgcctgattgccctggccagaacgtccaacactatgttgaataggagtggtgagagagggcatccttgtcttgtgccagttttcaaagggaatacttccagtttttacccattcagtatgatattggttgtgggtttgtcataaatagctcttattattttgagatacgttccatcaatacctagtttattgagagtttttagcatgatgggttgttgaattttgtcaaaggccttttctgcatctattgagataatcatgtggtttttgtcattggttctgtttatgtatggattatgtttattgatttgcatgtgtcgaaccagccttgcatcccagggatgaagccgacttgatcatggtagataagatttttgatgtgctgctggatttggtttgccagtattatattgaggatttttgcgttgatgttcatcagggatattggtctaaaattctctttttttgttgtgtctctgccagcctttggtatcaggatgatgttggcctcataaaatgaattagggaggattctctctttttctattgattggaatagtttcagaaggaatggtaccagttcctccttgtacctctggtagaattcggctgtgaacctgtctggtcctggacttttttgtgttggtaggctattaattattgcctcaatttcagaacctgtaattggtcttttcagagattcgacttcttcctggtttagtcttgggagggtgtatgtgtccaggaatttatccatttcttctagattttctagtttatttgcatagaggtgtttatagtattctctgatggtagtttgtatttctgtgggattggtggtgatagcccctttatgattttttattgtgtctatttgattcttctctcttttcttctttattagtcttgctagtggtctatcaattttgttgatcttttcaaaacaccagctcctggagtcattgaattttgaagggttttttgtttctctatctctttcagttctgctctgatcttagttatttcttgccttctgctaacttttgaatgtgtttgctcttgcttctctagttcttttaattgtgatgttagggtgtcaattttcgatctttcctgctttctcttgtgggcatttagtgctataaatttccctctacacactgctttaaatgtgtcccagagattctggtatgttgtgtctttgttctcattggtttcgaagagcatctttatttctgcgttcattttgttatgtacccagtagtcattcaggagcaggttgttcagtttccatgtagttgtgcggttttgagtgagtttcttaatcctgggttctaatttgattgcactggggtctgagacagtttgttgtgatttctcttgttttacatttgctgaggagtgctttacttacaattatgttgtcagttttaggataagtgtgatgtggtgctgagaagaatgtatattctgtttatttggggtggagaattctgtagatgtctatgaggtctgcttgttgcagatctgagttcaagtcctggatatccttgttaaccttctgtctcattgatctgtctaatattgacagtggggtgttaaagtctccaattattgtatgggagtctaagtctctttgtaggtctctaaggccttgctttatggatctgggtgctcctgtattgggtggatatatatttaggatagttatctcttcttgttgaattgatccctttaccattatgtaatggccttctttgtctcttttgatctttgttggtttaaagtctgttttatcagagattaggattgcaacccctgctttttttttttttttccatttgcttggtagatcttcctccatccctttattttgagactatgtgcatctttgcacatgagatgggtctcctgaatacagcacactgatgggtcttgactctttatccaatttaccagtgtgtgtcttttaattggggcatttggcccatttacatttaagggtaatactgttatgtgtgaatctgatcatgtcattatgatgtttgctgtttattttgcccgttcattgatgcagtttcttcatagcatcgatggtcttttcaatttggcatgtttttgcagtggctggtaccagttgtttctttccatgtttagtgcttccttcaggagctcttgtaagtcaggccttgtggtgacaacatctctcagcatttgcttgtctgtaaaggattttatttctccttcacttatgaagcttagtttggctggatatgaaattctgggttgaaaattcttttctttaagcatgttgaatattggctcctactctcttctggcttgtagggtttctgccgagagatccgctgttagtctgatgggcttccctttgtggataacttgacgtttctctctggctgcccttaacactttttctttcatttcaaccttagtgaatctgacaattatgtgtcttggggtggctctcctcgaggagtatctttgttgtattctttatatttcctgaattggaatgctggcctgccttgctaggttggagaagttctcctggataatatcctgaagagtgttttccaacttggttccattcttcccatcactttaagggacacaaatcaaatgtagatttgatcttttcacatagtcccatatttcttggaggttttgttcatttcttcttactcttttttctctaaccttgtcttctcactttatttcattaatttgatcttcaatcactgaaacccttacttccacttgatggaatcagctattgaagcttatgcgtgcatcatgaagttctcgtgctatgattttcagctccatcagttcatttaaggtcttctctacactgtttattcgagttaaccatcgtctaatctttttttaaggtttttagcttccttgcgatgggttcgaatgtcctcctttagcttggagaagtttgttattaccgaccttctgaagcctacttctgttaactcatcaaagtcattctctgtccagctttgttccattgctgtccatatgtggtgtcagtcagcccctactgggaggtgtctcccagttaggctacacggggttcagggacccacttgaggaggcagtctgtctgttctcagagctcaaacgtcgtgctgggagaaccactgctctcttcagagctgtcagacagggacgtttaagtctgcagaagttgtctgctgccttttcttcagctatgttttgcccacagaggtggagtctagaggcagtaggccttgttgagctgtggtgggctccgcccagtttgagcttcccagccactttgtttagttactcaagccccagcagtggtggacacccctcccctagccaggctgccacctcacagttcgatcttggactgctgcgctagcagtgagcaaggctccgtgggtgtgggacctgctgagccaggcatgggaaagaatctccttgtctgccagttgctaagaccttgggaaaagcacagtatttgggtggaagtgtcctgtttttccaggtagtctgtcacggcttcccttggctaggaaagggaaatctcctgaccccttgcacatcctgggtgagacgatgccctgccctgcttcagctcaccctctgtgggctgcacccactgtccaaccagtcccaatgagatgaaccaggtacctcagttggaagtgcagaaatcacctgtcttctgcatcagtcatgctgggagctgcagactggagctgttcctatttggccatcttctgtattcttaccagtcttgttttacttgtgttgcttcaattttgcctttatttctataatgtttttattttttaaaaaaaattcacttatttccagatttttcttagctcatatttcaaattcttctatcttatcacattttccatgagctcatatatatctactttacctctctctctctctctctcggtgtgtttgtgtgtgtgtgtgtgtgtgtgtgtgtgtgtgtgtgtaagtgcttcattaagtttttcaaaaatcatgacaaagtatttagtcacattttttgtatctgctccatggcaatagttctctgctgaatgtttttttgtttgccattacttttcatatttctttgcttatttttcctataatattgctttatagagcctgtagtttttccttcttgatgacaaagttttgaattctttgaattttccccccaggccatttgtaggaaatttgtgtagggaagagaagagaaccacattgcattcaaggaaaaatttttcttcactgcagtgttttgtatgaatccttttagccttcacctctgtccagtcaataaagatgagcaattatagagctgttcacaatgccaaatctctctcctccccaactcatgtgggaagactttttttctgcatatatgacatatctgtgtgtctccttattcaacccattttcacctgtttctcagaatacagctggttccaaagagacattgttgactgcattttagagcccatttccattgttgaaagtaagggattctgattctacacctctgggttgctcctcactttacagtgtacctttttcactccttcctaaaacagcaaccaaagaatatcctctctctgtttctgggctctgctatttttggtgtcctctctatttacttcatgttttacagttccatgtctcctaggttcatcacaggtagaatttgtgtttgtgtctcttgtttagagttattgttaaaaagggaagattgaatgttagtcatgtgctaccatatccaggtgggaaaacctcagccctttttgagaaatctctttcttcattaatagaaagcctgttttccaactctcctgattctccaggaagcagctgttttcttttctcgttctctccctctccaggtttccaagtgaggccagattccttgttcctcaaaaggctttaccctgaccacccatgcctgaatcctcattgtgctcagattccacactgggtgtagcttctactgctttgattgcaccacctttttgtatgtgtatattcctttttgtctaaataatagggcatttagggacatggtctggggcagaaacactctgtatcctctctgctactagcatgtcactccatgttgtaggtgctgcatacatgatcatgaattattcccttctagggaattcttattgaattagatagctgtgtacttggcatgcattatatttgacacatactcagtcacgaagacttgataatgcatagactgcttctgataaagaactgtgggtaagtgccctcttgaacttatatgacactgagcaatgtcattagaaataacttcagcttttagttgtctccaggattacgtagatcagtgatccttccaaaacgatacctgctagttacagcctttgggatcaaatcacaatgttcctggtagcctgcatcctgcatactttagtcatgttccagagtatcagacctaaaagtaaaaggagctaatgaggccagtgactctcacagggtttcccactgcttcctaagtagaagcattttaaaatttgggattttagggtaaatggtttgaaaaacaaacaaatgaaaaacctgcataggattctagtataacttcctagcaatatgtctcctcatctctacccttgctcccagactcctaaagatccctggtttagtccgatgcctgtgttttagctgtagaaagctggcacagaggggcacagtaactcatttaaggtcatacatcctatgcatttttcctgaatggctgtaccatttttgcccttcatgtagtccacagatggacaatttcttgatagatgaatctgatgtgtctgaaagttggcttatgctaaagttaggcttgatgtctgggctgggggagaggggagaagatgctgttgtagaaaaaaaggagtcattggagtagaatggaaaatgtacatttgacaccaatcaataagccaatgcttaaactgagatttccaaacatgataaaggggtggaaaagataaaatagtaattcaaaccatagcagcctccttgaccccagtcagtaggagactcagtggaacaaatggttgcttttccaaattaaaaaagaaaaaaaggtggcagaggttaatttccagtttctgggaaggtgtgcttaaaacatgatggatttgaagactctgccaacaatttctctgtctctgtcttttttttttccttacctttaactttcctgtttctgaaattctagtcatttttatttcattcagtatcaataaggtgcctacatggtaaccccagatgggaaagagatgcataaccccagagcacagccagctctgggcaggggcttgctcggggttgggctttgggtgtatgggtcagcaaagccgagagcaggctgccagggacatcctggaactcgttggcacagcccaggattttacatacttggcaagggagtggactgagaaggatagaggggtgtaacctgtgctgggtttggagatagggaactgggatgtatgagtaacttggaggatgtggactgacccttccaaggaaattccaaagccatctggctcccttggtaatgcttgccctagaataatcgtataagacccttgtgggtagtattctcattctgcagataaggaaaatgggatgctaataaatgaaatgacatccttgtgttacaaaagtcactctaaacaagtctcagtctacagccctcgactctgggctcttacctcacaactctctctactctatcacagagctggctttttctctgtgttaccaccggcagttttttcctagacttgctagctgcctagtatcgtgctcaaggtactgccatgtatacagtagttacaacattaattccagctgaagaggagcttattttaaaatattattgaatgtattttcaattttgaaagtaatataccaaaattcagaacatttagaaaaccataagatcaagaaacatttaaaataatctcaggctgctaacacaacagctgtaatcattttggtctgtgggtttttggtcattttcctcatacatttagcatttggaaaaatctgttgaaaaccatattgcacatacaatttcatttcttgctgttttcatatagctttttgtcgtaaatcccccatcacaactttaatggcaggagaatatttgtgaggagcttaatcatgaagcatttactaatcatagtattaaagcatttgattatattagttcaataagtatctgtcaagcaccttgtgcccaggctctcctggcagccattgccccagtgacagtcaccttgctgtgccgagggatttggaatactcagaaccacatgagtcagagccccacacacattagtgagaaccccccatatgttaatggaagccccagactttcattctggctcttcttccatcagtgggccatattcaggctggctgaggccaagatgcaacgcagtaagattaccatgggcccgtctaacattttctttataaattcatctccatgactgttttaatcacctcttattagccctgctcatgagggagggactcctggcctaggtttctggagatagccaaatatataatacccaacactggacagatgagatgtacagcagtttattaagtcacatttgctcacagcccagggaggacaccatgttgcatgcagggcctcacaaaggttgcactcaggaacagagtagaccaccagaggccacggacagcaggccttgtagtatcaagaggttgtggtgctccctgtttcttgtgaaaggatatgattggcttgtttgaataattttgcaggctggcacagaactgaaacctacttctcaggggtaaactgtaactgtgcctggtccctttgataagaagggttgttgggctaggggaccttatctaagggggcagagtagggaggggaagtggctgttaggccattcaaggccctcctgattttaccagatgtcaaggcagcacctaataatgaggcttaatgttacatcttacaccacaatgacaagaactgcttttcctgcctccattttctacagctctttcctcctacattttttttaaacactctggcctttgctgacttttctttgtgcagctgtctaatagtatagagtttaaagtcagccaaccaggcagtccaggctcagccacacactagcctgatggcattagacaaatcacttcacctctctctgccttggtttcctcatttgtgaaatggagatgatggtactaaaagtccttacctcacacagtttttgtgagaactaaataatacagataaagcatttagaatagcatctatatatgctatgtaggtacaaatattcctatttttacttataagtttataataataatgtgattctgctcttttcagcctttctactccctttctccaaggtaaacttaccacaagcatgtttccagaaaatgtactctgttcattcattcatgtatttcttcatttgttcatccattcagtcaacaaatatttaagatcctctgtcgtgcaccaggcactgttctaggtggcagaatccatcagacaatgaaactgacaagcaccttaggagctggggcttagtgtgaaagtgggtagacagaagataggcaagtatataaactgaaaggtagttatgactggcaaagagtgctctgaaggaagaaaataaaatgaaaaggaagccatcagagagacagcttggtttccttatacaaggcactgagagaaagcagggctagggttctctggtattacaggggtggtgtgaggtctttggagggcaacaacctctgttctcttgcttggtgaaagatacaagattcattaagattgtcttcctaagagtcgggtctttttttttttttttggtcttctttaaggctcttccctccccacttccctggccatctctttcctcctgtcaagaaaggtcctatcttgttagcccagtttatgcatcgattttggtctagagtcagggaaattaatagggaaagacaggagaagagaggcaagaaaaaggagaaggacctgctgtgtgaagttaaactcagtttataaaataagaagctttacaggagtgcagagagaggttcaaggaaaacaagccccagtgttatttattagttatgtattgctatataacaaaccactccaaaatttggtagcttgaaacaacagtgatttattatttctcacaatcctgtgaattgacagttaatgtctctgctggttttgcttgggctcactcgttcaaccacgggatgggcaggactggaatatccgagatgggctcattcacttgtttgcaagttggtgcaggctgcaggcttggacattttgatgtcttcatcctctaggaggccagaccaacttcctgtaagcagcctcagggcagcattccaagatgatgaaggcagaaattgcaagacgtcttcagtcctaggttctgaaactcacacagtgtcacttctgccacattctattggtcacaggaagtcacaaagccagcccagattccagctggtgagatagatgttaaattaaaaatcacgtagttcttatttttgaagctgtgaaagggagctgaagaagaagtatcacatgagcttatccatgacgaacgacatgcccaacactgagccatcatctggattgatttacttccccttgcttgggatcatgcatatacagacatggctgttggtgttcagttgtgtggtaaaagtttaacatagcagccttgaagctggtgtccttagagaagctcgtgtgcaggattggcctatgacgggcatctgggaacttgaatctcaggaggatcccagtattccctaaggatagtgcagtatgcctagactatttgtacaaacaacctagtttattctgatcactcatttctagctaggaatctggaccattggtgcattttagacaaatggtatccatgagagaagcccacattaaaaaccttcagcactaagtctctcactagcttctcagggcagaaacatctcactcatgctgctgcagtttgttgctcagggaaaagtgggctgtatgtgagctctcaggggaaggagagagaataagcaagcttgtgcatggatttccccagacccagcctgtgtccttccctcctatgacccggcagtatatccttccaacattgctgcaataaattgtagtcaagagtacaactacatactgagtcccactagtccttctagcaaacctccaaatgtagaggtgctcttggagactctagcatattagtcttgttctcttacacgttttgtcttctatgaagatgggagccaattcccagggggcatggggcaataccagaaaattaccttgagggattttatgctaagaaggaaatgatgtcctgtgtcccttaaaccaagaggtcctagcaggcctggtggctgtaagccaatgtttcaaaatgatgatttgacttgcttattcacaaaatttgtttggatttgagacataattcatttaattagtagcaaacaggtggtaatttggaatatgtgaaagtgattggttctctctgaaacctcaaggaacagcatctttcactcaatgagaaggttaaaacaaaagcaaaaaaaaaagaaagaagtccctttgtcctgatcagatctgggcagtcgcctggacaaatctgtaaggatagattaccaggattgtctctacagaggagttccccttttccttgcttctaaaccaggtgtcgtccatcaaccagtcctctggagcccaggaactctggggcctgtaactacagtggagggaaagttagccatggaatgcaacttcccctagtctccctgtaccccctctccaaactatcatgctgctggtattggcaatgaaactgtctgtgagtgcattggcactgttgtacagtaagtaatcacagccattactgtttcctggggagtccctggatggcaaagagcatggtagccaataaggaggcaaagagcatggtagcctaggaggaggcatacacatctcccttggcaggtttacagtggagttgtcaaacatgctaaggttgtcacagcgtttgaaggagaactacttactgctttggaatgggaagagggttgcataaaacaaaaagtataggatttagaatttaacagaggtgggtttctttttttgcctaccacttaatagcttatatgacctcaggaaggttaattaacctctctgatccttaacatcacaaactcagagtggttgtgcaagtaaaatgaggtggtgtatataatgtatctgaactgttgcttagcataaaataactgcttcttaaacttgggtgatgaaaatatgatatatttttatttttgcttatatgtatagtattgatgaaattttctgtaatgaacaaatatttgttttataatgagaaaaaagaggattttttttaaaagcttaaagcctattttctttccttgccagccttgcaggctgtgtcttggctgagcctttctgagtcattcatgcttagcatactcttgagcttggctgtctctgagcagtcattgtacagtaacatccacaggggtttggaagggttcatgtcttaactgaatgactgaagaactgtttgtcactgacataggtaaagtacctcaaatattttctcaatatttcagtaattataatttgaattaatttttcatccagaatcattttctcttagcagagtcgctatcacaacatttaaaaagaaagagagaaagataaaacctatactttctggatgattgtcctttttttcaaatttgagtttccttgcgatttatcttttgtttcctttccagctaggaatgaaatgcatttttcaggaaaggtcagggtaggctccagcaaactttgtagctctggggaacattcccagggccagggttgactgagttctgtggtgtctgttgagaaaatctctggcaagtcaggcttctgggctgctcctctcctgcagggtaagtacaaagagggcagcataacccccaggctaacaggcctggacccttttgaggaaactaaacacataggcagagtgagctgagtgagaactcctactgtgtgcaaattagttgctgggtgtcctctggtcttttctttaagtctataacattttagatggagaatgacaggtagaaaatttcagggctgttttttttattgcaaatgtgtagaggaccaagagtggcatctgtgcccagagagcacttggcctctcaacaacttgagctagtacattctgacttgcattatgattactcttcagtatgcaggagctctccctcccacactagagtgtgaactgatttctcctgcgtgacaaggtcaccccataacttcatgttttatatttttttaacatttttaaagtacctgccaaaaaatggtgcttatatgtgtttgctaattgacagtaataccctagtaggagttgtaggcagtgaagaaatattaagcaacagccaatattataagaaattttcttggaccccttttggagtcaaagagaaccattacaatgtcttagtcttatgggagggccaagaggagtgtgtcagtctacaggcaggtgttgagcatagattcatggacctagcagagcactggctcctgtggggcaatcaaaagctgcagacaagcactgtggttgcagcagaaggccattatcctaaatggactaatgcaagaacagaaaaccaaatactgcatgttctcgcttataagtgagaactaaactttgggtactcatggacgtaaagatggcaacagcagaaactgaggactactagagagggagggtcagagcagggaaagggttgaaaaagtaactattgggtactatgctcagtatctgaatgatgagatcattcataccccaaacctcagtatcacacagtatagccaggaaacaaacttgtgcatgtaccctctgaatctaaaataaaagttgaaaaaagaaaagtatttttgaatgaatacatcaatgaatgaaaatgaaaaaatgctgcagacacaatctctccatagtcaagttggtgagctacagttactgctcatgaaactttaatgaataataaagatgatgtatacttttaccctaagctgtatggtactaaagtcagtgaaggcagggaacatagtggcccagaacagttaggaaggttttctggaggaagccagaatgaaactgggatacaagggtcagttggtatctatatttatttactcttcatacccctttagagggagtctgcttccacttttcagaagcctcagagaattttccaggaggaattagatcatgtacccagtagccctgagctaataaaatctggttgttaaattccacccttttctcattctccctcaagggtcttgtaatataatttgcatttctcaaatctcagctcctggtaccattttcttagaagtcctgcctcccagcacctcccaacactctgcctgatacttggcatgatgggaaattctttttttttctgctaatatttgtgcaggtcccatgaaaataaacaatctccaaaattgaacttgacccaaccaacatatttcaagtacctgtggtttcactatgtgtatataaatgcagatgcaacagtgaacagtttcctgtcctcaaaaagagtttaccttctagaccaggaaaagaaacaactatactgcagatagaatgtgagagaagctacaacaaagaaggatgagattaactgcaataggggaagcttttgtggaggggataggactggggctagtccataatgagcacctgaaatttacctatatggaagtggcagggtgggagagagggacatgctagtcagagggtacattgtggacaggcacacagaggtgaccagtgcagaaatggtccaggtttggctgaggctagggatgtgaatgagtgtcatggcagtgaagactggaatgatgaattgagtttggaacgtgagactgagaggttgggccctatactttgggtcaacccaacctttgcccaaagggttttaaacagaaaacagaggtgaattttaggctgctgctctggccatagcttacgtgtgcagtggaagcaggaggtggttacagatggaaggtggggcagggcaggtctctgtctggcagtcactggtgcaggtcgttatgaaggctgaaagtagggtagtggcgatgggcctggaaaaaggggacagatgagagagaggaggcagggtgacctttgcttgtctttcctcctccccaggtgagatacattgtcacgtaggcagtcatttcaggattgcaggaagctaatgatttttccccacaatgttgctggcttccaaccagagaatgttgcccttgagatttgacaatgactgttgcctccttggcagcgattctgaatcaagggcaggagtcagccttgctgggaagttgttcagttgattcaaagggcttgggacatgtctctgagactgtaggtggcaattcctgcaagttgcttcattccgttgtgtctttcccttgggtggagcctcctcttgccctctgagtggggccagaggcccagttccatccccctgtaggcatcagaaaagggctgcttcctgtgttcagtttagagctctttaaagcccctgctgacagatcctattcaagctaaaatgagtggctgggggcaactcatacataatttccttctatgtagtgacttcctgcaccatggggtctgcatgatttctgttcatttaatgaaaggttatattggcaaattgttatccttgggagtgtgggtgtgcagggagtgcttttggaatacattacagggtaattccctttgccctttattgcctctgcaggccatgtgtaattgaatcgcaaataacacactttagaaacaggcagagagactgaggcctgagcgtcctttggctttaatgagacagtgagcgtgtgtgtgtaaacgaccctctggttatgcgggccaggtggaagaggtagtcgtataactaatgggagtgatttttctccacctgccccagacagtgcaatcagcagccttcactcccgcagggagggtctcaatccagtggctggctctgcctttgaaacatccagagggcccattactgttaataggagcctctcccgagcacctgctagagactacctcacttacatgctggctggtggggttgaggtggccccatgcaactttcccgttctcatctccctccccagaggaggctgctgtgcccgaagttctgtgcatgaggaaaacaccaacagggggaaactgttacggcaaagttgcccactctcagaggagttggcaaaagtctgtgaagttcagagaatgcaaggtctttaagtgtggggaggtgaaagggtgggatgcagcaggggattaaaggcaagcagtgattacatgagacggtgtgatgtcttaggacactcagcactgacccccaactgggcaagagctgtgatcacaggtggatatggccacctctagtctaagaagtgtttgtccctgaatttgagggactgggtgttaatacctttgtgccccataacatccttccagttagtggtggcaccagcatttctgcagagcagaggtgtgagactgccatttgtgagggatgggagtgctatggagggaggagatgaaggtagacaggtgttcattttcagtagggtagttagggtgggcctcgatgaggtgacattgcaacaagtcttgaggaggtgaggcagttagtgatgaagacgtctggggaaagactgttccaggctgagggaccatggtggtgttggcacttcctaaagcagctgtaggcctgggtgatccaggactacaaaatgaacggggcaagtagggtgccgagaggtggggttggagatggattataaagtgctctgttggccgctgtaaggatgctggcttctattctgagtaaagggtgagccattgtggttgttgagctgtggagtgatatgaaacagaaatgaaaatagacgatccagtaaaatgaggaaaatgtatagatccagttgtacaaaggaagcatttgttggggggcagggagaggggctgtctatcccagcctgggcaggggagacagggagggcacggaaaggcttcctgggtgggcgggggagggtgtcagctgcatttgtccagggtcttaaatgatgggccagcctgtgacctcccaacccccacctgacactgtttctgtaaccaaggcagcaagggactagtttctctcctgtggattcttgggcaatttgtgtggtcctgtttgcaacctctgtgtgtgggaatcaatctatgcctcatcctttgggcataacctttgcttggaatccactttctatccactgacccttggcaaatcagtacccatgtggatatcttgcctagcaggatttccttacatgctaatgtgttactgagcactgcaatcccagggcagtgggagtgtggggcaaagaaagtgaggccagggaagtaggcaaagtagaagcaagggggtctgttgcaagctagccacagcctcacaagaaaatatagccagttttctggtcacatgagatgtgaccaggaaatgagatgagaatagtccatccagttagaggaagagagaacaatttatttgttggcacctgcctgtctcctcatactcattgataaagctctagtccatgaggatatagacctgttctactggcatgagtgcctaaagtggccacatggtagatagagcttcaagctcagtggaagctttactgtatccactagtcggtgcaacctctctaggaacctggtagagtcaaagtatgtggggttaggatgcacagcctccacaaatatttcataggggtggtggttagaatgacctctcctacttccatcacttggttcctgggtcagtttattgtagctgttgggaacacagtgtcacatgtcagccactggtttatcacctacaccacatcttgaaaggtagggcccagcccagcaaggagtttttttttttttttttcttccccataactcgttgccttaacttcactttcaataggctgctatgccattctgtcagtcagattgactctggggatggcaaagattagttagccccaggtcattgtcgtacttcctttgcaataaaatgggtcgcttggtgtgagacaatgttttcggttaactttcagtagatcaggcattttataagcctttgctcaggatttccaacaaaagctctgcaagccaggcagaatacccaagtccgcaatgtgtatcaacttcagcagggatagaccaatgttctttcccatgtggaaggggctcaatataatccacctgccaccaggttggtcttctcaaggaatggtgccatattgaggactcaacatcagtctgtgctgttgacaaattgggcattcagcaatgataacagatagatcagcactggtgagcaggagcccatgatgtttggtccatgcacagcctccattcctgggcaagtagtagggagtggaagagagatgccagctgacattcattaacatcatcttgtctaacttggctcctgagaactttatctggagtagattctctgccatggaaattcatgtgagatacaaagattttcaagcattgtgagcccttctgtaggtccctccaggcctccttgctgctggccttccaggtgtattccatccagctcctgacctatcagcaaatccacttgccactcccagaagttgatatctgcaccacaggccatgtttccctgaatacaaagtggatgactgagtgtctgccagaagctttgcttcctgggaggccactcttgagtgaggctatagttcagccacagtccatcttcaatgccaacatttcctgcaactcacctgtgaaccaggcccaggtccattctcctccatccgttggtcatagggaatggaaacccacatatatggaatgaaaaaaatggtgttggtactacagaggtaagtgacatggtagtgacctgaccatgaacttactttttcacgcaacttatactctgcatctgcttgagtctagtaccaaatataccactttaatcatataatggattgtgactacacgcacttggccttatgacttggtggatatagtattacttagcttgtaatggaggtcatacagtctagtgtttcaaggtcaaatgttagtttcagctagaactcagtaacacaagggagctattttttcaagtagaggacgtggccttgattaagaactctctaggtctgccctgagagtctcatatttgagcttgcccagcatccttatccaccgtgaacccccctgcaccaccagatttgctgcaacatacaggtcaagtagctgggcagcttgtgccactgcctgaacctgctacagagttctctgttcccctggtatcttcctgaatcaccgggtaaataaatttgagcagttttccaaagtgtggtaaacactgccttaaaattcaatgaatttcaatgagtgctgttcttcttttgtagtagcaggtgttctaggagcaaggatttctcctttagagcagtgtcccagcatgctccaagtcactggaagctctaaaaatgtcactgatttggcaggtcctaagtatttgtggcatttatctcccaccttccaccatgtatgtgttctcttagtaaattatctaagccacttcctgctcccccatgcaattattataacatcaagataatggacccatgtgatgttctgcagaatgtcaaggcaatcaagttccttgaggactagattatgacaagaaaattaacatagccctaaagctattatgttgaaggtgtactgtagtccttgccatggaaagactacagtactttgatgccatcactaatggatattgaaaaaaaaagcatttatcaactcagtagcaatatattcagtaccagagtccatgctaatctgcttcaggaagtatgttattttatctaacttatcagttagcattgcgactaccacttggctaattgtacggtagcttatggccatctgctatgctccatctggtttctgcagaggccacagatgaattgagagacatgatgtagaccactatctctgcctctttcagatttttggttgtggcactaatctcttcagttgttacaggaatgcagtattgcatccaatttatccaggcagaaaagaggggtagtttcagggggctgcatttagcctttattaccataacggctcttcctccacagtcagggaagaaacgtgagggtcttgctagttactaagtatctctataccaactacacacttagtgactgggaaataatccagtgtgggtcagtggacaggcacatgtgactcaggctaaagcactacgacatgacatcagtgtgtcctcacttcagtcagaggagcatggtgagtttttgaggtcctttggtattagtgtcagctcagaccctctatttaacagttaatgaaatttctgggttttctcttttctcaaaggcgaagttacccagcaaatgttttctttggggtgataattagaggcatattttctgcatatctctgcactggtgttacacaattcttcctcaaggaaacctaatcttttcttcagtctgctgtctactacctctcatggcctctagaccaataaccagtgccaggacttagcacagcttgagtaggggtgcacaagccctgttctaggaagtaatagatggtacctggaagggactgtaggacgtggctaatatatgctttggatatggagctttgggtctgtgagctgacttacgtctggaaactgggtgaggggactgtgattttctgctgtggaaactgatgacaaccttcagctcaccagcttgtgcatgcatgcgtggagtgtttgtgtgtgtgtgtttatttttgattgtacaaatcaagcaacaccctagtcaactgcccatctatcttgccccttgaaacaccatcaccatagatttctattgatcgaggcagcccagttgctactccagccttgctgcacattatgctaacgatgttaagggctgcttcctggcctttgccattttgggaacccattattgcctttagattaaggatctcggttccatggcagcatattcatggcaattcctgcctgcagtggacagccgccataaagaatctcaatgattcttgtgcccccttgatcagtacatttcttattgccttgttgaaggaagtgccctttgagtcctctcagagaatttatcatgtgatggggtctcaggttttacagagtaaatccactctaacagttccatccctctgtgccttctgaccccttcttcagaactatgctgaggaagtttcaatatcttcacccaatttactgtaggccatcattctgctcatggttcaaggagccctcccagtatggtatcaggactggttccaggtatccttatcagctaattgaatcccaagtctcaggttaatgttctcatgtcaatcaccatccccatctgtccctttcctttgctgagtagtctcttcaccctcaagagtcactcctgcatgcttgttcatgaacactgctagtatgtgttagcaaagttctacagttcatctagtatatagtctactacttcatagaatagggcctgtatatcactgtgcatgcatgctggcactggctattggtctggaggtcatgaggggtagttgggggcagatcttgggaagaataaataccattctgccatgcacctatttccaataatatcagtacgtgatctttcgacaagttgattgagggaggtgggggaactgttttcctctggcaatggggagaagcttctttggctggcccagagggttcaagattctccagcttaactacacgaatacccccacaccaggtttcgtagtcccacccttactcgttagggctctgattgtgacatacgagacaggtcgaggctgcacatttgacctactttgaaaatttaccacatggaaaagtcatgatctgggtctgattttcagtgcagttggccctgaagctgcaggagacaagagtctctttttctatggatacagaatctttgcacttttagaatatgcctgaagccagcaattagctggcttggtttcattttctttttgcaagacctcaaatgctttcacaaatagccatttcacactcccatcctcatagttgtcattatcttctgccaatcaaatgatgcagccatttgaccttccagtgtcttgcactttacctgcacctcatctcaatcaactgcaggtgaaagcttgactaattgtgatgtcaccacatgccacttagcagcagcagagggattctttttttttttctctttttagacaaatgagtatcaagaactgtgaagagtctgagattacactctagtttcaagccaacaccttacctttccacattcatggatactgaaggaagacaaagtcctttaactcgggcctagtagtgtcatgtcatttataaaagaccaaaggtgaattgtatcccaacagtcagtattccaactccaaaatcttataccgaggatgtcctggttccaaagtttctggttcgaagtccctagaaaacaaaacctgaggcaaaatgtatttcttcatgtatattgaaagatatattcccaggctgggcacggtggctcacgcctgtaatcccagcactttgggaggccgaggtgggtggattacttgaggtcaggagttcaagaccagcctgggcaacatggtgaaaccctgtctccactaaaaatacaaaaattagctgggcgtggtggtgggtgcctgtaatcccagctactcaggaggctgaggcaggagaatcacttgaacccgggaggtggaggttgcagtgagccgagatcatgccactgcactccagcctgggtaacagagcaagactccatctcaaaaaaaaaaaaaaaaaaaaaaaaaaagatagatatgtaaagatatgttcccagggcactgataacatggcgggaaaaggaagtgaggtagggatggaggaaaagcatatgatgctttatcaagctggccacagtatcacagacaaagacaaatgtaaaggagtccatttctcggctctgtaggacaggctgttattccttagaacagtcattcgtgggaaggaagggaaaggttggctctgccaattccttcccacagaggcactcctctgtgtagacactccatcctacccttcccagttgttgctgatggcctctccaggcagcctctggggaagtgagattcaaggccccacagtatttgcctctggctgtggtgggctatggtccccctctgcctgctcttctgcctctgacactaaccatccatgattctcgagatgctatcccatctgtttttacatggacccagtgggaataataattgctgcagtgattattttaaaagaatgttgtaagagagtaaacattttgaaaaattgtatgtgctgtagaaaaactagttgctatttatcagatttctcaaacttgagtcagaagaggaagaggaggcgcctgaacaggactttgaaggacgagtagaagatacatagatgaggacacaaggaagggcttctcaggtggagcattcagaggcgtggaggacaggggtgggagacagcatacaacagggccagcctgagcaacatagtgatatcccatctctacaaaagaggaaatatcagctgggcatggtagcgcatgcctgtggtcccagctactcgggaggctgaggtgagaggctcacgtgagtccatgaggtcgaggctgcagtgagctgtgaatgtgccaatgcactccagcctgggccacagagcaagaccttgtctaaaaaaaaagagccaaggctctgtctcaatcaaagagccaaatccagcccgccaactcattttgtaataagttattgaaacatggccacatccattcacttatgtgtcattgtgggctgtttttctgtagtttcaacagagaccatatggcctttaaaacctaaattatttactctgtggcatgttacagacccctgatgcaaaaggaaatattaagtatattacaaagttggtaattaatgaatataaattgcctttctcttttcatcttcctcctttgtctcacaaagaattgatcacataatggctacatagtaaacactgattagtgaacttagtctttggaaatatatttaataccattgcttactaaacagagttaatcctagaaatttactaatttaaaatcaataccataacctacaaagaatttgaggcattttattctatcccctttacatgaatcatattaataattgagacactgtcccacacataatcaccaactatttgaaatctggctgttctagaaaatctggaattaattgggacttggcattacaatgactctttaaaaaccacaaactgctgaacactgactgcgtttccacaggcagcaaagaaaaagtctgaaacattttctagattccttgaggggaggagttatgtcttatgtgacttggcatagaagggattaataaagaattgctgaataaataaagtgtccagaatagtgccgggcacaggataggttcttggtaaatgtttgttgaattatctggcaaaataatccattgattcaaatgaatgagaattttcaggccacagaacacagatcattgttagacccaagctaatgatctccataggttgcacacaagtaatttaaaatctacatctaatttatttgtcagaatgttgtataaccattggttggccccagatactggatgagcttcccaatcaatactacgtaacaagaaaagctacctgtcaaagacagaaagctcagtcaggagggacctcatggctgtgctgctttaaggctaattaactggtgtctgacatcttccagtaaatctaaattaaatgtattcttgtgaattctaatttcaagtgagtttaattgaacttgggagggaagctaccacttagtgagtaaaatgaaaatgaagtaattgaatatttttccagaattgtatttgaaatgtgctccatcaaatgttgtttcagaacccaagtgaccagctgcacatggttaatatttggaaagggaagaggagtatttaaatgtcagcttgtagccactagaagggtaaatacaatagccggctgttcagttactagatgtgagctctacttggcattcaaagctttttttttttcaagttggaagttcaataatgtgttcaagggaattaagatgagtttggacgactaaagcacaaaaaccaaaaccttctttccccacttctcccccttcccagcacacaaaaaggacagcagtgctgctgatttaaaattgcaggcattttgatgggcttaatcaactgattacacattaaagtgttgaaccctttatttaatgactatttattaaaggcccgtggtattccaggcactgcggaggatagacgattgaacaggacttagtctatggccttaaggaactttttgttccgtagtgagatgagacctgcgaattaagtggtatagaagaggaaaatgtgacgcatatggtaagagcaagcaccaagtgctgaaagaaggtagacttctggctgtgaaaacaaagcactcctctcaggggaggtggtatttgagctgtaaatatttgcagaaggaaaagaaagcatgggacctacttggaggatgatgaagcatttaattgggctggtatggaggatttgtggaatgagacagtacgaaataaaatagctggtgtggttataaagatccttaagtgggtctgtactttattcagtacacggcctctcagcagggaaggggtttgatcagaaacaggaaagaagaatctagatgtaatgctcactatcagaaaaattcaaatccaaaccacaatgtgataccacctcatacctgttaggatggctactatcaaaaaaccagaaaatagcaagtgttggagagcatatggagaaattggaacccttgggcactgttggcaggaatgtaaaatggtacagccactgtggaaaacagtatggagattcttctcaaaattaaaaataaaattactgtattatctagcaatcccacttctggatatatatccaaaaaagttgaaatccaggtctcaaagaaatatttgtagacccacattcatagcagcaccgtttgccatagccaagagaacccttgggcactgttggcaggaatgtaaaatggtacagccactgtggaaaacaccgtttgccatagccaagagatggaagcaacccaaatgtccatcaacagatggtatatacgtgtagtggaatattattcagtcttaaaatggaaggaaataccatcagatactataatgtggatgaaccttaaaggcattatgctaagtgaaataagtcaatcacgaaaagataaatactatatgatttgacttatatgaggtatctaaagttgaaaaattcatagaaacagaaagtaggatggtggttgccagggactaggaggaggaggaaatggcaaattgttgttcagtgggtaaagagtttcagatttgcaagaagaaaaatttctggagctctgtttcacaacagtgtgaatgtacataacactactgaattgtaaacttaaaaatggttaagatggtaaattttttattatgtgggctttcaaaaccataataataataaaaagaatatagatacagcggcatggtatgaattgtattggggttgaaagagagagaaagtgggaaatcagtttagaggctgttgccctaggcttgatgagatgtaactagggcagggacaggaggaaggaagaggagttctcaagatagaattagtaggatttggcacctgcaggaaactcgattgaaggagagtgtcagagatggcttggaggttcccaaccaatgctaacgagaaaatgatggaggctttcccagaaatagtgacttatgtggggagataaggagtttggttttggattaattctgactgcaggttgtggccaattgtgctggagctggtctaattatactgtgtgctaagagctgttggaagctcttttttgtttgttttgcgttttctctcatgtttctatgtgtttgaccttcaacttcttagttggccttgctcaatggtttatccctaacttttcaaattaagggcgagttgcacattttcaaatgtgggtctctcaagagttcgttcactgaatccttcaatctggggttgaatatctacaggattggttgtaaaaattagggagctatgaggctttctttactgaaaaacaccgtttaaaaattttttatcctttttcattagaaatttaatttccaacctggtcaagtgaacacaatgcccttacctttttagtgtggcatcttattcgtctaagctggaagcagcctcagaggtgtgagcttatttctttactttaggcatttcacagggaccagaggtttacaaatgtattcgtgtcggtgctctataaggtcatcacctcaagattcccagagtggtggcagtagtagatttgtaattccaaatctatgtttccacagttgagagaattctgctgaaaatggaaaaggagggtaacgaaatagactggtttcaccttggcatggattggtctacaaagataatcacccatttgagtattgagaagtgtctttttagtgtttgctataccaggaggtaaaagaaacatttggggacattttcaaaggccaggatctgggattggaatgggatgcaattttaaggtcattattctgtcacttatgtcagaaagaatttttgttactgatatttgtgagcaaatgattgcaagtgctgacatgaagttgagctttgtttaacacattgcatacatatttcagccctgaaagactcagatacttagaaaattttccttaggctttggagaacaggttacattttgagacaagatttttatagaacaatatgtgactctgtaagaaattataaatacttttctgaaaatcagatgatcttggaggcagttccttaatgccactgctcaaccttggagaagaagatgaaattcacagcaatgctccagcctcagcatgccctcccaggcctcctgattttgtcaggaaatacttccttgaagattaaagctataattcagaatctaagtcaaagaagagtaccttatttaaacccatgattttaactcacagcaataaggccacagcagacgggagctgaacatctctgtagactggaccatctggaccatcacttgcaagtccttctctcaacattgttgacgtcccctaaataatggctctgcattgactggtgccactgtcccaagagtggttccatgctcagctcctttgcctgcctgtctgcctctctttgtagacaagcaattaactgattagatccagaccttagtatttgacttgtttctttttctctgtgtcatgggaattcacttcctgttttaggacattttcccttttcagcctgatggacctgaggattttttattcattcatttttgacccagtgttcacagatttttacactcatgtttctctgttaggtgcccctaaatgcctcctttagtgagatgccttttcctcccccaaatccagaattgttcatcctttttttgtagaagtcatggagttttctcgagtgagagatagtaaaaggcctggagctcgagctgggctggcacaggtacatggtggctactgggggcatcacttctaccacattacgtggatcaaagcaagtggacgagcagttcagattcaagagaaggggaaacaagctctaggttgggatgtggatgtcctggaggggaggaattgtggcagccaactttggagactcctacactaggcattaatttacattccctcacaaaatctttggaaacacaaatattttgataccaaactgttgacatcttttgggtgccagtgaacctatattttcttactctagattccttattagtagtagtttgcaaatcagataaagccaaaatagtttataacaatgtctgtttctccaccaatgctttaccttgtattaataaattgaaccttacccatgtgttctataaaaagaaattcttacagtgtaagtacttagtgactatttaaactgacctacagaattatcttccactcaatgttaagtaccacaataatatccctgcactgtgcacggcaatatagtgtagcaatggagtgcacggacctgagagccagattgcctgagttctgatatgaactctgccacgtactaactgtataaccttcagcaagtttcttaagccctttgtgagtcagttttcttatctataaaatgagagacctaataataccaccatatagggttgtaatgaaggttaaatgtgctcagaacagtactagacatatagtagcatacaggatggttcaactactattgttgttgttgttgtcattgttatgacagagcgatcagcactgaatgtttagggcaagtaatgtgagtgggacagttggaacagccaaggtacaaggtcacctctcacccatggaatgccatgacttctggcccacacttatgcccaatccatcttgcttcatccagctctagtgggtgcatggcacgaatgttgggcaggctgggcagccctgtgtgttgccttcacttccatgtaatgatggagtgcttttgtatgccttccatgttgtgaaagacaaagactctctctatcattcaggccgtgattggccgttctggtctcagagttatatggctaatgtcagtcttttggtgttataccagagcctggtaacaggctggtcttgtctctcaaaagaatatctaaccttagcccttgctggagttgttttagtccaggacacagttgcttttcagtttgttcacctatgggacatcacaaaatctccaaaatgcattcacattcatgctgagaaatccagaactgcattctcagccagggcctagggttcaagcctcaagaatgtttgtggcatctggagacctgcttcctggagcaggtcctactaaaaaaaaatgacaatattcctgggtactttagatagaggatactgcaaaatactcaaattggatgtggctagaaatatgctatcccaggaatccagatagtatgtcagcttttcttctgttagttggtggatcaaagtgtaggagtttttcttgaccttgatgggaatgtctccactccacccatacatttaaacccaaggaactgagttcaaaacacaggtcctggatcatgcctgtgttaatgacccatcttcagttccttaggcaactctctaaagctaagtctactttttagtgtagtatcaccttcactcatgatcactgatgtgttgcgctagttacaggcatgtggctggcaccaagggccagtgttctaatgagcatgcctatggccattgcaagatgttaacatatccctggagctgcctggtaaagagaattctgtgtcctttgtgtccagctgttcagcagactagaaatcctgataatgactttcttgcttaaaataagtttaaaatgctgactaaatcatttaaatatgttttcaaaggcattaatgggttagcaaaaaataaagaacctaataggccacaatgggcatcagagagatgttgtgaccccatgcaggcatttgccagattaggtgaacttggccattagttcatacagccctgggagacagatggacaagcctcagatgggaaatccaattggtccatccaaaatgggaactataatcggagactcccactatcccaatccatgttaagttaaaaccccaaataattgcaccttcagggtaagaataaagtaggaataagcctcaggggatgacaaggaaaattgcttgtctcaatccttgattctgagtggaagacaaaaattctcctataagaatttaaaatctttttataagaattcacacaccctcacacagtttatatgctctgacatattttgtagcctgagctcacactgtttagatggtctggaaaacctcagatagaaaatcgagtattaagttcaggttggttgtgccagaggcacctggcaagaggaaacaaatcctctctggaggaactcacttgtatccaagacctcagagaagtctcacagataatgtcagaagtgggggaaaatgagctcatattttgggggcaaaattgtgaaaccacttatggaaactgtactaagagtggagagcctgaaaagacagtgatttcagatacaggcataccttggagacatcgcaggttcaattccagacccctgcaagaaagcaaatgttgaaattaaacaagtcgcataaaatttttggtttcccagtgcatataaaatttttgtttacacaatctgtagtctaagcattgtgtctaaaaacacaatatgcataccttaattttaaaaagcttcattgctaaaaattgctaatgatcatctgagccatctgtgagtctttttgctagtgaactgtcatgccccaatgttgttgactgctgaccagtcaggatagtggttgctgacagttagggtagttgtgacaatttcttaaaataagacaacaatgaagtttgccacttcgactgactcttcttcaacaaaagatttctctatagcaagcaatactgttttatagcattttatccagattaagacttctttcaaaattgaagtcaatcctctaaaatccctgctgctgctttatcaactaagtctaagtaatattctaaagccttcattgtcatttcaacaatgcttataacttcctcagcaggagtagatttcatctcagtaaaccactttctttgcttatccataagaagtaacttctcgtccattcaagtttgaatgagattgtggcaattcaatcacatcttcaggctccacttctaattctagttcccttactatttccaccatatatgctattatttcttcactgaaattttgaaccctcaaagtcatccgtgaacgttgggattaacttccttcaagcttctgttaatgttgatattttgacctcctcccatgaatcataaatatttttaacggtatctagaatggggaattctttccagaaggtgttcaatttactttccccagacttatcagaaggatcgctgacagctatagacttatgagaagtatttcttaaataattagactcaaaagttgaaattactctttgatccatgggctgaagaatgaatgttgtgttaataggtatgaacattaatctccttgtacatctccatcggagctttcaggtgaccaggtgtcttgtcaataagtggtaatattttgaaaggaatcttgttttctgagcagtagtatcaacagtgggcttaaaatatttagtaaaccatgctataaacagatgtgctgccttccaagctttgttgttccattcatagaacacagacaaagtagatttggcataattctgaaggaccctaggattctgagaatggaaaatgtgtattggttttaacttaaaattaccagctgcagctgcattagcccgtaacaagacagtcagcaagtcctttgaagctttaaatcctggcattgacttctcctctttagctatgaaagtcctagatggcatcttcttccagtagaaggctgtttcacctacactgaaaatttgttgtttagtgtagccaccttcatctactgtcttagctagatcttctggataacttgctgcaacttctacatcagcacttgctgcttcactttgcacatttatgttatccagatggcttcctttcttaaacctcatgaaccagcttctgctggctttaaacttttcttctgtagtttccttacttccctcagccttcatagaattaaagagagttagagtcttgctctggattaggctttgggttaagggaatgtagtggctggtttgatcttctatcaaaaccactcagactttctatatgtcagcaataaggctgttttactttcttattgatatgttcactggaaaggcagttttaattttcttcaagaacgtttcctttgcattcacagcttggctaactttttagtgcaaaggcctaactttcagcctaactcggctttcgacaagcctttcttactaagcttaatcatttttagcttttgatttaaagtgggagatgtgtgacttttcctttcatttgatcaattagaggtcattgtagcattattgattggcctaattttagtatcattgtgtctcagggaatacggaggcctgaggatagggagagagatgggggaatggccggtcagtggaggagtcagaacacacacaacattcattaagttcaccatcttatatgggtatggtttgtggtgctccaaaacaattacaatagtaacagcatatatcactgatcacagatcaccataacagatatagtaatgataaatgcaataaattttggttattcttactgtatttcactggattatagtacagtgagaataaccaaaaatgtgacacacagctgaagtgagcacatgcttttggaaaaaatggtgctgatagatttgcttgatgcagtgttgccacatgtcttcaatttatttttttaaaaatacaatgtctgcaaagtgcattgaagcgaagcataataaaccaaagcattcctgtgtcagtattaatagacacagattataactaggtttaatatgcttaaagtaattaacaaaggaacttaggaaataacaaaggaatatgatgctttaaatgattaagcagagttgacaaagaaccaagttaaaattttagaaatgaaaattataatagtcaaaatttaatgattatatttaacagatttaacagccaattagacctagctttaaagaagattagtgacctgaaataaatctaaggaaagtatacataatgcaatccagagaggtaaagagatggaaaaatgagaggataagagtcgtagagggtagaatgagaaagtttacagatatctaatgagaatttcagaaggagaaagggagaatattggaaaagaggcaatatttaaagagataatgtacttatctaaaactaatgaaattaaacagtttcaggaaacatatttaatctcaagaaggtcacatcaaaaagtccacaactcaacatatcataatgaaattgtaatgccaaagacaaatgtaaaatagtaaaagaaaaacagtgtatatagctttcaaagaaaacagcccatttttaggtcctatttgccttccattttgaccagtggggaaactaaatggtaagtagacaaatttgcttacttctttctcctggacttactttctttctgacaattatttaagacctttgttaataggtacttgccttttggaaaaatcaagttgtaaactttttctccaaattaaaaatgaagttcttcaacatctcaacttgaccagatataaaacaattttaaaacctttaaaagcgtattgagaaaaaccgagcttttcaaaaacaacatgcctgtcattatcaaaaagaggcatatttaggtaaaaataacaaaaaaaaacccttgctgcatagatattgcaaatagttctagttatctggtcagtgggtaaaaagcaaggacttaaggtcttcagctccaatatcttgctcatttcttattgctggaatttcatatccttttcttcctgttggatgactaaatggagtggtggtggagatggtaagcccacatttactcagccacattctgctcagcctcaggagtggatgaattctcagcttttgtctctaccatcttgtcgtttggggtgttctgagcatcagggctggtacttgaagttgtggctgccccgaggctgaagtgtctgctgaccctgggttcattgccttggttttccttacccatgtcattgctgtcctctctcggtcatctttggcaaggagagctcctgtggaaccgtggtctctagccccatccacatcccgcctcactggtttaccttgtgcccctgcgccctggctgtcagcacctccacttcttctccctgcaagggagggtgggaatactgtgattgcccgcaggttatctgagtgtagtgaggtgtgcaccctgtgggaccactgtcccatcctgttctttttctctctctcactattgaggacccctatgacgcggagtctatcatggttgcagcctgctccacgtttacctctttgacctggaattccaccagggcctgtgacacttgctgccagggtcctcctctccttagatgacatcgaactccacagtcattccatatcctaccctgcgaaggtacttcctggggttattcttctttacagcagtctggtacacaaatgcatcttcctcggtatcattcctcttggtgaaaccatatctgtttcttacgctgaaatattttattgtctccaaaaccttccttgcaatgaccttttccccattggcaggcgccggcgctgtccgtggtgctgggcttggtgccggcagcaccgagggcagggacgagggcggtgggggccgctggcggctcctgggccggggacttgctgctcctagctctggtgactgtgactggggctggcggcaggccgtggggctgctcagggttccctgcgggccgctccctcctggactttcttgactgtgtgactatattcttaattttcccggaggactttttgatgagcctttagagtactctgtgaacttcattttgactcatcagtgtggctgcaggtaccgggtaaggaaaaccttgggtatgcatggctggggtggggaccagagtagggggcaagacacatttgtatgatcagttaaataagagtgttgatactgggtggatcaaacctttattctaattctttttacatattttccttttatatatgcactgcagtgccctaaaaaatgccatattaggagtgctgtatttttaatttttagtacaaaaattacttttctgtattaaaaatgtatttgtattaaatttatgatcaatttagtcagttactgacagctgaaaagctacttcagagaggagaggaggctcagcctagattccctttggacacaggcccaggagcttgcaggcagaggatcagctctgggaggccccagagagagtttatggtgagcagaatcctcaccaggtagtccccaggcacctggcatgtggcaccgtgcttgctcctgtgctcacctgctttctgtcctgcagtcagcaagccactctcttctgccaaagcctggctcactggggacacaaaggtcttccctactagttgaaagagccagagaaattcatctcccttaaggaaggagaggagagagagaaatagaagtttggaggggcaggatgcagcctattaatgcacatatacttttctttgcttcactctagagtttggagatagcgagagatgaaaagaaagaaatggaaagggatattatgagggaaaaacccactaagaatgagatattcttaataatctaaagaaatccagttttctttttttcaggtcaaatcctgcttgtcctcggaattctttaaccatcagctgtagatttagaccgaggaggtttattcgatatttaacgtatacttaatggtcatctgctgtattccagacacttctacacaacggagggtttgatagtgaaaaagagacaaaactctttgaccttgtggagttaacatctagtcggagagacaggaagaaccagtacctagagcatgccgatcgctggtgaatgctacaaagaacaagcattaagtgacctgggaatgtgaggcaggagggggaggatgatggctattctaagaatgatcagggaggcctcagaggccagatgatgtgggcacaggcctgaacagggtgagggaggtagggtttcaagggactgagtgggtttgcttctagtagcccctcctcagccaaagaggagcctccagggacccctaatccaggctagacaggaggtactgctgtgcagcagcaagagcctctctaactccccaaatatccaccctggttggagggagatgatgataaacgtgtgagggctaaaggggctgcgaaggctctgtggagggcaaaggccacaaataccaggcccgcgagctgaattcataactgggcaccagctcaagtgtgaaccaccctggaaggaactgctctaatttgcgaaccttgaaccaagctgagccctaaattaatctcttttttttctcactgaactgagcactgaaccaaggattttttcaaaacagcaacagctagtaagccagtttgaaccagaaccaagcctattcattttctaaaagtattgaactggaacaatataggaatattaaagtatctttcgaactaaaccaggattgaactgatcattcacaagtgcccagcttgagaagagaagaaattctttttggagagacaattctgtgtatattaaatgtctgccttgagagtcattccctaccaaaaaattacactgccttgtgacctctttttaaaattttaatcttgggcctaattctaatatttaacttttcatttgtacatttcatttgcctacttattcaaatgttcttgatgataggaaccacattttgtattgcctggaaatgttagcacaattcctgggatacaatagaagtgtgggtatatataggggaataggggtgtaggagtgattggtggcatgcaatgaccaaaggcttgaaatttattctgcaggccagaggaaactgtggaagggattcaagcagaaagtggcaagatcagatttgagttttagatggcactgtggggaaggggttaggaatggagattggttcgaagtgtgtattatagtaatccgggtgtgaatcagtaaaaagcagtggtattgtgtgagccccagaggcagaaactgcctagattccagtcctagcttcacatgtccttgctgtgtgacctcaggcaagccacacaacttctttgtgcctcactcccctcccctgtggaaggtagatgctaatgatgcttactccatcctgtgcttttgaggtttatgtgatacattgtgtgtgaaatgtagagcactcagaatagtacctagcacatagtaagtgctcaaaaaaattcattattaattttcattgataaagtaattatatatatatacacagcacatatatatacaccacatatatatacaccacatatatatgtatacaccacatatatatacacaccacatatatatatacataccatatatatacacaccacatatatatacataccatatatatacaccacataaatatatacacaccatatatacaccatatatatacataccatatatataccatatatatacataccatatatataccatatatatacataccatatatacaccatatatatacataccatatatatacaccatatatatacataccatatatataccatatatatacataccatatatataccatatatatacataccatatatatacaccatatatatacataccatatatatacaccatatatatacataccatatatataccatatatacaccatatatatacaccatatatacacaccatatataccatatatatacaccatatatatacaccatatatacacaccatatataccatatatatacaccatatatatacaccatatatatacaccatatatacgatatataccatatatatacacaccatatatataccatatatacacaccatctatatatacaatatatatacacaccatctatatataatatatatacacaccatatatatataatatatatacacaccatatatatataatatatatacacaccatatatataccatatatatatacacaccatgtatataccatatatatacattccatatatataccatatatataccatatataccatatatatacataccatatatataccatatacacaccatatatacaccatatatataccatatatgtacaccatatatatacaccatatatataccatatatatacaccatataccatatatatacaccatatatacacaccatatatacaccatatatatacaccatatatacaccatatatacaccatagatataccatatatacactatatatactatatatataccatatatataccatatataccatatatacaccatatatataccacatatataccatatatatacaccatatatataccatatatacacattccatatatataccatatatatacattccatatatataccatatatacaccatatatacaccatatatatacaccatatatacaccatatatgtacaccatatatacaccatatatatacaccatatatacaccatatatataccatatatgtataccatatataccatatatatacaccatatatataccatatatatacacataccatatataccatatatatacacataccacatatatacactatatatatacacaccgtatatatacacaccatatatatacactatatatacacacgccatatatacacacaccatatatatacacaccatatatatatacaccatatatatatatacaccatatatatatatacaccatatatatatatatatatatatacacacaccatatatatatatatggtagcagcaacaggattggatatgggggaggagagagaaggagaagttcatgatgagtctgccatttctgatatgtgcagttaggtagatggtgaccacatgaatgtaggccatttgggagaggaatcaggttggaaaggaaaattttaaacatgttgagtggaaggtgcctgcaactcatccacttagggttctccagcagatggtggactgcataggtctggtttttaacagagcaccacaggctatagctagatacagacatgagagtcatttgcagagacctagggtgtgttgaaatcaccaggagagaatgtcaagtgagcggagcagagggaccatcagagaaggtgggaattccaagtagggaatgatcaatagtaataaatacaccaaaaacttccgatcaactaaagactgaaagtatttccagtggtgatatggcttcattgactccatagctagtggggtttctccagagggaggagagcagaaggcaggttatgggggatgaggagcagctaggacgtgagggagtagggaaagcatgtataggcaggtctttaaggaaccttgattgttaagagatgggagacaagatacaggtttctcattgagttgccttccctaaatcagggtttggtttcactggctaaaccagggggaccttataaaaatggtccaaggcgtaatatggctgatgcctccacatcctcctgagaaagaccttctccagaacaccctacctctcctagcctctcctttcaactaatgacatgaacgtgtttattgcccatctcttcgccagtaaaatccagggtccatgaaggcaggcatctttgctgccttgttccttctgttttctcatcattcagtaatgcctggtattatttggcatcaattcctgtcactcgctgtgtcactttatcacacaaggcttctattatgggacccacaggagaattttcgctcaggccttataccaggcatgattaggccttccctgagcagccgaattgttttcatcacacggacactatgccctgttttatgtttccctctgattatgcttttctctatgctgtggtcacagaaatggagtcaaatttccatcctatttctagcagatcatataacatccaggcatgggtttttgtgtgaattcattcaacacaccactaactttgagctttttttatcctcatcttattttccatttatctgatttcctcctttctttatatttgatgtttgtttttcttatccagagtgcagtttcccaggtttcttcaaatattttttggaaaaaactgaggttatatgtcaataatgggaaaaataggatggtaaataggacttgtgtggaactgggttttgagacaaaagaaatgaaaaagggatgaggctgactttacacgtaaagggagcaccctgaggggataggggaagtggggatgtgatccccagccctagcgggtttctaggagatttcagctttgttggagacacatcaaagacactaggaagagagtaacataacaaggccatagaagagcatgtgctgtcatgaatggttcagggggttgtataggggtaccaaagaggaagagagcatcatagcatatatgctggcatgttctagaaggctccatggaggattttgggcaacttcagcctcaaagagggaataagatctaaatagagcaagtgaaccttacatttgtcaagaaagatttgagtgtggcagtggcttttggggcaggtggccagaaatctaggtccacctttgctgggaaggaggcactagctggagtttggacggtagtgggatgttgaggtcgctttgtagatttcagtttggaagccccaaactgtgggggtgtctttgccaaggtcataacaggttggactcctctcttgcttggctgctcgacttgcccttactggccgggcttttcagacaagtgcattcattcctgcccattcagatctgctttcttcactgacctcggcagcagagaggccaggtttgattgaaatttcacttaaggtgcacagagcatcccttccttgccgaactcatcagccagcaataaatggaacttcttgacagtttcaaatttcctgccagggagcagctggtgagtgttcctctggagaagcagtcttggagaaattttatcagtatctggctagagaaagtattttctacctctcctctcctttcctctctttcatccctctcttctcaccccctctcttctcttccccttctcacccctccccttttatcattgctctcttcttcttagtcttacctgtaaagactttgcacttctttagtccttagccactgaaaattaatttagggacaagagaaggccttctctacacagccttctgagttactcattactgtctttaagattcaaagagcaaaccctcttttttcaaggcttctcttaatgagccatttcagcatcggacttccaattttcacccctgccagaaaacagccgctgggaaggtttgggaaaccagtctcccttccagagacttgtagctattgggctgcaggagcaatataattattccccattagtgctctatgaaagtgcagatggtgtacaaagtcctgatgctgttttgcttgcctttttttcacccttcctgaaacattttggtttatgtcccttcatttcagaaaacaaaggtaaggcctggctcagtgtatttgggtgaatatcagagtacagtatcataaatttcctatatggaacctataatttcttgttatttacctaggcatttgaagacacctgttagcctccagcaggaaactgtgttaatcacaactccctttgctgctacaggaagtgcctggtcccctcccaaaataataatcagtcaccttaaaacaaaggcaacagcctgaaaaataacgtggtgataactttattagtgatccccaacaaggcaaataaaacagaagtgtagatgtcatctggagaagagatttcagaccttggctaagctccaccatcccttttaccaaacctttttgttttctctccagttctcctcggctctgagtctgttggagattagaagtatttctgacatgctgtgcaaatatatgcaaattcattgtgagttgtcatcaactccactttcccccatgtggctgggctgcctgtgcagtgctgggctgctggcctcctggaatcgcagcaatatggcctatgcaccctgtgccaggagccattagcagccttgatgcatcggattagggagctctgatggctccatggtgtcagtgagtggtacccgggcttctaggctgtggaacagcacaaagcaatgtcaaaggcagagggaaagatgctgatttccactgatttttaaaatatccacttggtttcccaattttactttcatatatatgcagccacagtagaaattggctatcatgacagcagtgattatctgatgatgtccttatacatgcatatcttttagtgccggtcttttaagttgattgctgctgagattttccagaggagcacatcctgatgtgtgtgtgggcaggcgtgtggctctctgtgtataaacacgtgcagagtgtgagccacacaagggtcaacactacatttgcatattaattccaaataaccaacatgtgactcctaacatgggcatcctcaagcaacgggaaaattgtcttgattttcttgagattgttttgggtcctcccatcctttcctttaaggtttttcctatcttcactcaccctcattggcctgtttgtagggcccaatgagagaggaagagtgggttctgggtgggtgggagaatccgaaaggaaaaggtatgggtaactggaagagaattttaagaacttacgtgactaccaccaccttcaaatacaactcttcaattgagagcagaggattctttgctagattccattctgttacctctcttgcccatatatcaccatgcaaacagtaaaaaggtgaatgttggactcacataggacttttatgtaattgttataactaattaagagtcataattatttcccactttggaacaaagccctttctaacaccctacttattatgccatcacctggagtgcatatgaataaattcctgctgctactcaccctgaagctgcccaaggaagaagcagctcaaacaaatcttagcccatgcatttggagaggctgccctaatgactcactgatagttattgagaaacagattatctctgtggatgtctgaaagagaagggaatggtttcaagggctcagcagtctccagagaatatattaccaaagattcctctatgactgtgccctattaaaatgtatggaaaaacaacctggattctgggtccctgtaaaaggctccaatctgcatttatcattgaatctgcatcatcttaggcttacacttcagttatgacgacaatatggggcttgacaattctgtcatatttttgatatttaactgatgtatatttttttaatttttaaattttattatttcagtaggtttttggggaacagataatgcttgattacatgaataggttttttagtggtgctttctgagattttggtgcactcatcacccaaccagtgtacactgtacccactgtgtagtcttttataccttgctgccccccaccctttaccctgagtccccaaagcttatcattcttatgcctttgcatcctcatagcttagcttccacttatgagtgagaacatatgatgtttggttttccattcctgagccgcttcactggatggagtctccagttccattcaggttgctgcatatgccattaattcattcctttttatggacgagtagtattcatgtatttatataccacattttctttatccactcattgatgggcatttgggctggttccatttttttgcaattgtgaattgtgctgctataaacatgcgtgtgctagtatctttttcatataatgacttcttttcctctggggagatacatagtggtgggattgctggatcaaacggttgacctacttttagttctttgaggaatcttcacactgttttccatagtggttgtgctagtttacattcccacgagcaatgtgaaagtattcccttttcactgcatccccaccaatacctattattttttgattatggccattcttgcaggagcaaggtgtatcacattgtgttttgatttgcatttccctgataattagtgatgctgagcatttttccacatacttaatggccatttgtgtatcttcttttgagaattgtgtgttcatgtctttagcccactttttgatgggattgttcttttttttcttactgatttgagttctctatagattctggatattagtcctttgtcggatgtatggattgtgaagatttcccactctgtgggttgtctgttaactctgctgcttatttcttttgctgagcagaactttttagtttaattaaattccatctatttatctttgtttttgttgtatttgcttttgggttcttggtcatgaaggctttgcctaagccaatgtctagaagtgtttttcctaagttatcttttagaatctttatggtttcagggtcttagatttaagtctttgatccatcttgagtggatttttatatgaagtgagagatgaggatccagtttcattcttctacgtgtggcttgccaattatcccagcaccatttgttgaatagggtgtcttttccccactttatgtttctgtttgctttgccaaaaatcagtcggctgtaagcatttggcttgatttctgggttctgttcccttggtctaggtgcctatttttataccagttccatgctgttttggtgactatggccttatagtgtgaagttggggggtgtgatacctctagatttgtggttttttttgttgttgttgtttgttttttgcttagtcttgctttgactatgcgggctcttttttgattccatatgaattttaggattgtttttcctagttaagaatgatggtggtattttgataagaattgcattgaatttgtagactgcttttggcagaatggtcattttcacaatattgattctacccatccatgagcatgggatatgtttccgtttgtttgtgttgtctatgatttctttcagcagtgttttgtagtttttccttgtagaagactttgatgttcttgattagatatattcctaagtattgtattgtatttatttatttatttatttgcagctactgtgaaaggagttgagttcttgatttgattctcatcttggtcactgttggtgtacagcagagctactgatttgtgtacattaattttgtatcctgaaactttgctgaactcatttacaagttttaggagctttttggatgagtctttagggttttctatgtatacgatcatatcatcagcaaacagcaacagtttgacttcctcttttctgatttggatgccctttagttctttctcttgtctgattgctctggctaggacttccagtactatgctgagtagaagtggtgaaagtgggcatccttgccttgttcctgttcttagggggaatgttttcaactcttccctgttcagtataatgttggctgtgggtttgtcatagatggcttttattaccttaaggtatgtcccttctatgccgattttgctgcaggttttaatcataaagggatgctggattttgtcaaatgctttttctgtatggagatgatcacatgatatttgtttttaattctgtttatgtggtgtatcacacttattgacttatatatgttgaaacattcctgcatccctggtatgaaacctacctgatcatggtggattatctttttaatatgctgttgggtttggtttgctagtattttgttgaggatttttgcatctgtgttcatcagggatattggtctgtatttttctctttttgttatgtcctttcctgatttggtattagggtgatactggctttgtagaatgacttagggaggattccctttttcctctatcttttgaaatagtgtcaacaggattggtaccaattcttctttgaatgtctgatagaattcagctgtgattctatctagtcctggactttttttgttggcaattttttaataaccctttcagtctcactgcttgtcattgctctgttcagagattctatatcttcctagttaaatctaggagggttgtatacttctagaaatttatccatctcctctaggtcttctagtttatgtgcataaatgtgttcatagtagccttgaataatcttctgtatttctgtggtatcagttgtaatatctcttgttttatttctaattgagcttatttggatcttctctcttcctttcttggctattcttgctaatggtctattaattttacttatctttttaaagaaccaagtttttgtttcatttatcttttgtgtttttttttttttttttttggtttcagtttcatttagttctactctgatctttgttatttcttttcttctgctgggtttgggtttggattgttcttgtttctccagttctgtgaggtgtgacttagattgtctatttgtgctctttcagactttttgatgtaggcatttaatgctatgaactttcctctagcatggtttttgctgtattccagaggttttgtcattattattgttcagttcaaagaatttttaactttccatcttgatttcattgttgacccaatgagcattcaggagcaggttatttaatttccatgtatttgcatgcttttgagagttccttttagagctgattttcaattttatttcactgtggtctgagagagtacttgatataattttgattttttaaaatttagtgagacttgttttgtgggctatcgtatggtctatcttgtagaatgttccatgtgctaatgaatagaatatatattctgcagttgttgggtggaatgttctgtaaacatctgttaagtccatttgttgtaggttatagacttaagtccattgtttaagtccattgtttctttgttgactttctgtcttgatgacctgtctagtaaagtcccttactgttattgtgttgctatctatctcatttcttaggtccagtagtaattgttttataaatttgggatcaccagtgttaggtgcatatgtatttagaattgtgatattttcctgttggattagtccttttaccactatataatgtccctctttgtctttttaaactcctgttgctttaaagtttgtttggcctaatataaggatcactactcctgctcacttttggtgtccatttgcatggagtatctttttccacacctttaccttaagttgatgtgagtacttatgtgttagatgaatctcctgaagacagcagaaacttgcttggtgaattcttattcattctgccatcttgtatcttttaagtggagcatttaggccatttacattcaatgttaatattgagatgtgaggtactattctattcatcgtgctatttgttgcctgaataccttattttttcattgtgttattgttatataggtcctgtgagaattatgctttaagaaggttctattttgatgtattttgaggatatgcttcaagatttagagctccttttagcagttcttgtagtgttggcttggtagtggcaaattctctcagcgtttgtttgtttggaaaagactggatctttccttcatttaggaagcttagttttgatggatacaaaacttagctgataattgttttgttttggaggctaaaaataggaccccaatcgcttctagcttgtggggctgagaaatctgctgttaatctgatagattttcctttataggttacctgatgcttttgcctcacagctcttaagattctttttcttgtcttgactttagataacctgatgactatgtatgtaggcgatgatctctttgcaatgaatttcccaagtgttctttgggcgtcttatatttggatatctggatctctagcaaggctggggaagtttttctcaattattccctcaaatatgttttccgaacttttagatttctcttcttctttgggaacaccaattattcttaggtttggacatttaacatagtcccaaacttcttggaggctttgttcattttaaaaaattctttctttgtctttgatgcattgggttaattcaaaagccttgtcttcgagctctgaagttctttcttctgcgtgttcagttctgctgctgagattttctagtgcattttttatttctctaagtgtgtccttgatttccagaagttgtgattgttttttatttatgatctctgtttcactgaagaatttttctttcacatcctgtatcatgtttttgatttatttaagttgtacttcatccttctctggtgcctccttgattagattaatacttgactttctgaattattcttctggcaaatcagagattttgtcttggtttggatccattgctggtgagctggtttgatcttttgggggtgttaaagaaggttgttttgtcatattaccagaattgtttttctggttccttcttttttgggtagcctatatcagaaggaagatcttggattcaagggctgctgttcagattcttttgtcccaaggagtgctattttgatgtggtgttctcccccttcctctaggaatggggcttcctgagagctgaactctagtgattacttttgctcttctgggtctagccacctagtagagctactgggctcctggctggtactggggaatgtcagcaaagagtcctgtgatatgacccgtcttcagatcttccagtcgtggataccagcacctgctttgatggaggtagcaggggaatgaagtggactctgtgtgagtccttggttgttttatttagtgcactggttttgtgttggttggcctccagccaggaggtggcacttttaagagttcatcaactgcagttctatagggaggatgcaaactcgccctaggaacaggtttctcaggtggtgggcagggccatagaactcccaagagattatgacctttgtctttggctaccagagttggtagagaaagaccaccagctgggggaacggataggcatttctgagcttagcccctcccagggcagggctttctgtggctgctgtgggggatgggggtgtggttcccattccagtggagttatactcccaggcagattatggctgcctctgctgagtcatacaggtcaccaaggaactgggggaaagctagctgtcataggcctcaccctgctccaagcagcctgtagtcctaatggcctcattccctccatgctcccccaacagcactgagtctatttccaggcagctgatgaccagggctgagaacttgcaccagaccatgagcttccctattgagaaagcaagttgactcagtttttggcatctcagggagcctgcaggggtaatccagtttcttcaaagcatctgtggattctctcagctttcctggtatgttcctgcagtcgtttttggagcaaatgttcacattgtgagtctccacatgctactctgtctgtccaagcaggagctgcaagctagtctttcttcctatcatatctatgattctttagcaattgaaagtctaaagccatcattcatctcctcttgccatgatatctaaatataaatatgtatttcacatgtctcctaactggcaagagatgcccctcagtggaattttagtttccatcacctgtgaaagaaggagcaagccactgccaaaaggtggtcactcagcctcttgggccccagttctagaagctctggatagtgactgcctgtcgttggggtgctcaaaatctctttgtgcttgaagttctcagagagaacatatatcctagctagttctgagctgctcttcctgtggacacccttcaatcacctcttcagggaagagcctgtctctcccaactgtcccacagagagactttcctcagactgacttatgattctctcacacttctcgattttagctcctactagtggcattttgtgtggcatattttgtgtttgcacataaaatagaattcaagcaaagacttgaaagaattaataaccatctggtgactctctgtcacacccataaaatcctagtataatttaaaaatatatatagtttttgaattcatttgttgaaatatttaaataatgttttcttggtataaaagaacaacaatggggtgcctaaaaatgctccaaagtgaattgtgtacacgacctattctatatttggagttagatttcttcagcacatctttccacatttgttggaaatctgttcacagttggtggaaatctgtccagctgctttcatgtgatatgctaataaataggcatgtgccttagtctgtcttctgttgcctataacaaaatacctaaaactggataattaagaaagaaaaggaattcatttcttacagttatggaggctgagaaattcaaggtagaggggctgcatctggtgagcaccttcttgttagtagggactctgctgagttctgcagtaggacagggcatcacaatggtgagaggccgagtctgctagcttagttctctcttcatcttctttttttcttaattaaaaaaattattaatacataatatgtgtacatacttatggggtacatgtgatattttgttgcatgcatagaatgtgtagtgatcaagtcaggatatttagggtgcccaccacctggggaagttatcacttctatgtattgcaaacatttcaaattctctcttctagctatttaaaaatatacaacacattgttaactgtattcaccctactctactttccaccgttagaacttagtccacctatctaactctatgtttgtactcattaaccaacctcttttatcccctttacccaccccacacacccttcccagctcctggtatctatcattctactctctacattcataggattcaccttgatagctcctgcaaatgagtgggattatgtaatatttgtctttctgtgcctgacttatttcacttagtataatgaactccagttctatccatgttgctgaaaattacattatctcattctttttatggccatatagtaatccattgtgtatatatgtcacatttttaaaaatccattcatccattggtggacacttaggctaattccgtatcttggctatcgcgaattgcgctgcaataaacatgggggtcaagtatatttttgatacaccaacttctgttcctttggataaataccaaggagtgggattgatggatcatatggtagttctaattttagttttttgagaaatctccatactgtattctacaatggttgtactaatttacattcctagcaacagtgtatcagctcccttttctctgtatccttgccaactctgttattttttgtctttttaataatagccattttaactagagtaagatgatatcttattgtggtcttgattttcatttccctgatgattagtaatgctgagcatttttttttcatatacttatcagccatttctatgttttctttggagaaatgtctatgcatgtcctttgccccctttttaatggggttgtttgttcctttgctgttgagttgtttgagttctttttatattctgaatattagtcccttgttagatgaacagttggcaaatattattttttccattcaacaggttgtctcttcactctgttgtttcctttgctgtgcaggacctttttaatctaatatgctcctatttgtctatttttatttttgttgcctgtgatcttgaggtcttagccattgtattagtccattctcatgctgctatgaagaaatacccaagactgggtaattgataaagaaaagaggtttaattgactcaccattctgcatagctggggaggcctcaggaaatgtacaatcatggcagaaggcacctcttcacagggcagcaggagagagaatgagtgttcagcgaagggggaaggcccttataaaaccatcagatcttgtgagaattcactcactatcacaagaacagcatggaggtaaccactcccattatctaattacctcccaccagatccctcccatgacatgcgaggattaggggaactacaattcaagatgagacttgggtagggacacagccaaaccatatcagccctaaattatttgcccagaccaatgtcctaaagtgtttctcctatttttttttttctagcaggagaaaaatccctaaatactgcttattctataacccaaagataaccacttgatagtttcaggtcttgcatttaagcctttaatctatcttgagttgatttttttctcttctgataaagccaccagtcccacttccatgataactcattaattcatgaatccacaaatggattaatccatttatgagggcagagccgttatgatccaatcacctcttaaggccccacctctcaatactatcacattgggaattcaatttcaacatgaattttggaggggacaacattcaaaccatagcagcatataattaggaaataattttatttatatatagacatgagatataatgaataaggaataataccaggtagtgctcagtgaaatataaaaaggtggggcaaactatagtattctatatttggtaaagccttaaaagagatagaagaagtcttaaaaataagtaggtaagcccctgtcctgctacgtggtggggcataggtttcattagtgatgggtaacatttatgagtgcttactgacatcagtactgctctgagcatttcacttgtgttttcttccttgttttaagtatacttactaaagattgaaaaggataagaatttgccccattaggtagcacagctaaaaagtcccaagactagggtttgaacctcaggagtctacattgcaattctgatcactacctggggttaggtcaaatttcacaggttaaaggcatggtcccccacaaaactgacctcatcccagatatcagctgcaagctcaagaaggtcacagaccgcccatacctctgacaaactgaatttgagtgttcccatgacctcctcagctttggcaattcactagaacaactcagagaacttaggaaagcactatacttattattacagtttttactgtgagtgatgcaaatcaggaccagacaaaagaagagaagcacagggcagaggagagtcccaaacatggttatctttggaacgtgtcgccctcccagcacaattaacaaagaatctccagtgagcttcagtgttcacagtctttattgtgatttcattatgtaggcatggttggttgaatcgttggccatgtgactgaattcaatctctagccccaaaatccttctctgataacatatggttcaaagccccaaccctatagtcacatggctggtctttccagcagggcaggccccaatctataaactctctagggacttacctgagtcacctcattagcataaactcagatgcggtctgagggtccacttggaataatgaagacactcctactacttgggaaattccaagggtttaaaggctccctcccaggagccagggacaaaggccacacaaattctctattatacaacacagtcatcctggtggtaagggaacttgagtctcatcaaaggacttcagaagactctcaacccccttctctcctgaggcccaacattaaacactaagctccacagtaaggctcctgaaggaacatagacttctgtttctgaggtcgtgcctgagctctagctgggtgggttagtagaagggctgccctccgagaattggagactaaatgctcagggtcctcagaagtttcctaacaagagggtgcagatttgctctgcaaagactggaagccacatatttggacagcaaacacctccatgcattgaaatgactaacaagccagaggagcctttcctagaggtggaggacagcatcttgttaagtgtactaaaaaccatatctgtaaatcagctgccgtttaaagcagttagcagtcacttaccaccatgggcaataagcatatgctgggctacacctgccatcagccccagggagcctcagagaggttcctggttcaccatttcacagacagagacattggtgaaggagtatgggtcacagatggcctgggactgagaaatgtctgctccaaccttatgttcccagttgtccaccagtccatacctgttggactaggagactcagaacttctagggtacagaactctgggtgcttggagtactcattaaatttgcaagctctttggtctcccagaagaaggaagcagatacaagggatggggccccatggaaatccagagaggccaggctgtgctgaagggagacgggcatcagaaactgctggggtgggtccaagagctgggaaaccagagaaaagtgtttctggaagctttactaatcattccttctccccagcatgacttattccctctcacctgcaggccttagcctgacagatcagtatgcaatcagtctctcactctacctatagggagtggatagtaaccagctcaatgtatgttgcctgggttttagggaaacaaacacatttctgattgttcaaaataatatatgagcattagagagaaaatagagagatgcacagagcaggacaaaatctctaaatactgcttattctataacccaaggataaccacttgataaatttgatatttctccatctgagtccaatgctaacctaatctcaaatatcatatacacactcacacacacagacactcactcgcacatgtccctcactctccggttgctccttgtctgaacttaggagctatgaatacattcagacatagagacatacttataagtagtatttgaataactacattttcattcctcaaaaaatttttaaaacaaaacttggatagttgtgaccttgtgtaaattccttaactgctctgactttcaggttactcatctgtgagtaggtataatgacccctgcctcacagaactggctattagaaggtctcaaagagacaaaagccctgaggcactggcattgtgcatgtggtgcagcagggacccaggcaccattagttctccctctctcactggatcctctctggctccaataggtcatcccagccccaccttgactcacctgtctgcaagcatctgctcatggtcctgaagcacctagatggataattcatgggcaaagctcagagaggagaggactgtgtatggctggtaggagaggggctcttggaagccatttgccatgggtgcagatggcataaaggaggggaggagagaggcatttcccaagcagtaactttaatattttcaaatccatatatctctaactatgactgagaggctcaatggagccattggcatggatcaaatgaatgagctagtggttgagatggttggtcataacatttgtaagcatagtcctgacaggctacttgaattttgactccctgcaagttaagcactgggatggtttttgtgaagcgggttcactgggcactggttacctacttgtctgtgtccagtgagacaaaacactcacatacaagacatgaagtgagcttattgtttgcaggcaggcagcaagagaccacagaagcctaggatgtaatttgagccagtctccccaggctcgggaaagctgtctggggctgctagtctcatctactcatgccccacctgtaccacagctgagggaccccagaaagcagcctgccctcagttttatactttggggctcttggaatcactgggataaagtgttgaaggacatactgtttttcagggttgagggcaggctgaaacagagcctggactattccagccagttcctccctatttaaggttgttgcaatcttagcacagtttccaagtgttcttgagaatcacaactgagaaagagggagaactgggttggtctaaggccacccagagaatagtcctgaaattttgactgctgtatggagttcagctctttttgttcatggttctattttgtttactttactgccataatagatctgataaaatggataaggaacattgatgttataatatacaaaatgaatgaggagtgtaattgtgatgacagttcttcaaacatgcctcaagatgatctttacctgattgtatgttgcatttatttgcttactatctgtacgtagtatataaggatagctcctgaactcccaaaggcagtgttaaaaagagaaaatagaatgatgattataaccaatctgaattttcgtttattcagattaaagggtttctttatccaaaatgtattatttgcagacataccaaaaaggaaaacaaaaaagcctaaagcataaaccttttctatctcatttaaaaggaaaaacacacaaaatataaaagttaatgagtttccttttaaagtgaacattgcaagaattcccagcatcccatcgtgaagcaaggtttgcctgtttctgatgcaccatcatttagttaaacttcaatctgcattttcatatagattcagtctccaaaccaaacctgatattttataacactttggaatttattgccaacaaatcaagtttttctaacataattaatctaaagtaaattaaactgtgtgcttcacttggcaaatggaaataagtaaaaatctgactacatattatgaatattattaaatacaattaaaaataaaatttataatacattcttcaatactacactaatttgaatgaaatatgttaagcttgaaatcagttctgtatgatattctaaacaaaaatgacaaaatggtttttaaaattccaaaggcagttggtaagatcgtatgttagtgtgagtagggttcacaaatcaaaaaatgtagtgctgagggagaactctgactctttggacaagcttgtggtgtggctaatcagagaagtgtcatatttgctgcggaaggtgattttttctaaagtagccaggtgagggtgcaggaccatttgctgtcttggtaaataacagcaaacactgacttaatatgtactacgtgccaggcattattgattaagcatttattggtgttagctatttaactctaccaaccactctgtgaggcaggcattgttgctaatgtcatccccattttacagatgaggaaactgagagccaaagtccaagcaaagtgatgactcaagtccaggcagactctatacattgaaccactgtgctacgtgcgtatcgaaaagtgcacgaactcatggttgacttctcataatacttgggtttgtcattgttcctcaccctcacccccagtccccaatccccagacaaacaccttgtcattgtcaggtgaaagaagctgatcctgtgttcacctgggggctccctttttcctcttccaagggtgttaggctgtaccttggctctctgtcagtctagggctaagagtataacttggggtaattatgcatttcttcattcttgcctctatgctggtgtacatgtaaacttggtaggagctgctgaactgtaagtaaacctaaggcgtatggattattagggaggtattgaagcatttgctggaagaataggcccagttaaccagagttggctcagcacacctccccaggtcagtcatggggaaagtttaagggattctgaaagagatactcacggagagatgagggcactgaaaaggataagggggggtacagcccccttctccctggcaccctaatggcctccaaacactcatagtcctctccacaagggtgtgttctgggtgtgcttggtggttatggtttgtccttgtggaaccacctcaggcagatcagaggttggggattccagtttcagaatcaggttggaatcctccctctactctttatcagctatgtgacctcaggagagttacctcatctccctgagcctctgtgatctcatctgtactagggacttaacaatagttttcacctaatggagttgttgtgaagattgaataagaataaagtacacactagtgcctggctcagagtaattacacagagcgcagtcatacatttatgcatactgcatttagaagcttgctgtcactcccaatacatagatacttttacagtacacacatgtattcatgcatatttcaagtatttcttattttttatccctctggatggctgggaaacttagactttccaattaatattttcattctttattgctgcataacaactaccccaaaacattgtggcttaaagcacccattattttgttatctttcatgattctgcgggttgactgggcttagctgggcagtccttctgtgcccatatgaagtcagcttgggctgcaatcacctggggatttagctgggctcctgggtcggttctgttcaagatggctcaatcacacggctgcactacatgtggtctccgtgtgacacatggttgggttccagtaagatgtgtcccaggagtgaccattccaaaagtcccaggcagaagttgcaagacttcttatggcctagccccagaagtaggacagcaacatttccacagcattgctcaagaaaaccactaaagccagtgcagaatcaacagtctgcaccccgtctctactaaaatacaaaaaattagccgggcgaggtggcgggcgcctgtagtcccagctactcaggaggctgaagcgggaggatggcgtgaacctgggaggcggagtttgcagtgagctgagatcgcgccactgcactccagcctgggtgacagagcaagactctgtctcaaaaaaaaagagtctgtgtattccaccgctagatatctggagtagcaggtgtgtccagggaaggaattaatggcggcagcttgggaagtctgtctactatgtacactacactgacaaatgcaaaagcgcacatatactgttttgttattttcgctttctctcttctccctggatggttgggaaactaagtcttgtcaattaacatctttgtctgttccagcttaagagtatcttttcagttcgaatattaaaactgaatttctttttttagatggggtcactctggccccccgagtgggagtgcagtggtgcattcacagctcatggcagccttgacatcctgagggttaaggtgatccttccacctcagcctcctgagtagctgggactataggcgtgcgccaccatgcccagctaatattttgtattttttgtaggggtgggtttttgccatattgcctaggctagtgaatattcaatttaaactaagttaaattatctaatagagctggtttgagtagcttcttttggataacttgcagtccaccttccttcttttcttttcaagatggcctctggggatgccctgatgtcctgtggcagcaggagggtgggtgatacggggatgggggttggcctgctctcccacttttccagtaaagaaaggctgggccagatctgtgactgttaaggcagcactggtccatctggccttaggggatgcagtgggacccaattctggaatccctagcccaggccacttggttttgatcttgacatctccaccgatacagacctttgtcctgtctctccatgtacccctactgtggcatgtcagagctcctgggtctgtgttctacctgtccttccccactgcctgccactgtacaccctcaccattgctcccacaccaagttggaccccttggccggagttatccaaggatatctggagcaagggatggtctggagggtcacaggctcccccgtgttaagctgaatttatctacatctttcccacctcacccctccttgaggtgtggctcccagatcattggtacctgcctgatttcttctctctagctctgttcccctctgccacttacagtccccagcccattggaacagtagtcaggctttgcaggctccttgcaggatgtgcctctgccctgcaacagctctgcttagagcctagcaggcacaggtggaaggtgcatcctctctacaccgtggaagagataatgattacatcctctggacttggccctagatatattaaataaatgccagagaaatttagaaaactttcttggcaatgtctagcagtcaagattcatgtctcttaaaaaaactttttaaaaagcctattttggtaacaaattgaacaatccttttttctctctgagttcttgttttaacaatcttaatactctagccctattaccaataacctctcccatggtcaccctaccagccagagtatctgccactggctgacatggaagacaattatttcgaggaaatgcacagtgaaaaaaacacagtaatatatttccaacaaaacaaaacaaacctcaagttccctaactagtagctacaattgtgatgaccattgtccccacccagatcattcatttattggtggcaggggccagttctggttactttgacgttaacctgccatgtgacttcagcaagtcaccagcagtaggtggcgttctgccaaggtttccaccacatctctaaggccccttccagcctaagtctccttctagtgacaacctgtggacagtgggtgagaaaatgcaagctgctgaccagctgacactgagcagatctcttagttattgactgaccatttatccaaccaaggtttccaaggactgggacattgtctttttcaccactgtatcccctgcagctaaaacagggcctggagaatggtatacattcaataaataaatatttattagatattgagtgactgctgactccttcccactggtcctccccagacacctgtcccacgtgtgatgtttatcaggtatcagaatgcaatatccccaaatatggtaccttggcatactgaatattttaaggtgaaggaaattgagaagatcacagaagcaataaggtcactctgatcttcttcctgcttcttctctcctgaagtgggtcatagagactagaattcccctcaccctttcttccttaaagcaactaataaaacctaagaatgtcactctctgaccttgtccctcctttctccctgaagactctcatacaacaggtatcctgctatatacctagagggaaggaatgtcacacagaagccaagaagaatcagactaaacagggcttgctaagttcctccctgtttattattattaagtcataaccttttgtcctctgattgtatttctgcatgactgtccgtaaaaatacatggttttccctaggtctttgggtcttcatttctgaagcctcccatgtcatgtaaaatttatatgaagtaaatttgtattattttctcctgttaatctgtctcctgttatcggagtcccagccatcagccttgcagtgactgacggaaagatcttactttttctcctctgtcctttgtttctgctttctgggtcctggcaagcccgtgaaggctgatgtctgtgcccacctcttgctcgccaggcttttgagggagggaaattctcagcgtccttggccattctttactggctttcatagtgagatgtgtacctcgtcagagctgagggggtgcctctgaggaaggtggcatgttctctggctaattcagagcttctcatcagacaacgggtctctaggaatgaggagcagaccctgctcagacattgggagcagcaagattcctagaatgagatggaatggtccacaatatggaatatgcactctaggctgatggttcacctcaggaggtggccttgggtgttcaatacaggacagggaagtgccaaaaatgatagagggtgtcttgggggatgggatgcagatagctgacatttcctattcttaatatctctcagcataaagcaaagaacatacaatgtcagtgggggctcacctgaggcctgttagttcagaagttctctgcatttttcagccggccacactctgataaccttcaggaaaggtattctcacatttgtacctacagttacctcctaggtaaagccaagctgggtcatgggttatttgctccctgcttacagctggaacgctcttccttcttccactggcctgtgatgggccaacatgacagaaccttaacactcattgggatacctagtgcagcacctagcacaggtgggcatttggggaatgtttgtggaatgaatgaatgaaacaaagggcaagagggaggatgaatgagagggaggaagagaagtaaaggaaagagaaaggaatggagaagaaagattatttcatattggtgataccagtgctcatttagaagtctctaaatttttgtaatagcaaaagattaaaaataacaccgatgtccatctatagggtcctggctaattaactaactgtataataagataaaatgcgcatttttttttaaaagcggacactcttcaggttttggtatgaagaagttttcaaggtactaaatgtaaaaagcaaagtcactccgtttgtgtgtttaggggtgtgtgtgtttgtgtgtgtattaggctacttctgtgtcaaaaaagagaggaaaaataagaatattttatatatttacatgggtcatataaacaaactatgaaagagtatacaggaccctaataaaaatagttgccattttgggggaggttagttgggggaaggaaaggaggaagaaacaggaggaaaacttttcactagctctttaaaatggttgtgcctggaaatatattactcttgccaaggttgtagtttaagtccctcaagtcaggggagcattctagttgaatttcctctatctagtgccctgtgaagcatgtgactagagctctcccttgatcatggcaaaattgatttgataatagaatctgatctttttcattttagccaaatctagctcatctgaaccattgccctccagttataagggaggaaagagagaatgactcagctcaaaggaactgcttagatatggttacagcatgctacttctcatggtaaattatgttattgatcgccaaatttgtgaacagtttttacctatacaaagtattcagttttataagtaaatgtttttaaccattgaaagaattggtaaaattcaggaatggttacctcttgccaggattcttggaaagatggaaaatcggaaacaagcatctgtttcactgctttttctacatttatgtctttatctttgaacaagtacctactgaacacctattatgggtgaagcttagataaagaaagtcagaaacatatgtgggtatattgaaaccattgacattcccataggggctttttttccttttttgctatgtttggggggaatggttaattatcattgcactataaatgtattggcataacaagtggcttatattcttcactttaataacaatctgtaatttcctgagtcataataataaggctttaacatattagctcagtgaagacttggtcaatgtctttactgagaaaaatatgttatgacctagcacatgataccatccattataatgttcttggtcaataatcataattttattataattattgaaagctagggtttcccctctgtgcagagtgttgtaaagacagatgcatgagattgtgaaggatcaaggtgttatccataatagtacattcagctggatttatgtccctctccaattagaggacaatcaagctcaaattaatttagctcacagctactaatgagcaacagcaaaatcagctcactataaaaaaattgttattgaattttattttctccaacttgatgaatgtctatgcactgcgagtaatgtgtgtttgaggtctggtggtgagggaccttgagggttgtctcatccgccccgttcatgggctctgtgacagctccgttccctggtgcaacaacatttaatgagttgttagaggtccacagagatgggcttcctctgttaactgagccttgacagtgcttttgagtgaattttctggtctaaactgctgatataaatataatgcaaaccacatacataatataaagttttctagtagccacattttaaaaagtgaaaaagaaataggtgacattaactttaatatattttatttaactcaatgcaatgtatccaaactattatttcaatgtgtaaacaatataaaaatattaatgcaatagttttcattctttctgttttgtagtaagtcttcaaaatccagcgtgtattttacatttatggtacatctccagtactctagcctcctttcaaatgaacaatagccacaaggggctggtggcttccacatggcacaggatgggtctagattgaatttcttcattcataacaaagctgcatttccctctttggagtttgtaggttgaggcaaggtgagcacaggctttggttgctcaatgatgataaagaacatacacaacctataagcaggagaagatactacattttcatctttactgtgagtcttgcaagtcattggcaaatttacagtctctgtgaattggcttatggtccctgtcaccatccacctcccacactaataaaggcagaatagatcctcataaatatcctttttccccattatcagagcttcaccaattgtggcctcataaaaaaagaaggttgtttattattattattatttgttgacataaaaaatgcatatttttctgaagcctgacttcccactagtactgttgctttgacatcaaatagggcatgaagcatattgtcaaatacatgtttggggaattagaagccattgagtgtttcatctctttggcaatgttcctgaggaaagtgcatatttaaatctaggagaatattttaattgtttaatattgtaaatgtttaataggaattctgaggcgtaatgcaaggactcactgaacttgattactgcaaagtaggagatgtgtaatgagagtctggagctcggggttctcatcacttggagacccttatacactaatgaaatgggatgcccaggataggggcatgggggagtacatgaggaagaacagccgctgatattaccactccaatggatgcagctacaaactaggcttcttgccagcacacaaggccctctgatgacactctgataagcttcagcctggcacaatctcatcattgctatttccaccctctttcctctcaaagtaaataggtagctatcagattcctgactggtctttctgtttccagccctgtcctcctcaagttcatcctctacccagctgtcagagagctctgtctaaaatgcaaatgggaccccatcactcactgctaaaagcacttcggtagctccccattgcccttggattagagaccatgcatttcttaacagtagcctacaagctgtcctgtgatctggcttctctggatttccttctcttcccttcctctcttctttcctttttctgacttataatttatattcttacaactccgacccacattcctgtaatcattcctttcctcccctcttttggcttcttccccaccaaattttaatttactttctttataagtcataagtcagcctttacctcctccaggaagcttcccccactccactccaagcaaggcaaatgcctttgatactgctgtggtacttgcatcaaatatatgcacatcaatcataatgcctatttgtgtaaccatctgccatctgcataacaccttgcctttcatttttgaatccttcatgccaagctcagtgcctgatgcttagtaggtactcagtagatgtctgctggtggactggccagacccatgatgcagtggtttctggggtttggggaactgcctttcctctctgttggaagatgaggcatcacctctcattcagctcctgagatcagcctgggcactcattcccctacaagagggaactgatgatgagactaagtcttcagcccaatgcctgcagtagggtcctcagaggcctcactgcctgccaggcatggtgatgaaagtgtattgctttggttcagttagatgaggtcttgggaccccaccagcaatgcagtgttttgaagggagtgggtagagggaggatgcctgaacagtcaggagtttaatgtccatcttgatggtgatgagagtcattgaagcatttttagcagagagtgggagaatcaggtttacctggaccaaggctcttccagcccagcctcaactgcacgtttctgtattcctgcagtttataagggaagaaatgcagaggaaggggtcagagagagggatctgtgtcagttagaattgcaatctgttgtaagtagaagaaaattcaaagaacactgagttaaaaacaagattgggggttatttctttcccatctaacaagaagcctggaaatgggctgttcagggccagcacagtgtttacccctttgcctcattgtcttagcacacgggcttcgtcctcatggtcacaggatgacttcgcctttccaatgggaacaagggagaaggatgaagggtccaaggcaaaaggacaagctactgaatctatttcctggacagccacccagtggcctctgcttgtgcctcggtcacgtgggcactgctagctgtaaaggagcctgagagacgttgccccaacaaacttgaagttctgtgaatagcgaaagaacaaatagatactgggcgggcaactggcattaacaccctgactttccaacatcttcctgagagtttgaatttatttttttcctggcattaacactctttgaatttaccttgtttactagtttgttggcttgtggtgtctgaccctagaacatatgctctgtgagaggaggagcctcttttctctgattctgtcctgcctgtttcacctctgactcacaccacagggatgggggatcccgcagctccaggccttcagatccagaatgaaaatcctcggctccatcccccagagggatatttggaagcatctctcaaagaggtaaggtatctctggtatttggcatacaaccaatttcaccagactggctgcctctcctccatctccgggatcttgttctttttcttttcccccccttattaaacaaattagccaagatgacactggatactgattagcaatttgtatagcaataaaagaaaactggcagaattccattgttttgctctccaattcttcatttccatttttaatgtactgtgtcttcattcatttgattgggtttccttttctgtgtatgtccttaatggaacaaagtgttcttcttcccccaacccctccaataattgtgaacattaaagagctgcttaaattgttcagtcatttcattttataatttgagttgggagtatttatggcttttcctccccttccctttgtgctaaatcaatagttgctgtgtaaatgcgacttaaactgtagcatggaggcaagctcttctacttctagatccttccctgtggccccgccggctgggggatttggagtccctatctgtcaaaggccatccttagccttccggtcagccccacgttgtgatataaatgatcagcacacacatccccttcttgaggggagatgccctctctgggctcctatgttaacctacttgtgctttcaaactcataatttttcctctaaaatgatcgctcatttatttgtctactggagattctggagggaagggactttatcctatccatctctgcctccctacagcccccttgagagaatgctagacatcaatagatgcaggatttcacttaatcatcaattaatgactgattgggaagaactgaacaataacaaaagccaaaagccaaatgtattctctgtgataggcattgttctttgttgctttaaagacgttaacacatttaatctttacaattaccgtttatgaagcagggattattatcctgatttcatggaggagggaagtaagccaggaagagagattgagtagctgctttagggttacaagcccaatatgggggacagcaagattgggcccataatttggccctgggtagtgtgagcatggagcctacctgcttagcccttgcagagcacagccttcttgtctgagtagaagctgccatgtatttatatgacatctgggccaggaagcagagcctccttccctctctctgactcaggagcctccatgtggggaaaccattccaaccctgttgactccagcaaccttctgagaatagatataaatgcaaatagcaggaactgcattgatgtggaccttccttaatgcctgaaaactgcctggaagctgccacaacagtgtatgcctccccttggcatgtgcatgtggctactggaagccctgggggacgaggcccaccccatacagggcagagccctctgaagagcctgctgcaggtggctctgccaccaccaacttacgtaacaaatcactccgagccatctttactctgtaaaatgcaaatgtctgtaggtgctggaggcagcctgccaagaattcctgtggccaggaatttcacaaaccagacattacttttttaaaagagaaaagactgaagttaggtattcacctgttaaacattaagaactaagaacattaaaaaaggagaaaagtaaaataaaaaagaccatcttttgtcaccatcgtttcataaaagcattttaactccctaaaatataagtgggactatctcagaaaacaatgaacaatccattaaattgaattctgatggttaacagatgaaaaactcacactgtccttgttttgttcatccgttcagcttagacctgtgaaaattctattgcccatcattgaggtccagtttttgggaaaaagtaatgtagaaaaaaaaaaggagtccaatcctagccctgccatccactgcttgtgtgactttgggcaatttagttagcatctttgatctttggtttcttcctctgtgaattgggagctgcctttcagtgctttttaaagattaaacaaggatatgagggtgatgtggctgcaacatctgtcaccccactgattgccagggttgatttggctgatctggctggctagacgggtgtccctttcctccctctgctccatgtgcatccctcctgaagctgcatgctccgctgaagaggatgaccttccccaacagaggagaaatggtctttggtcaagggtatatgagtagccgtgctcccctgctagaacctccacaaacaagctctcaagattaaatgaggcgtgtgtggagtgctcagaacctgggggaagagtttggactatgctcagaattttcagagcagcaattctcaaaatgtgatcccagacaggcagtatcagcatcacccaggaacttttgagaaatgcaaattattgggcctcaccccagacctgctgaatcagaaactgggagtggagcccaggaatctgtattttaaccagcactcttgttgattctgatgcatgctcaagtttgagaaccaccattatagggaaagctgtcacctcagtcacagtggccactgctgtggccatgtgtgggatctgtgagatctgatagagcagccagaacacctgtgaagagggaacgaagagggtcttgagtttccctggtaattattcagttcaatctgcactttgttcacaatccatccttcatgggaggaggctttacctggacatgttaagcatgggtcacccacctacctgtcagcattagattcctcatccataagctcaggacacctgtgccctccttcccacctagcagtggtggtgacattgctctgcagagagtgagggctcccttcctcccatctagctgtctctgatgtcaagattgccaggagtggggacaagcaacaacctgcactttgccattgatcagcttttctctgtgtctctcattttctctattgagtgacacttggaggtgggcctagtgtctgcccaagtctgctgctacatgatgctgtcagcatctttgtcccaaaatacggctataattgggtctctcccaaacaaaacagtccctttacaagatacccagagaataaatccaaagtctatcctgaaacaccacagcctccaaaatctagtacccactgtctgaattttttaaaaaataaattttaaagatgtaggaagcacagagaatagtattattacatgtactcagaagtcacactatcacatgttactgtgttgtcacatttattttattattttctagtgaagttattacaagtacagtcttctttcccctccttgaattcacgcttcagtcattttcctctgcgaatcgctttatacagcccatactcaagcctgacaggaccatgggaatttccagtggaaactggtgccatattgcctccctacatttgtctgtgtgggacccctgactagaatgtccccctacccatcagctgcccctggaatttgagagttcactcaaatcctactagctcttcaagcaccagttgaaatgccacacctcccatgaagcccgtgggttttctttcccacttctcttaaactcccccagccctccccactgtcaccttgagctgggataactttcaaatccctgcctttggagcacaggattgattcagagcacgaggctgaaggctcagcttggccattgactgagtgtgggatgcttgacagactcaatgccctcatctgtgaaatggggataataatgtcttctttgcaggcttgagagaaaatgtgtgacggctgtaagggatgatcatgcgagggattttataagtaatcctaggtaagggatcatttatgtttgctaatgctccctgactttcgtcatcatttgcggtgatgcatgcacgtatctcaactgcctgaggacagagtgaatcccggcctgatttaccttttatgctacgcagaattcagtttgatgctttcccacaatcatgactcaataaggttgactgaggagtgggtagggttacgaacactgtgatcgtttctgcctgtcttactacaaggtggaggaatgggacttccctttggccgtcagacatacagcaagtgctcactgtgtgccaggcacaggactagctggcagtggaggcacaaatatgttccagacatgatctccaaggccagttataggcaaaggtcacgtgtgtgacaaggaagacatgtcccttcatgttgtttattcattgcctgagcagcagctagatggggagagctgctggggcccaaaaaagggggtgggggagcattccctgagtgcctgagataaatgctccatgaaagtggacacggaacatctcacaagtgtcttggaagcaacctccttcgtgacatcatgacaaatggcttttctaggaaaacagaccaaatgtgagcaaaaaggtctgtgatcccagaccccaaaagttctgaaaatgggatatttactataacttacttggtggcaaaacctggaccaacctgatatgaggctatttatggtattcatcctcctgagtgtgaaaatccatgcctttgctgcagaaatatgtgtgtgtaatgacaggacacttccccagaccttattggagatgtttttagcatgcggtagatgcactgtatcaccttactaaaatctgggaaattttgaattcctacagatatttgaccccaaaagttttagccataaggattgcagacctgtagaagctgcagcagtgagggactgccttccagtcaatcctgcctcccactaagtttttcttcctgtaggctcccaggcaaatggttttcttctacctggggaaggccagtcccagtatcttcaaagtgcaggcagggctcagctcaacctgcagccaaaccctagtgggatcttttacttaattcagaagtatgtttttcttaatgtgagaaacacagctcagcatgagcttacaggaaaggtgggcttagtgttgcctgcaggcatcttctgggccttattggatggttgcaccatcctgctgggcttaataccccacactgcccatcccccggagcacctgcatactctggactttctctgctgcctttccatgtccgtggtgtgtagggaaaatgtcccattttctcagggccctgatagctcctaagctcctatattaactgtgctccagtattaataaatgtgtaggtactaggttttatatttctagataccatttgcactttagcaaatgtactttatgctttaacccataaggtgactaacagagggtgttcaaataatgtgctagaccctttttttaaaattaattctacctactttgttttttaaatttttattttattttactttaagttgtgggatacatgtgcagaatgtgcaggtttattacctaagtatacatgtgccatggtggtttgctgcatctatcaacccgtcatctaggttttaagccccgcatggattaggtatttgtcctaatgctctccttcccctcgctccccacccaccgtcaggccctggtgagtctctgtgtccatgtgttctcattgttcacctcccacttaggagttagaacgtgctatgtttggttttctattcctgtgttagtttgctgaggatgatggcttccagcttcatccatgtccctgcaaaggacatgttctcattcttttctatggctacatagtattccatggtgtatatgtaccacattttctttatccagtctatcactgatgagtatttgggttggttctttgtctttgctattgtaaatagtgctgcagtaaacatatatgtgcatgtatctttatagtagaatgatttacgttcgtttgggtatatacccagtaatggcatggctgggtcaaatggtgtttgtagttctagatctttgaagaattgccacactgtcttccacaatggttgaactaatttacattcctaccaacagtataaaagcattccaatttctccacagcattgccagcatctattgtttcttgactttttaataatcaccattctgactgctgtgagatggtatctcattgtggttttgatttgcatttctctaatgatcagtgacgttgagctttttttgtatgtttgttggctacataaatgtcttcttttgagaagtgtctgttcatatcctactcccactttttatggggttgttttttttcttgtaaattggtttaagttccctgtagattctggatattaaacctttgtcagatgagtagattgcaaaacttttcttcactctgatgatagttttttttgttttgttttgttttgctgtgcagaagctctttagtttaattagatcccatttgtctgttttgcttttgttaccattgcttttggtgttttagtcatgaagtctttgcccatgcctgtgtcctgaatggcattgcctaggttttcttctagggtttttatggttttgggttttacatttaagtctttaatccatcttgagttaatttttgtataagatttaaggaagggattcagtatcagttttcttcacatggctagtgagttttcccagtaccacttattaaatggggaatcctttctccattgcttgtttttgtcaggtttgttgaagatcagatggttgtggatatgtggtgttatttctgagttctctgctctgttccattggtctatatgtcttttttggtacaagtaccatgctgttctggttgctatagccttgtgatatagtttgaacccaggtagcatgatgcctccagctttgttctttttgcttaggattgtcttggctatacagggtcttttatggttccatatgaaatttaaaatagttttttctaattctgtgaagaatgtcaatggtagtttgatgggaagagcatggaatctctaaattactttgggcaatatggccattttcacactattgattcttcctatctatgaggatggaatgttttccattgtttttccatttccatgcactgattttcttgaacagtggtttgcagttctccttgaagaggtccttcatattccttataggctgtattcctaggtattctgttctctttgtagtaattgtgaatcagaggtcattcatgatttggttctctacttgtctattgttggtatataggaatgcttgtgatttttgcacattgattttatattctgaaactttgctgaagttttttatcagcttaaggagttttgggctgagacaatagggttttctaaacatagaatcatgtcaaatcaatcctgggggtggagccaagatgactgaataggaacagctccagtctacagctcccagcatgagcgatgcagaagacaggtgatttctgcatttccaactgaggtaccaggttcatctcactggggagtgccagacagtgggtgcaggacagtgggtgcagcgcactgtgcgtgagctgaagcaggcctcacccaggaagcacaaggggtcagggaattccctttcctagtcaaagaaaggggtgatagacagcacctggaaaatcgagtcactcccaccctaatactgcgcttttccaacaggcttaacaaacagcacaccagattatatcccacacctggctcggagggtcctatgcacatgtagcctcgctcattgctagcacagcagtctgagatcaaactgcaaggcggcagcgaggctgggggaggggcgcccgccattgccgaggcttgagtaggtaaacaaagtggccaggaagctcgaactgggtggagcccaccacagctcaaggaggcctgcctgcctctgtaggttccacctctgggggcagggcacagacaaacaaaaggcagcagtaacctctgcagacttaaatgtcgctgtctgacagctttgaaaagagtagtggttctcccagcacgcagcttgagatctgagaatgggcggactgcctcctcaagtgggtccctgaccactgagtagcctaagtgggaggcatcccccagtaggggcggactgacacctcacacggccgggtactcctctgagacaaaacttccagaggaacaatcaggcagcagcatttgcggttcaccaatatcggctgttctgcagccaccgctgctgatacccaggcaaatagggtctggagtggacctccagcaacctccaacagacctgcagctgagggtcctgactgttagaaggaaagctagcaaacagaaaggacatccacaccaaaaccccatctgtatgtcaccatcatcaaagaccaaaggtagataaaaccacaaagatggggaaaaaacagagcagaaaaaccggaaactctaaaaatcagagcgcctctcctcctccaaaggaacacagctcctcaccagcaatggaacaaagctggacggagaatgactttgacgagttgagagaagaagccttcagaagatcaacctactctgagctaaaggaggaagttcgaaccaatggcaaagaagttaaaaaccttaaaaaaaaaaattagacgaatggctaactagaataaccaatgcagagaagtccttaaaggacctgatggagctgaaaaccatggcacaagaacgatgtgacaaatgcacaagcctcagtagctgatgagatcaactggaagaaagggtatcagtgatggaagatgaaatgaatgaaatgaagagagaagagaagtttagagaaaaaagaataaaaagaaatgaacaaagcctccaagaaatatgggactacgtgaaaagactaaatctacatcagattggtgtacctgaaagtgatggggagaatggaaccaagttggaaaacactctgcaggttattatccaggagaacttccccaatctagcaaggcaggccaacattcaaattcaggaaatacagagaatgccacaaagatactccttgagaagaccaactccaagacacataattttcagtcaccaaagttgaaatgaaggaaaaaatgttaagggcagccagagagaaaggtcgggttacccacaaagggaagcccatcagactaacatctgatctcttggcagaaactctacaagccagaagagagtgggggctcatattcaacattcttaaagaaaagaatttccaacccagaatttcatatccagccaaactaagcttcataagtgaaggagaaataaaatcctttacagacaagcaaatgctgagagattttgtcaccaccaggcctgccctaaaagagctcctgaaggaagcactaaacatggaaaggaacaacttgtaccagccactgcaaaaacatgccaaattgtaaagaccatcaaggctaggaagaaactgcatcaactaacgagcaaaataaccagctaacatcataatgacaggatcagattcacacataacaatattaaccttaaatgtaaatgggttaaatgctccaattaaaagacacagactggcaaattggataaagagtcaagacccatcagtgtgctgtgttcaggaaacccatctcacctgcagagacacatataggctcaaaataaagggatggaggaatatctaccaagcaaatggaaaacaaaaaaaggcaggggttgcaatcctagtctcagataaaacagactttaaaccaacaaagatcaaaagagacaaagaaggccattacataatggtaaagggatcaattcaacaagaagagctaactatcctaaatatatatgcacccgatacaggagcatccagattcatagagcaagtccttagtgacctgcaaagagacttagactcccacacaataataatgggagactttaacatcccactgtcaacattagacagatcaacgagacagaaagttaacaaggatatccaggaattgaactcagctctgcaccaagtggacctaatagacaactacagaactctccaccccaaatcaacagaatctacattctttttagcaccacacctattccaaaattgaccacgtagttggaagtaaagctctcctcagcaaatgtaaaagaacagaaattataacaaactatctctcagaccacagtgcaatcaaactagaactcaggattaagaaactcactcaaaactgctcaactacatggaaactgaacaacctgctcctgaatgactactggggacataacaaaatgaaggcagaaataaagatgttctttgaaaccaatgagaacaaagacacaatataccagaatctctgggacacattcaaagcagtgtgtagagggaaatttatagcactaaatgcccacaagagaaagcaggaaagatataaaattgacaccataacatcacaattaaaagaactagagaagcaagagcaaacacattcaaaaactagcagaaggcaagaagtaactaagatcagagcagaactgaaggagatagagacacaaaaaacccttcaaaaaatcaatgaatccaggagctggttttttgaaagatcaacaaaattgatagaccactagcaagactaagaagaaaagagagaagaatcaaatagacacaataaaaaatgacaaaggggatatcaccaccaatcccacagaaatacaaactaccatcagagaatactataaacagctctatgcaaataaactagaaaatctagaagaaatggataatttctcgacacatacaccctcccaagactaaaccaggaagaagttgaatctctggatagaccaacaacaggctctgaaattgtggcaataattaatagcttaccaacccaaaaaaagtccaggaccagatggattcacagccgaattctaccagaggtacaaggaggaagtggtaccattccttctgaaactattccaatcaatagaaaaagagggaatcctccctaactcattttatgaggccagcatcatcctgataccaaagcctggcagagacacaaccaaaaaagagaattttagaccaatatccttgatgaacattgatgcaaacatcctcaataaaatactggcaaaccaaatccagcagcacgtcaaaaagcttatccaccatgatcaagtgggcttcatccctgggatgcaaggctgtttcaacatacgaaaatcaataaacataatccggcatataaacagaaccaaagacaaaaaacacttgattatctcaatagatgcagaaaaggcctttgacaaaattcaacaacccttcatgctaaaaaccctcaataaattaggtattgatgggacacatctcaaaataataagagctatctatgacaaacccacagccaatgtcatattgaatggacaagaactggaagcattccctttgaaaactggcacaagacagggatgccctctctcaccactcctattcaacgtagtgttggaagttctggccagggcaatcaggcaggagaaggaaataaagggcattcaattaggaaaagaggaagtcaaattgtccctgtttgcagatgacatgattgtatatctagaaaaccccatcgtctcagcccaaaatctccttaagctgataaacaactcagcgaagtcccaggacgcaaaatcaatgtgcaaaaatcagaagcattcttatacaccaacaacagacaaacagagagccaaatcatgagtgaactcccattcacaattgcttcaaagagaataaaattcctaggaatccaacttacaagggatgtgaaggatcccttcaaggagagctacaaaccactgctcaatgaaataaaagaggatacaaacaaatggaagaacattccatgctcatgggtaggaagaatcaatatcgtgaaaatggccatactgccccaggtaatttatagattcaatgtcatccccatcaagctaccaatgactttcttcacagaattggaaaaaactactttaaagttcatatggaaccaaaaaagagcccgcattgccaagtcaatcctaagcgaaaagaacaaagctggaggcatcccactacctgacttcaaactatattacaaggctacagtaaccaaaacagcatggtactggtaccacaacagagatatagaccaatggaacagaacagagctgttagaaataatgctgcatatctacaactatctgatctttgacaaacctgagaaaagcaatgggaaaaggattccctatttaataaatggtgctgggaaaactggctagccatatgtagaaagctgaaactggatcccttccttacaccttatacaaaaattaattcaagatggattaaagacttacatgttagacctaaaaccataaaaaccctagaagaaaacctacgaaataccattcaggacataggcatgggcaaggacttcatgtctaaaacaccaaaagcaatggcaacaaaagtcaaaattgacagatgggatctaattaaactaaagagcttctgcacagcaaaagaaactatcatcagtgtgaacagacaacctacagaatgggagaaaatttttgcaacctactcatctgacaaagggctaatatgcagaatctataatgaactcaaacaaatttacaagaaaaaaacaaccccatcaaaaagtgggcgaaggatatgaacagacacttctcaaaagaagacatttatgcagccaaaaaacacatgaaaaaatgttcatcatcactggccatcagagaaatgcaaatcaaaaccactatgagatatcatctcacaccagttagaatggcaatcattaaaaagtcaggaaacaacaggtgctggagaggatgtggagaaataggaacacttttacactgttgatgggactgtaaactagttcagccattgtggaagtcagtgtggcaattcctcagggatctagaactagaaataccatttgacccagccatcccattactgggtatataaccaaatgactataaatcatgctgctatgaagacacatgcacacacatgtttattgtggcactattcacaatagcaaagacttggaaccaacccaaatgtccaacaatgatagactggattaagaaaatgtggcacatatacactatggaatactatgcagccataaaaaatgatgagttcatgtcctttgtagggacatggatgaagctggaaaccatcattctcagcaaactatcgcaaggacaaaaaactaaacaccacattttctcactcataggtgggaattgaacaatgagaacacatggacacaggaaggggaacatcacacactggggactgttgtggggttgggggaggagggagggttagcattaggagatatacctaatgctaaatgacgagttaaggggagcagcacaccaacatggcacatgtgtacatatgttacaaacctggacgttgtgcacatgtaccctaaaacctaaagtataataataattaaaaaaaaaacatgtcatctgcaaacggagatagtttgacttcctctcttcctatttgaatatcctttatttctttctcttgcctgattgccctaatgagaacttccagtactatgttgagtaggagtggtgagagaaggcatccttgtcttgtgctggttttcaaccagcttttgcccatatagtatgatatcagctatgggtatgtcataaatagctcttattattttgagatatgttccatcaatacctagtttgttgagagtttttaacgtgaagagatgttgagttttatcaaagtccttttctgcatctgttgggataatcatgtggtttttgtgtttatttctgtttatgtgatgaattacatttattgatttgtgtatgttgaaccagccttgcatctcagggatgaagctgacttcatggtggacaagctttttgatgtgctgctggatttgttttgacagtattttattgaggattttcacatcgatgttcatcagggatattggcctgaagttttcttttttgttgtatctctgccaggttttggtatcaggatgatgctggcctcataaaatgagttagggaggagtccctccttttcagttgtttggaatagtttcagaaggaatggtaccagctcctctttgtatctctggtagattttggctgtgaatccatctggtcctgggctttttttttttggttggtaggctattaattactgcctcaatttcagaacttgttattggtctattcagggatttgacttattcctggtttagtcttgggaggatttatgtgtccaggaatttatccgtttcttctagattttctagtttatttgtgtagaggtgtttatggtattctctgctggtagtttgtatttctgtggggtcagtggtgctatcccctttattgttttttttattgtggtctatttgattcttctttattttcttttttattagtatagctagcagtccctctattttgttaattttttcaaaaaaaaaaaacagctcctggattatttgattgtttgaaaggttttttgtctctgtctccttcagttctggtctgatcttagttatttcttgtcttctgctagcttttggattattttgctctgcttctgtagttcttttaattgtgatgttagggtgtcaatctgagatctctccagctttctgataagggcatttagtgctataaatttccctcttaatactactttagctgtttcccagagattctgatacattgtctctttgttctcactggtttcaaataacttgatttctgccttaatttctttatttacccagtagtcattcaagagcaggttgttcaatttccatgtagttgtgtggttttgagtgagtttcttaatcctgatttctaatgtagttgcactgtggtctgagagactgtttgttataatttctgttcttttgcatttgctgagcagtgttttacttccaattatatggtcgactttagaagaagtgccatgtgccactgagaagaatgtatattctgttgatttggaatgaagagttttgtagatgtctattatgtccacttgatccagagctgtgttcaagtcctgaatatccttgttaattttctgttttgttgatctgtctaatactgacagtgggtgttaaagtcttccactattatcgtgtgggagtctcagtctctttgtaggtctctaagaacttgttttatgaatctgggtgctcctgtatttggtgcgtatatatttaggatagtttgcacttcttgttgaattgatccctttaccgttatgtaatgcacttcttggtcttttttcatctttgttggtttaaagtctgttttatcaaagactaggattgcaacccctgctttttctttgctttccatttgcttggtaaattttcctccatccatttattttgagcctgtgtgtgtccctgcatgtgagatgggtctcctgaatagtgcacacccgtgggtcttgactctttatccaatttggcagtccgtgtcttttaattggcacatgtagcccatttacattaaaggttaatattgttatgtggtaatttgatcctgtcatcatgttgctatctggttattttgcacactagttgatgcagtttcttcatagtgtcattggtctttatattgtggtatgtttttgcagtggctggtactggtttttaatttccatatttagtgcttccttgaggagctcttgtaaggcagtcctgtggtgactaaatcccttagcatttgcttatctggaaaggattttgtttctccttcacttatgaggcttagtttgactggatatgaaattctgggttgaaaattcctttctttaagaacgttgaatattggcccccactctcttctggcttgtaggatttctgctgagaaatccactgttagtctgatggacttccctttttaggtgacctgacctttctctgtggcttcccttaacattttttttttttttttcatttcgaccttggagaatctgatgattatgtgtcttgtgttctctgtgtttcctgaatttgcatgttggcctgtcttgctagcttggggaagttctcctggataatatcctgaagtgtgttttccaacttggttccattctctccatctttttcaggtacaccaatcaatcgtaggttcagtctttttaacatagtcccatatttctcagaggttttgttctttccttttcattcttttttctctaatcttgtctgcatgctttatttcagcaaaatggtcttcagattctgatatcctttcttctgcttgatcgattcgactattgattcttgtgtatgcttcacgaagttctggtggtgtgtttttcagctccatcaggtcatttatgttcctctctaaactggttattctggttagcaactcctgtaaccttttattaaaattcttagcttctttgcattgggttagaacatgctcctttagctcagcggagtttgttattacccaccttctgaagcctacttttgtaactcgttcatctcattctctgtccagttctgtgcccttgctggagaagtgttgcagtcattcggaggagaagaggcactctggcatttggaattttcagtgtttttgccctgatttttcctcatcatcatggatttatctaccttttatctttgaggctgatgacctttagatgaggtttttgtatttttgttgttgttgttgttgttgatgttgttattgttgctttgttagtttttcttccaacaggcaaggcccctcttctgcagatctgcttcagtttgctgggtatcctctccagaccctgttcacctgggtgtcaccagtggaggctacagaaaagcaaagattgccacctgctccttcctgtggaagcttcgtcccagagagtcactggcttgatgccagccagagctctcctgtatgaggtgtctgtcagccccttttgggaggtctttcccagtcaggaggcatggggtcaggaatccacttgaggaggcatctgttccttagcagagctaatgtgctgtgctgggagaatcccccttgtcaggatcagctgctcttttcagagccagcaggcaggaaagattaagtcctttgaagctgtgacagcacccatccctccccccgggtgctctgtcccagggagatgagaattctgtctgtaagcccctgactggagctgctggatttgctgcagagatgccctgccccgtgaggaagaatctagagaaacattctggccacagctgcttcgctgtgctgtggtgaattctgctcagtccaaacctctcaatctccttagcactatcagggggaaaccacctactagagccacagtaatggaggtcgcctctcccccgaccaaacttgaccatcccagtccgactccagactgttgtgctggcagcgggaatttcaagccagtggttcttagctcactgggctctgtgggagtgggacttgctgagcgagaccacttggctccctggcttcagccccctttccaggggtgtggatggttttcctgtctcacgggagttccaggcactgccggagtatgaaagacttctgcagctcagtgcctgcccaaacagtggtctatttttgtgcttgaaacccagggccctggtggtgtagatgcacaagggaatctactgatctgtggattgcaaaaatccatgagaaaagtatagtacccgggtaggtgggacagtctctcacggcttcccttggctgcgggagggaggtcaccgggctccttgcacttcccagatgaagtgacgcctcaccctgcttctgcttgctctccatagatcacacccactgcctaaccagtcccaatgggatgaaatgggtaccttagttcggaatgcagaaatcacctgccttctgtgttggtcttgctgggagcagcagactagagctgcttagctgtttctatttggtcattgtggcccccactatgctagagtgttagggagaatattttgggatagagaagttgttctggttgcttagtgctactgaataaagtacctcctatcccaagtagtagcttcaaacagcaattttattttgttcataatgttgcaggccaggaatttggggagtgcttgcctgggtggttcctctctgatccatgggaacttagctggagtggccagagcatctacttctgtcatattctgtctgtcagagcagtcacaaggctttcccagataagacaggggaggggaactggccctatcctctgaggggatgcagcaagatctcaccacaggagtctgtgggatgggcaatgctgtgactacctttagaaaatacggttcacataggaggtttccaggcagatcagatgctcatgtggaggaatctgtaaccccagtccaaagaattatgatgcagaaaacatgtggcacaagaggccaaaataatatcttccatctgcaccccacagaggaaaggaagttgctattaagaagaccaagaaaatccgtgtctaccctcactcacatcctacaccccctaactcctaaactggttcttgtaccccattccccaaacttcctgtacccttatctgctaaacttcttgtactcatctacaggtactgaaaatttctctaacatatgtagaaaacttttccttccaatgcaaaatataaaacttaaaattgtcatactaagccctgcacaagcttgacagcaggggctctccggagatttagttgtgagaacaggaaggcagcatgagccccagggttctgctgcagcatcaggggaggggaggagaggaggcactctggggagagcgacggtcaggaaggagcttagccatctccatctcacaggggaacccaggggcactgctagactggaatgtctctactgactccttggtttttcccattcctgacactgtcattaactgactcctactggagacccctgtctgccacatgggcctcagtattgcaggtgtttgtgagctggaccccggagcatcaccctttaagaacttggctaggatggcaggttggggataaagctgccaaggagcatttttatttctgcatgttaaaacagcccttgcctggccacctgggttggagggtttgtaattttgtctcagccactgcccatcagctgcaagggtgctattaaaggcaatcttggtgttactgcagtgaaatgtcagctgagagctgcatttctcagctaacttggagctggggcacccatatcctcttgctcgagtgtggtatgaaattgaaactgggctggggctggattctgtcctccagatgagctgcttttgaaaggaaaagaatctctgtaaaacctgggaatcaatctgactggtgatgctccatacaggtggccaaccctcaggcttccctgtggatcatcagcttggtggcttctctgtggtggccctcttgccccattgacctgcctctcatcttgcccaggttccctttccctctgggaactgaggccaggtaaggagacctgggctttttcttcttattattgttattatttttttgagatggagtcttgctctgtcaaccaggctggagtgcagtggcacaatctcggctcactgcaacctccgcctctcagcttcaagtgattctctcaactcagcctccccagtagccgaaattataggtatgtgtcaccacgctcagctaatttttgtatttttagtagagacaggatttcgccatgttagccaggctgttatcgaactcctgacctcagatgatccacccgcctcagcctcccaaagtgctgagattacaggtgggagccaccacgcctggccagcatggactttttctataacaagcctgagcctgggctgggatcataaactgtctggaaaataaaaatcatatcctgaattgacagggcaaaagaaacacattttggatatttcacagttttctgtcatccataccgctctctccttcctcattgacaactgaaaagtgaaggaaaatggcacaggttggccaggtctgtggactgaaaacccaggaagcaggggaaagagaagtgtgtgtaacccacagaggagggtaggatgatttgtggtggggtgcgggcagaaggcttgcactttctgcctcattgattgccacggccccctgtgcaggatacagaggcagttggacaagccttatgcatcctgggctttggtgacatcagcaaagtagagatcatagtcatgtcttcctcatagggcagtgtcttagctgttcaggctattcaaacagcataacatagaccaggtgccttaaaaacaacagaaatttatttctcacagtcctggaggctgggaagtctgagatcagggtgccagcaggtttggtgtctgctgagggacacaattcatagatggcatcttgctatgtcctcacatggtggtggagggggcaaggtagctcactggggcctcttctataagggcactaatcccattcatgaagctctgctctcaggacctaatcaactccctaaggcaccacttcctaataccattgaattgggggttaagtttcaatatatgaattttgggggcacattccatctatagcaggtggacaggaagattccatgaaacaatacatgcaaagcaccaaaaatagggcctggaatatagaaaacactcagtaaatgtttgctgtcactacctctattactatagaggaataaatgaaggcaaaatgaaatagtgaggtgacaaggtaaaagggaaagcctgccatgtcagatggccattggcaagcttggcttctgatccccactctaccagtaactattctgtgaccttgcacaaactctttaacttctctgagccttggattcccctcctaccaactaagaagattagatcagttagtttctaaggccccttctgctagaaaatatattatgagcctgctatgaaaaatgcaaggtcaaggagaacctcctatcatagacctggaaggggaaggaggaaatatgtgcatggaagggttgtgggcacagaggctacaaagctcagcatttgttaatacagggactggtgagtgctgcacagaggctagcctggtgtcctttccttcacatcctgcgtagccattgttctctataataacatcaaaaaatcactagaaacatcaagctcccagttgcctcacttaacagaagcttgggttatgggtacagatggttcttcaacatccattctcctctccttctctgtggcagtagggtcccctttatctgagctgggcacaagactacccagttagagttggtgcttcccaacctcccttgccactcagtaaggtaggtgtctgagttccagccagttgtgtgcagctcagggtcccattcttacaaagatgctgcttgccttcttcctaatcattctaacttcccagggctggaacccagtatgggggtgggtgttcagtttccattgtgtgcatgagataatgatgcaggactttttgctccttaactcagctaggtttgcattcttgtctcacgaccaggaagaattaggcaagtggacattaaagagtgagtggagtagaatttattaagcaaaaggagagctctcagcaaagagaagtgtcctgaaagcaggtttctggttgcccctttcacagttgaataccagggattaaggcgtgaattcctggcagctccactccatccttccagtgtgctttcaggcccttagactgagacactccatattgatttacttcccttaccgtgtatgtgttaaggaatggaattttccactgtgggcatgtttaggcaagtcccctatgcaagttcccttatctgtgcaaaacatctgatgtaagcacttgtggggcaggtcagaggttctccagggtcgcttcccttactatcttcctaaagcaagctggctaactcctttcaataacatactaaggataggaaacctgggtgatcactggaacagtgccactttaacccttaggtcacctgcctacttggacttttcatgagagatatagaaacctatttgtttaagtgcgtgttatctgggttgggttaggtcctagcagccacattagtattatcataaacacaggaatgatgggggttagaaagtggggaagaggaatttgtaatggatctttgttactgaactgaactggggtctcctcacccagctcagtaaagccagacactgacactaagatttgcagcaggagaaaagagcatttattgcagggcaccaagggaggagaataggcagctaatgtttcacacctgaactccccagtggcatgcaagcaagggcttttcaaggcaggggtacatttcaggaaagcagaaattgcagacaaaattataaaccaattacacagaggttatacattgttttggcccatggcatgactttctccagacccctcaggaagaaatttagaacagagaatggcagccagagttcagtcgtcagtttccccttatctgagcattaagtgatagtggtcagcactttccatcttgtggggatttctaaaaacaactcacaacttgagaacatatgttaagatgtcatcttttagtttctatagggaagcaaaacaccttgtgactctggcttgcctgggagactgttgttactatcttcctgcttatcaggttgcttgtttgcttttcaaggctacctaggtgcttggaatttgccttgaagggactcaaggtttttctttatctccatgcttaggaggccaggcaggccatcttgagacaaactagtacttcaaatgtggtgtggtccaaagtctgggttctagtccctgatcaatcagcccaggccagctggattgggggatgtggtggtcatctcagctctccacatgcttgcccccttgatgcaggatttttctcagccactttgccagctggagacccccagatgtccatgcccctgcccaggcctcactctgccccaggcttgctgcaggaggtactccacccacttggcctgctgggccatgcctggcttgcacaccagcccagctcccacacttaccatgggatctgcactcatcctgcagttgggctgggtgtgcaccagtccgccagcattacagcttgtatctgtgttcagtggtccctgagttcttgtctcatgtccaagaagaatgaggttatactgacaatccaaagggtgagaagggcagaggacagaccacctgaagttgggtggtctgtctccccgtgtggctgggtccagggcttttatgggctcagaatgggaagtgcatgctgattggtttgtgagtatgtgaaagaggctaaaacaaaggcaccactcaaaggtgggcatgacagtgtaaaaaaccaattagggaatggtagatatatgtaaaataggtgaagcgtggggaacaatcagcggaaagtacacccaaggggaaaagaggttcttaatcaggtctgtggatttatccgagacttgtagcttggctttcaggttttaaactgtctttggcttgaaagttgggtttcagtggggacccacccctatctgcctaggcatttgtctgcctcctgccactatcaccctcctctgtgccatggcagggcctggtctccaggagtgatattctgtgactccctaactttggactgctctaggttctacctcagagtcacttgttaaagggacagatcttcactcactttccagagagggtgagaaattagccaggcagtccatgtgaggcagctgctttataaacattgagcagacatcatttgtaattgggaaggtgatgtgatttcagggtccccatccataaactctctcatgttctattgtgcaccatggtgcttgaacacactagtagagttttattcctggatttagtcattctagtcttcagatgttctagttaaaaaataaatcctacattcactcaccaaacacttactaatgctaagagtggctatatctgtccctgttccagatccagatgctgaagacccagagttgaataacagtcagattgtcttaaaaccatcttataatccacgatgtgtgatgggcgtgtgtgtgtgtgtgtgtgtgtgtgtgtgttaaagcacctgatgatgacaattcttctccactttcaatgcaccaaagaatcaactggagatcttgctaaaaggcagaatcagatcagtcagtctgggggcaggcctgggattctgcatttctaacaagctcccaggtgatgcagataaactggtccaagactaagtttgcgtaacaagagacaataagagtctgatcactgctgtcaactagtgtggaggacccacataggagagaggacatgattgagttgtcctggtcagaggctagcagacgaagcgaagtttacccaagaggtttcacattcagtctagacctctgaggatgaataggccatcagcatccataactggcatgaagaatagtttatcaggcttcttaatgtatttttccatcagcattaatgagacttagccaagagacaattttggttaagagttggtgagtggagaaaaatgggattcatttataacaacagttctcaaacttgagtgtgcctcagaatcactcccagggcttgttcaacacagattacgggtccccactctagagttgtaagtcagtaggagtgggctggggcccaagaatttgcatttctaacaagcccccagtgaattttaagaaccactggtttataacaagaggccccacagggcacagcaagaggggagcctggctatagtagggacaagaactggacagatcgggggataggcagaggaactctgagaaagaaatatgtgggcaaggttgctggaaggggttgggttaagactaatcctgagaccgtaagttgtagtccagcctagctgatatggacaagatattaagaactgactaatgaattgtaagttgcctaagagaaggggcctggggcttgtctacccagtattcctatcaccagcagagtgaagatgtggtcattccaaccaaaattactttctcccttccctcccctctttctgattatgccacattctaggagtctgcctataaaatagaaaactcggtccagcccagtcagctctcagtggacgttggcaccctggggattccttgacagttccggggcctctgtggcttgggcagagagagcctccatctgtggtggcatttgagagctgttgttctccaggatgcagtagctccacagcaaaaaaaaaaaaaaaaaaaaaaaaaagaggcatcatatgcaaatatcaaatgaaggggagggaaggaggaaagggctggctgacattttggctctgcccctagatcctctgagaagagaaaccactcgtgcctgaattaatgttaattcaagggggtattttcaaaaagtggtccttggaggagcaagatgctgtgtttcctattttccgttgcctccagcaagccgcaccgacagagggtcaatggggttactgtatgaggaagcccactaattgcattataaggaatgttttgcccattagctcagatggaatggtctcctaacagagtcctttgaggggagtgatatttcaggtgggggatggaggaaaaggaattgataagtaattgaaatttgcaaatggcatttccctgggccctagacaaaaatgggttccatacatccagcagggggcagcaatgcacgtacattaattccggtcttgtgaatcaggagcttggcgagatctcagaaattgcaaagcagtaaggatgcctggggaggtttatagacaatttccaggcccggcaaagctgggactgtcacacccaccatttccccaacagtcacaccttttatttttctcaatatactgagaaaataaatgtttaggtctgatggtttttaattctagaaattttctttaatctttcggctgctttgtgtaatttagaatttctgcagcctgactgaaaattataagtaaactaggattaggaagtcagctttattaataagatagttcagctaatagacattttaaaattgtaatgcaatctatctccctccctgagttgaaattttgctagagctgtaactgataggacacccacacaccaagttgggtaacttatttgctgatccattttaaagtggaggaaaagaggctccaaaaatataaataaagataaaagtctcaaagaagtatcagattttcctgaattaggcacagaaaagacctactagtttgtccattcctaaggctgtttaggaatgtggcccataatatattttctcagtaatttgtcaaatttgcttgtaaatgacttttatgatagatggctttgcctgctttactgggctggaaatttctgcagcccagcacacttctccttcaggaagcttcttgcatcttgcataatgtttctcccagccaccctccccgcttacgccccttcccaaggttaatttagtcctgttgttcttaaatgaactactctaaatcatcctcctccccttccctgtctttctcctcactgtttaaacctttcaaggatgtaatagtctggcaaatatttcaatcatcatgtctccttttcagctgcccaattcaattccatttggtgctgctcgtgctgaagtgcaatttttcacagcattgtttttagtttaaataacatacagtgcactattgctaaaggtcttctggaacattccacttgggggtcttacccttaaataatattttgatgggaaactaactcaacttttcataggaagaaatgctatttgctcccagcactaattggctgtaaatttagctaaaagtccatctacgctggcagttagaccatcttcctgtgcccatgtggtaccctgtattagatgtctaatggacagacttagtgaataagtatgtatctgtaagtgcaccatttagaaaacaatcaagtgaaaggaatttaactctgctaagccagcaaatgtaatttttctcatttcttgccccttcttgccacgtggcagctcctcaatttaccagctctatgcccttgcatgtattactcaacatttctgagtctcagtttcctcaactgcaaaatagggaaagcaatatctgctttctaggttttgttgtagggatcaaataattatgtacagcatttggtaaaacataagtccccaagaaatgcaactttttgccattattattatcactactcttatcattatgcagtctaaattctatgcctgggttatctttcagagttcctgactgcctatacattcacattgttcaacaaatgttacttagggaaaccgtctctgaccccctggaattggccaggttcccctgtgattcactgtcacagatacgtgtgtgtgtatgtgtatatgtattcttatattattaccctcaaattaaatgctcccttcttcataaattcagagcagctaatatcctctcttctctccttaatggtgtgtctaacataccttcatatcctaggcttgactaggaacttctcataggcaggagcagagccttgcctttcaatggagcctggattgtcacatagaaatgagcacatagaggtctgtggtgtgtacttgtgagactatcagactgtaatatctttgaattcagggaaaaggctaattcaccttcagttcccagagcataccacaccccaagcctgtacatggtaggcattcgagggaggtctactgtgtcgattaaggctgtgcattggtcttccaaactttgctcaccatatacaggtttccttcagagtcccagtgtccatattactgtttaacacgactgaaaaggaacaaaacgaaatccccaccttcaccctctcactttgactgtgggtgatttctgtaattaagagcttcaggaggtcgggcacggtggctcacgcctgtaatcccagcactttgggagacagaggcgggtgtatcacgaggtcaggagattgagaccatcctggctaacatggtgaaaccccaactctactaaaaatacaaaaaattagccagacgtggtggtgcgcacctgtagtcccagctactcgggaggctgaggcaggagaatcgcttgaacccaggaggcggaggttgcagtgagccgagattgtgccactgcattctaatccggtgacagagcacgactccgtctcaaaaaaaaaagagcttcagatgactttctaagatacactccctaagaatctcatataacgaatggcctagaacatgacttctttattgttaacctatgttgatgccaagagatcagtgtgtctttttgtgatgctcataaacaacctattaaataatccgttttccatttttaaggaggacttaggtgcatgtgcatgagtctgtgtgagttggtgggagaccaaagggagacagagtattctgaaagcccaccgaattattcagctctattttctggcccagaattcaccagatagcacaaaacaagctaaatcatggcatgataaaacactgcagcccggacaatgaatatgcaaatagcataacagagttaagtactgagagagccatctattgtagatagtttagcttccctttagtgaaagatcaaggacagaaacacaaaaagatcatgctaattttaaaaagagaaaatagatgctagctaacgtgaaaaggatgaatataaggaggcgttggatcagtccccccagggctcagcagttctggaggatggcaagcccgagtctttggatacaaggaacagcgcgatacaacggaggtacttgcctcttggaaaacacacttgcactctgtgttgcatctgtggtttccatggtatgaagctgccactgtgtttgttccaatgcactttgaaaagacagggcacatttatgagcaaaggcatatggctttgtcctttcaagcttatccaaggctttagaatgtcaactgtagtggctggaaagcagccagcaaattaggaggctacagaagaatttcgtgagcttttaaaataatttatttcagtttatcgtttacatagaatgtcagatctgaaggggaccccaggagttatccagtctaacttcatattataagtgataaaatgaggtccagcaaaaagaagtgatgttactcatagcgagagtttgaatgtgctgttcctgattcatacattagtgattattccattatacctagctgtatttctgtccagactatttttataatgctgattaagctgggctgttttggtgaattttaacatttcccatagatttttaccatgtgtaattttggaaagggggctttgttaaagtattagaagacctactatagtagtttcttgtggtttaggtggaggaagagcactgatggcattttctgttgcagtaagtttgttggttgtaatatagtttttggttacaaggagcagaaacctgaccacagctgtttgaaagaatataagttcatttttccactacaagaattctggaagtaggagagtttggctttggttcagcagctcaacgatgttagagttgatgtctgattatctcagcctttgcctcagtcataagacaactgccacagtgccagccatcatgtctgcatttgatgcaggaggaaagagaaagagggggagcaaactgcatcttccgtgttattgggggaaaaaaaaactttcccagatatgtccaagaagtcttctgtttagatctcactagccagaattggccatgatgcaaagaagttgaaaaaaggatgtcccttataggcttagattagtcatgacccttcccccagggcttgacacataatcaggagcttgtaatgctgaggaagaagagggcaataactgagggctccatatcaccctaaaactgtccacattcccatttgtatgtaatatgtttggagtacaagcttgatgcaaggatgggcagtggaaggtttttggtgtctgattctgtcatctctttatacctttagtggaagattatttcccaaccaaaggcttatctgaggataacaaaacaattccattgccagacatttatagagcccaacctgtggaaacaataaatgcctgaaacagtttacctgcactatatttcaacttctgaaatgtagatcgagaggataaattttatgaaaagttcactaaaagtaaatattgacaagtggttaaatctcataaaagacataattttaaaatgctgcttgcacctatagttctgttaagtcaaacggcaaaacacaactctgtgctcggttctctgctaggcagttgggatccatcactgagaaaataagaaaaaacatttggggcacaggacttggggatgtattagtcagggtcctccagagaaatagcaccaataggatgtgtggacagtcacccctttgtaactgtgggttccacatctgtggattcaaccaacagaatggcagataaaaaatatttggaaaaaaatatatctatactgaatatgtacagacttttctggctattattccttgacacagtatggcataacaatatttacatagtatttacattgttttaggtatttgatatattaatagtttggatatatgtccttaccaaatctcatgttgaattgtaatccccagtgttagaggtgggacctggtcggaggtgtttgggtcatgggggcggatccctcatggcttgctgctgtcctcgtgatagtgagttctctcaagatcttgttgtttaagtgtgcagcaccaccccaactctcttgctctcactctgccttgtgagatgcctgttccaccttctccttctgtcatgactggaagcttcctgaggcctccctagaagccaagcagatgccagctctatgcttactgtacagcctacagaacaatgagccaattaaacctgttttctttataaactacccagtctcaggtattcttcatagcaatgcaacaacagcctaacacataataatctagagattatttaaaatatacaggaggatgtgtgtatgttatatgcaaatgctataccattttatatctggaagttcggcatccttgaattttgtaaatattggcaagcctttaagtctcataaaagatgtaattttaaaatgctccctgtgcctagagttctgttaagtcaaaccacagtagcctaccaatgtgtatatatgtgtgtgtgtgtgtgtgtgtgtatgtatatatatacatatatatatatacacacatatatatatacatatatatacacatatatatatacacacatatatatatacacacacatatatatacacacacacacacacatatatatatttttttttttggaaacagagtctcactctgttgcccaggctggagtgcagtggttccctgcaacctccacctcccaggttcaagcaattctcatgcctcagcctcccaagtagattggattacaggtgtgcaccaccatgcctggctaatttttgtatttttagtagagatggggttttgccatgttggctaggctggtctcaaactcctgacctcaactatgcctcccaaagtgctgggattacaggcatgagccaccacgcccagccacatatctatgtatattgatataccttggtatcctcgggaggtcctggaaccaatccccctcccctcacggatactgtatatatacacacatatgtatatatgtgtgtgtgtgtgtgtgtgtgtatgtatatgtgtatatatatatgtatatatgtatatatgtgtgtatatatatagtgtatatatacgtatatatatgtacacacacaaatatatacatatatatatataccattagatgtatgctgaaagattcaaaaagtcttgaatgagcatctactacatgtcaagtgctatgtaaagcagggagagaatggggagtgacacagtccctcctcgagggacacaaccactggatgagatagacaagcatagagaccctcacaggctgaatggtggctgccctgagtgagcacagagctcacggggtgtgcaggggcaggcacggctgtcctcactgagttggctgccctctggggtaggcccagtatgaggtcccaagagctggactgacttagctcaggttcccaggcctagaacctgaacccagaccacctggcttgtcatcctgccttagcagaaggcctctctgaaacccacaagcagattcttgacccagtgagcatgagtcctttactctgcctgaaaaaaacaccaccaggtaacatcaggggctggtggtccctgatggcagtgcaatacattggccacagaggacatgggtattgtggaatcagaagatgcttgttgccacagcaaagaagagcatgatttcctggaaggcaacagaccccatggagatgaggctgctgtagcctctacctccctcattcatgctgcagaagtatagccttcctctaacagttgagggtctgaaacttctctgctttcctcagcccttgggagaaagcctaatgatccaaagcaagctgaatggagtcagtagacatggaaaactgggagccgtggtggccttcagagaagagaaccgatggctggctagagagcctggcttctgtaccttttggattttgtacaatgaacctgcattaactttaggtatgatgttaggcaagctgatagcaaaggcttttctgagtaaagtgagagtccctgaaggccatgtgctagattacaaacatcatgggctcagagtcaacagtcacagctctgccacttattatttgggtcatctcacttatctgcttcaaactgcagtttcacaccaggaaaatgggatgctcatgagtttgtggtaaggaatgaatgaggggatttatgtagatagttgaagccagaagttggtcttgtctgttggccttgagacacaggtaggctgaaggccatcactgatgtgcagccctgggtccccagctgatagctacagtgacctgccccatcagcaacaagcacttcctattcactctgctcaaaaagccaaggaagtatgtcatatatttggagagggggcagattaaaatgctggcagggcttaaagggggagggaaaacttgactttgcagcacggctcatttctcaaaggatctgcacaagcattttctccccctagatatgcgctatctcttaaatcaacaataagtaatgctttacaaactttttagtgcacacatctctcccacataaacagtaagcttaattctggaaaagacatactttcatacgtgtttgtaccgttcaaaccccacacatggctgccacattcacttccactttcaaccatttttttttttttcctgagatggagtcttgctctgtcacccaggctggagtgcagtggcacaatcttagctcactgcaacatccacctcccaggttcaagcgattctcctgcctcagcctcccgagtagctgggactacaggtgcgtgccaccatgcccggctaattttttgtatttttagtagagacggggtttaccatgttagccaggatggtcttgatctcctgaccttgtgatccacctgcctaagcttcccaaagtgctgggattacaggtgtgagcctggcctcaaccacttttaacacagaataggttggtaatctattgctgtgaaacaaattacccaaaacctagtgccttaactctaacagtttcttttggtcaggaatgcagaaggggcttggttggcctgctgtgtttcagggtctttcgtgaggttgcagtcagaagtcagtgtgggccgcagtcatccaaaggctttcctggggctggagggtctgcttccaagatggtgcactcacgcaactggcaagttggtgctggggctactggtgtctctgttttattctgggtagggctacttgagtatcttcatactatggtggctgggtccctcaaagcaagtacccccagaaaccaatggaagctttgatgcctttgatgattcagcttcggaagtcactcattagcatttctgagtcctctattggtcatatagaccaccagtgattcaatgtgggaggagattaaataaaggcgtgaataccagggctagccctggaggccaacttcaaggctgactatgacacagagctgagacacaaaggtacttagttaagcacctgataatttgttgatgacatgattgtgcataatgtgaatataacatatacatggtaagaggtgaaagtgtgtttgttttacttttaggggagatgttactcaagtatcccaaacttgagtgttcattagaactacctggagggcttatggaaacataaattgctgggccccaaccctagagttcctgattcagcagatctagggtgaaatgggagaatttgtgcttctaacaagttctcacaggataatgatgctgctggtccagggtcgtgctttgagaactactgccctaattgatatagagacctagtggtccttcaagaaaatttgcttcaatgcaaatacatccttggcctcttatagctgagtgcccaaactgtcaaattcattaggcatatcatttttaatttgacgttttccaaatggcacagagtttatgtaaatgtacgaatcagagagacagtatatggacagcctaagtagtggtatgctggcaaactggctctcctcccaaaataaaaagctttgatttgtaacttttgccagtttccatagtgtaaatgctcccaccatggccaattaccaatagttaactagctcacaaaaattcctatttcacagttgactctgtagctggtacatgctggccccagtacaccattggctctaagcaagttctttccctgcacatatgaatcagagaaagtagtggcctatgtgggggttggggatcactgggtgattctaattgctagtaccttgtgcaccaaacaaaggcggtcaaatgccaggtctgattttcttcctacctggagtgtttgagtctttgaggtagctaaagtgataggatgtgattatgcatacaatgctatgtggtgcaggcacatctaaaatggacttttcaaatcctccccctccacacagtctccttaatctacccccacttggacaattctactgaccgctccaggccttctgtcctaattaagcacaacctcatagacactcctcctcaaaggcctctctggctttccttccctttgaagacaccaaggctcctttccttagggtaggtgacaggaaatactttactgaaatccattctttgagctgccaagatgcccagtgagggtataatgtctgagtgcctgtagaaattgggtagaacatttatttggcaattcaccttgtagagggctgtttatcacattgaactgttgtttaaaccttaacttatggccaggtatggtggctcatgcctgtaatcctggcactttgggaggccaagggggggggcagatcacttgaggtcaagagttcgagaccagcctggccaacatggtgaaaccccatctctactaaaaatacaaaaattagctgggcatattggtgggcacctgtaatcccagctgcttggaaggctgaggcaggagaatcacttgaacccaggaggggaagttggagtgaaccaagatcgcaccattgcactccagcctgggcaacagaatgagactccatctcaaaaaacccccaaatccttaacttgtaggattttttagtgtgttccctcacagcgtctaccatggggttttggacaaaataagcactaagcatttcatgagttccaactttgaattctttctcttgcagaaaacactggcattttaacagagagcttcaggtgccttaatgccagagagtgggtcatttgggaattctctcatgggattcaattaccataagagaaaagtggaataaaatgttttggtagtgtaagattagctgaaagaaaggatgagagagagagagagagagagagagagacccaaggtcaggcaagtaagtttattaacctgccaggctgctccaccgcagtcagaggaggcagccctgagcttaaaaaatgaggggtttatatgggggagagagaccctagggttgtcggttaactttaccacatatcttctcgtgactggcttacaatatagtatcttgtgaaaacatgaatttacaagaggatgtaacttaggtttatccgcgtttctcgtgacctcccccatgccgcccgggggggctgtaatcagggttcactcggcaagtctggtgaccttgctgtggcacctagataagggttcagggatgcagctgcagagtattcagggtaagggtcagctgcactgagtggtggtggtggtggggtgggggtggtcctggggcagcttgtccctaacagctaggaaagccttttagggcttcttttttgttatataaaggatacgttctcagaaaaatgggactcatgctgatccagtgcaataataacaacaaaagcccagcatttgaggtaggcagaatgtgacccctacagaagcgtcatcctccttagcttctctagctctgacattctgttaagtttcttagtctctctaagcctcagttacttggtctgtaaaatgagactagcaatacctgctctgttgtctcttgtgaggaggaaatgagaatgtgtgaaaagtgctagaatggagcctcatgggggaggctctcccaccccatgtcctgatttggacaaggaatcccacacacctcatccagatacacagaggctcatgactgagtctcttgacaaattattttttgagggtgcatacttttttgctgtgaatttccaaatgtttgcatttctaaggccacatttgtgacacagagatcagatcctttctgacacaatgtaactggcaggtcctaatgagctgggggcaccgggaagcattttaagtggtagcatttctggaaatattgagatgaggtcgggggaaagaagctttttcttcagggcctaacctgattaacaagacgatgcacttgagatacatgaaggtggatttctctgcttccagaagctcctgggttctggaaggttatttttatagtatggcaagtaataagcattagtgaccagccatgaatcccagatttggaaaggacgactcctaagacaggggcagacctggaaggaggagataaacattgaataggtgctcagctcaacaggctgcccacagtttacacaagcttcttggctcaatgtatctgtgctagggaaaaaagctcctcttcagttgctccagaagcacatttattaagcactaactgtgtgttaagccccaaaagaaatagaaaaaaggcaaaggacctgattttcatatctaggcatttacagagtagattatgaaaaaggtcatagatagttgtaattatttaactctccttgctataatagaaaatggcgttcatgctcggaatcaaatagagagggttttcatgcttggaaaattcagtaattaataaacttccaatgttttgaaattcatttctttgtagccacttaggaaaagaactgaccgaggttgggatccaggatcggaactttatgtggcatgtaaaataatttgaaagagtgagatatggctttgtaaatttttgtagaaaacaacaaacctgatgatttcccagatttggggggtaacatcaggcacatggagggtgaggtgtttggggcttgaattacagcattttcttttaaacaggcgtgactttccatgcgtagaaaatggtctcagggcttggattaggacgtagagctggaaatcagggagcccgagtttcattcagtgaacacataaacaccttactgagcactgacttcacgtgtcagtgctgaggataagaaaagcaacagcgtggcgccctgatgaagttgatggaagcacgctcagggcagcaaacagctctcccggccaggtcttgggagtagtcagagaggagctaacattgacacagtcttaaagaggagtcgaattggctagaaagaatgaggccagtgttccaagcagagtgaacagcatttcgcagcgtagtcagaaggccacaaatactgtcgttggaaaaggcaagagcattggttctccaagggtaacatgtgttccaatcacctggggacctgtgacatgcaggttctcattcaagagttctgaatgagacttgagagagtacatttctaacaagttcctgggtgatgccatgctgctgcctttagcccacttggtgtggagaggctgtggacatggagcatggagctaggagtaaaaatgggggctgggtggaggaaggggaggatgagggcttgtcacctgggctgatgattgcaccctggcacacttcagctgtactgcatactggtaatagcatccatggtgctcccagcctccaatgggctctgggagctgtctgcatccctcagccagcttagctctctttcccaatccaaatagcagcaacatcctcaacctccaaccgcccacctgccattataaaattcttccctccacccaagcctaagctttctgccagggtctggctgggtttcctcttccttttggcctcccatgggccctcaatacattcatcaccccttctcgatagctcccaccttttgcctttcccacctctttttcctcaaccataaacctgtttggcaccctcctgtcctacagccactgtgctgggaaactggccctgaacctgggtccccttccactgctctccagtctctccccatcctcacaccctgattgcatcgaagaacaaactcacacttgtagtttctctctccttcgtctcatctgttctatgtaatctatcactaccaccattctgccttccccgctctactgaaatggctcatctggagttaacactggccttccgatttcccagtccaggaatttcaggcccagtccagcttgtcctccagaacactttacagtgttgatcaccagtgcccagtctccctatagctctccagattctctttggccccttctcagcctcttttcctggttcctcttcctccatccagtcctcaccaggtaacatttcccagcttctcctctctccaaacatcctgcgtgggcagattgcccaagcctgggaagtgagccactctttctatgctgttgactcaggaactcagcctccttttgcccatctttctgtctattggtcatatttatgtaggtacctcacattttgtttttttttgttttgttttgttttttgctttttttttttgagatggaatctcactctgttgcccaggctggagtgtgtagtggcgccatctctactcattgcaacctctgcctccaaggctcaagtgattcttctgcctctgcttcccgagtagctgggactacaggaacgtgccaccatgcctggctaaattttgtattttttttttcagtagagaaggggtttcaccatattggccaggctgttctccaactcctgacctcatgatccacccgcctcagactcacaaagtactggaattacaggcatgagccactgcacctggcccagtgcctcacattttcaaaacagattccttcttttctctcctaaacctgcttttcctcctgggtcccactccaggtgaatcatacccctaccatttctcttctacagaaatcaaactagggagttcacttgactcctctcccagcctcacctgccatcagccatggtcctggctcctgccccccattaactgctgccttagtgtaggagatgacttcatttcattactcagattactgcctttgtcgtcacctgacctctctgcaaggagctgtggctttcaactttggccacacattagaatcagttggataatgtgatagggttctccagagaaataaaatcattgaatatgagtgtacacacacacacacacacacacacacacacacacacacagataaggaattggcttacatgatgatggaggctaaatgccaaaatctgcagttggcaagctggatacccaggagagcaaagggtatagttccggtccaagtccaaaggcctgagaaccacgaaagctgacggtataagttccagacaaacctggtaggttcaagacccaggaagactcaatgtttcagtccaagtctaaaggccagaaaaggtcaatgtccccctcaagcattcaggcaggaggagctccctcttactccaacttttcattccatttaggctttcagctgattggaccaggcccacccacattagggacaactgtcagctttactaggcctacctattcaaatgttaatctcaacaagaaataccctcgcagacacactcagaatatttggccaaatatctaggcaccccagtccagtcaagttaacccagaatattaactatcacagagaacttttagcaacctgatgtccaggtcacaccccaatctcattgcattcaaatttctgagggtgaggcccaggcatccatttttttttttaaggctctccatatgattccatcgtgcatccaaggttaagagccactgctttcatctcttctccctcagactgattcttcacactgccaccaaagtggttttcttaaaactcaaattggattatatttgatcccctgttcaaaagctttcaatgactttccatcatatttgggaaaattctttggcatgttatacaagcctttttgcatgttacacaaggcccttcatgattggccctgcctaattcttcagcctcattccgtgtgggtgcatcaggacatcgtactcaggctgttctgattcacctctcaggatttcttacggttctctgcatttgcatggactcatccttcagtccagaatgcaatctgtccccagcctattctccttcgtctttaagatcctattttgtcacttacagaaagccttctgagacactctcaagactaggttaaatattccttctttggataccctagcacccagtgctgtcaccaccaagagggagccactggtagatagtagtagatagtaatagatagcaggggttatctactatttacaaagcagcaaaacccagcacacagtatgcactcatgtagcacacctgcatgaatgaaggtatccacctcttcctacatctctaacttcagaacaagctcatgcagcaacaccgagaaagagttgaaagttcaatgagttgttagggcaaaagacttaagtctaaagtaccatatatgctgttaggacatttctcatccttactcaaatctaaatatagcaagtgaaaatgcaatccctaaaaaagcggcattattcccaaagagcctggcagagcagtgtttgctgccacagggaaggtggtcctgtcctctgctcccagtgttataaaatgtgtcctgctacattaagtgcccatgtccactctgattccagggataaggatacaactaagctaattttcaaaaggggagtgtagttcataggatcgcacttgctaacacagtggagcttcactattggcagaacaacagttttcaaacagatcagctattgagaggaggtgattatactcacagcctcctaattttatcaaaggcctatcagccacagtattctttcaagtatgtgcttcccttgagaatgtaaaattagtatcctggctgggtgggatggcttttccctgaaatcccagcactttgggaggattgcttgaggccagcctgggaaacatagtgagacctcgtgtctacaaaaactagctcggcatggtggcacgcacctatagttccagctacttgggaggctgaggtaggagtaaaaataaaatgagtatcctgtttataaaacttcagagcatgtgagatggctcatgccttacaaaaatgagatccaacaaggtttgagaatcactggattatggtgaatgtgaccaccacctggctatgatcagtcattgccttccagctcagagcttctcaaccctggctgcttgttaaaatcctacctgggggacttgcagaaatcccaatgctcaggccttactccaagccaattaaatgagaacgtctgggagtggggccctggcattgttttgctgttttttggcactggtatttctgaaagcacgcagatgatttaaataggtggcctgggctgaggattgctcctctaacttactggttctcaaacttggctgcacattggaattgcctggaggtgcctgggtccccccaccccaaccatggacatggttgtaattggtgtgggatgtgacctggcctccaagccaggatttgtaaaagctgttcagtggttcaaacgtacagcaaagccttgaaaccactgctgcaagcacatcctcccacagcctctaacagcccatttcaccttgaaaagaaaatccattgtcataagcagatgagcaacccaacctgtcaggaacatatttatcctcctggctgacttgaggcggctgaggatcactgaggtgggagtcaccactgaaaatagtcactgtgctggagagcgctggaggaaatgtaatagtgttagtttacacattaaaccctttgataccaagggccctgccacctgcaccaccagccaagcatccctgattcctggctgcctttgtggcccctgtggccttggatgagtggccacccctcccaggaaacattcagagcacattacagataataaacagatatgactaatgagctcaattattgtaaatttctgggtcatttcttatggcatttccctcccttctcctttcatcttatgttcaaaataatttctttgtatttccctatcaacatgtccaacctgagttggcgcactgccccgagtaggtaaggaggagaggacattctgttttctcaccccttcctctgctgactcccacctccacctcatttcctctctgtggcttgtgccaggtgggccagtacctgcaccatcttgagaaaaagttgctcaaaaagatgcatgtaatatcactctccacggagtcttacaaatctaacactttgagggcataatcttcaaaatttctggtttattgatgagtattcttatatgatttctcaacacattggaatcacctaggaagctttaataactatttttttcttttttctttttttttttttttttttttgttgagacagagtctcgctctattgcccaggctggagtacagtggcatgatctaggctcaccacaacctccacctcccaggctcaagcaattctcctgccacagcctcttgagtagctgggattacaggcacctgccaccatgcctggctaatttttctgtatttttagtagagatcgggtatcaccatgttggccaggatggtctcgaactcctgacctcaggtgatccacctgcctcagcctcccaaagtgctgggattacaggcgtgagtcaccactcctggcctttaataactattgatgccataattgacccacagagattctgatttagtggcgtgacgattagccgggcatggggattttttggatgcttcctatgtgattccagtatttagccaagtcatttgtcaatgagagggactgagaaagaagaagcagaaggacactcatagtgaaacatcgctcaagttgcagtcttcctatggactctcccctatgaactcccaatagcctttgtctcatttagattctttataagcacaagcagtgagatgagtttccttttttttttttttttattatactttaagttttagggtacatgtgcacattgtgcaggttagttacatatgtatacatgtgccatgctggtgcgctgcatccactaactcgtcatctagccttaggtatatctcccaatgccatccctcccccctccccccaccccaccacagtccccagagtgtgatattccccttcatgtgtccatgtgatctcattgttcaattcccacctatgagtgagaatatgcggtgtttgattttttgttcttgcgatagtttactgagaatgatgatttccaatttcatccatgtccctacaaaggacatgaactcatcattttttatggctgcatagtattccatggtgtatatgtgccacattttcttaatccagtctatcattgttggacatttgggttggttccaagtctttgctattgtgaataatgctgcaataaacatacatgtgcatgtgtcttcatagcagcatgatttatagtcatttgggtatatacccagtaatgggatggctgggtcaaatggtatttctagttctagatccctgaggaatcgccacactgacttccacaatggttgaactagtttacagtcccaccaacagtgtaaaagtgttcctatttctccacatcctctccagcacctgttgtttcctgactttttaatgattgccattctaactggtgtgagatgatatctcatagtggttttgatttacatttctctgatggccagtgatgatgagcattttttcatgtgttttttggctgcataaatgtcttcttttgagaagtgtctgttcatgtccttcacccactttttgatggggttgtttgtttttttcttgtaaatttgtttgagttcattgtagattctggatattagccctttgtcagatgagtaggttgcaaaaattttctcccatgttgtaggttgcctgttcactctgatggtagtttcttttgctgtgcagaagctctttagtttaattagatcccatttgtcaattttggcttttgttgccattgcttagtttcctaggagatcagaagcggggtgaggccacagaaaaatctcaaaagcaggtgtgtttgttttcagtgtcctttcatctctctaggagttttgtcctagggttgctgtctcattgctcacactaccctcctctcctccatgacccatgaaacgtttttgcaacattgttcgggtggcacagatgcaagagaaaaaactcagtattggtgagagtgtgggctggtgaaggagtgggtgattgacaggatgtcttgtgatgcacaagatactgaaggagcttagggtaagtgctccggcttcacgcactgtggtacacataacgttccctggtcatttcccaatacacattccctggccattctccctcagctttccctccaaggccttttccttcccgtgaacatttttctgttctgtgttccataccttcagcgtcctgctgtgggaccagctctgacagccacaatcaatggccttcccgggagccttctccatttgccttcttccttgctggctgctgtggtttgaatgtttaccccctctgaaattcatgttgaaacttaatccccaaagtaacagtattaagaagtggagcctttggccaggtgtggtggctcatgcctgtaatcccagcactttgggaggccgaggcaggtggatcatgatgtcaggattttgagaccaacatggtgaaaccccatctctagtaaaaatacaaaaattaaccgggcatggcggcacatgcctgtaatctcagctactcaggaggctgaggcaggagaatcgcttgaacccgggaggtggaggttgcggtgagccgagattgcaccactgcactccagcctgggggacagagggagacagtctcaaaaaaaaagtggagcctttaaaaggtgattgagtcatgaaggctctgtccccttggatggattaatccactcatggatgaatgggttaatgggttatcactggagtgggttagtcagcacaagcagggtctgttataaaagctagtttggctcatgctccagccctctctctgtgcgatgccctgcacctcctcagcactctgcagggtccccaccagcaagaagaatttgaccttggatttctcggcctcctgaatggtaagaaagaaatttcttttctttataaattacccggtgttaggtattcagctacagaaacagaaaacaggctaagataccagcagaacctggaactttttcaggtatctgaccctgcagcagatggtgaatcttgattagttcaagcagtggtcttttaccttggctgcatattaataacacctgaaaagttctttaaaaactactgatacttgggcctcaccatcgtttaattggtctttcctgtgcggttctcatgatagtaagtttcacgagatctgatggttttaaaaaggggagtttccctacacaagcgctcttctcttgtctgccgctatgtgagacatgcctttcaccttctgtcatgattgtgagtcctccccagccatgtggaactgtaagtccaagagacttcttccttttgtaaattgcccagtctcagatttgtctttatctgctggtgacactggttctgatttaactggccttgagtagggatgaagagttcccatatgattaaaatgtgcagccaagactgaagatcactggtctaggataatcatggcatttcaactccccttgccagtggttaagatagggcaaacaatgccagtttggcagatgaaacatgagaatgcagggatgggagtggggagatttagaaaaagtgtctcacctttaggaagtgatgatgtttctttccttttcatggtcttggagttgttgggcgggggtgtgatgcttgtcgccattgcagctatcttttgactgtgagtggatataccagaggacatagatttctatgatgaggtttgcatgatgcaatgttaaaaacaacctaggttggccaggcacggtggcttatgcctgtaatctcagcactttgggaggctgaggtgggcagatcacctgaggccaggaattcgaaaccagcctagccaacagggcgaaaccctgtctctattaaaaatacaaaaattagccagccttggtggtgggcacctgtaatcccagctacccaggagcctgaggcaggagaatggctggaacccgggaggcagaggctgcagtgagctgagattgtgtcactgcactccagtctgggtgacagagcaagactctgtctcaaaaaacctaggttttcaacagtgtcatcgagctgctaaacaagtcaaatttggaaccccagccctctagttggggagaggtggcttgatagcatgccctgctaaacatgcacagcaccttctgctgggtgtaaagctctcttagctctaaagctgttcactcatcacaggagagctgccaagagccagtggccttgctgggcaggccttatctgctactgagggctttgggcagtgaacgaagacagaatttgggcagattcaggcttgacttctggtcactgtgtgaattgactcaatgaaatgcatagactaagcgccttggttttatcatctttacaatgggactagcacccaagggttgttgctatggttccatttaaagaactcagcacagtacctggcacgttgtaacttcttagtaagtggcaacttttacactttttggtatatttactctccttatgctgcaatgagcaagaggtgaaataattggaaagaataacaagagagatgtttgatttttggaggactagtactctaacagttttgaaagactgaacaagtttttcctgtggtcccctctgcctgaaatttatcaaaataatttgagcctgattcaccaagtcagcacagatgttgggcccagtgtgactggctgagctctatattctagctctgccagctgatgggtttgatggatgcgtggagcccacaaaacccctgctactggtcgtgcaaaggctgtgtctgagcagcgggaccacacctcccttaaggctgagtaccacttgggacagcagctgtggtggggaggggggctgtggagctctgtggggatggggtcctccggctttgagggctgagttctggagtccagtgtcacctagatccagagtcctgaccatactgggtggggcagtgggggtggggggggtcccatcgttccctagagctggctgtcaacctgactgatacagtttggctctgtgtgcctacccaaatctcatcttgtagctcccataattcccatgtgttgtgggagggacccagtgggagatgattgaatcatggggtcaggtctttcctgtgctattaactttagagtgaataaatttcatgagatctgatggttttaaaaaggagtttacctgcacaagccctcttctcttgtctgctgccatgtgagacagggctttcaccttctgtcatgattgtgaggtctccccagccacgtggaactgtaaatccaagagacctcttatgtaaattgcccagtctcgggtttgtctttaagggcagtgggaaagcggactacgaaaccgaccttgtgcctggaagcagaactgggactggggtatcagatcatggtctccagttggccctgagtggttcactggggctccccgggagcccactcactgcccttggccctccccacccagctgattttcttccccagtgtctacagtccttgtttcctcctttctttcttccacctttatccaggcttcaactgccctgctctctgtcccttctgtcacttcccctgttgggaaatgtccccacaccccccactacccctcgtctctgagaccttctctcagttgggctcaatatctgctccagggaagtctccacgttcacatccccctccagccgcacttcctcacttgcctgttttaatcatccttattttatccttatatgccctctactatatctacttctagtccataattccatatccccctcctgccttttcaggagtcttgctgatcagtcatattgttgatcatccttttgccccaaaacctccagtctcattctcagaacttattctttttcatctatttgttaaaatgtcaggtttctcctatcttaaaaacaagacacatgaaaaggacaccctttgccactaatgtcctctacccaggaaggaagaattgtccagatccgctgcccctccactcctcccagccttcctagccctcggcagtgtggcttcctctgtcattacttctctgaatctgccctccccaggggcacagttgacttccttgtgaccaaatccagaatctccctgaggcagcagcctagaggaatgggtgtggctctgcagcacccccgttggttcaaattctgggccaccctagggagaacattgaccttagctaagtttcttaactctttcaatagccttgaaagggtggggcctattgctttcccagggtccaataataaccatagtgaatatttacggcaggcatcctgggcagggcttctgctcagtgcgctgtagggactgtgagttttgtgtatgggagctcgaacatgtttactgaatgaatgagtacattgtgcccaaatagtattaactaggtactttaaattcccacttccaccttcatccccactctgtccaccaggtccctggtttagtttctgattaagaagcgattaaacaaagactgtcttcttaatgtccaaattaaagctatttctagaatcgacatcttacatggatgatttggatctatcctaagactgagcataagaggtatctttggagtgtctgttcatatgaaggtcacattctgaattggtatgtaaattcaggatggttagattaatatcattctgcagcaaaaatttgatcattctggttatagtcagatcaaacacatttttaaaaactctgtaatccaggtcctcttgtgcaatttgtgagactagaaaatcaggggttaaaaaacccatctcaaggtcctagaatgaagatctttacatgagaaagaaaactactctgtaaaaataagcaggtagatgaaatgggcaattaaaataaaacagttgggcgtcttaattgaagtttcattacccttgtccttggaagtaagtgactgtaaactcaagctgggaactggggagtgggatcttactgagtgatggtaaggggttgcggaggcctactgggtgcaccatctgggggtcaggaagtgtgaacagtgtcaaagcaacaagatcatgggcctggctttcaaagagatttcagtctctttgaggagattaaactaaccccataaaaaacacagcattcgatgcaaggctgaataattaagtgctaaattgtggcacagatgctaagtgctagtggagcccagatgagaagatctatgcatcttggaatagcctgcaaactcttagggagggcaatggcttccagctgagtcttgaggaatgggctcagtttctatgacctcagcctgggcaagctacaaaagcgcgtgaagtgtgatgggcaggtatcaagagaggaaatctgtggtctgggactctcccagtgaaatgactggatacccagctcctccccagccaggagaacttggcccacaaatccctgtggatgctacttaccttgagccctcctggctttcctgggttatgtttctttcctgatctgctttccgtaggggcaggtgaccttctaatatcttccactcaaggccagctcgtgttggccctctgccccttcttccgtctggtgttcttgttatcagaccccaaagtcatatgggctacctattttcagcacctctttctttcagccccctagtaatcatgagtccctctccagagaactctggacaagtcctggaggggctggaagtgcatctgagcagagcatccccacgagcttgatgggctcctcctttgttcccatccccagtcccaactatccagttctagccagacaccacagtctccccacaggttagttgtttctcctgagagcttttattagtcagaactcatagggttagaagagattaaaaaaaaaaaaaaaacctcattctaaactagatcttaaaagagaggaggcatttgttgaatcatgaaaccaaaacttataggggttcacatatggctgaatccaggtgatcccagatatccataggagtccgctatgctccatcaggcaccattctctcgggcactttcccccaagtggtagcaacaagtttacactctgtcagatagccacactgcctaagtcctagggaagaaataatagaatttcttctccatagtcctagggaagaaataatagaattgattgtggtttgtctttcttggaccattttatccaaccctgaatcatttcagccaaggaaatgagatactgttatggccaggactggtcacatgcccatctgtggaggtagagtcaggaagagtgggttccccaagtggaggatgtgggttttattaccagaagaaagaatgctgaccaggcacacatgggtgcccattgtggaagtgaaatggtggcccttgctcccaatggccatgggctgtatgtcccatcattgctgcccctactgccccatgggtaaggctgatgctgaaactcttgtccttacttacccttcagagatgctcagaggcaggtctgaaatttccagatgtttccacaagtttccaacagactatgttgggaaatctggaaaatactgttttcaaagatttggaagacctttagaagcctccattttcccctccttcctctatttttccctctgtggcaatagctgaccaaggaagctttggagatcccccaattcactgcttgtttctcattttgttgaccaacaccttggattcccaaataagaaaagcaatcaggaaggtttcagagtgatgtggaaagaggggcaaggagagggccaggcattttcatgcatagcatttgcacaaggacagagtgccaatctcccagcaaagttggcagacagggcctccagcagttagagtgacaaaaaggtaatcagaaccacttgccactttccattgagacagacatgggagccaaagtgggaacaattcctggatgataaattgtttcttgcttttcctttgaacttcaagatccatccccctgggtccctcccatctgatggattgactgacaagttcaatgggcaaggagaggattccatacccaagaatctgagctgtgttaaggcaagtctctgaagctaattgaatgcgaatgtcagctgccaccgataggggtaataggaagaaaagaattaccttcatcaggggaacttttaggggctgagagaaaaaccaagcagaataagcaaagcctcttgaacttcaatgtgacatttttgcagccccagcaaaagtcagttaaacgctagattttaactcttccttgaagaatgtattgcttttctgcaatcaagaaattaaagctagagcactataaatttttaattgacataactttgtatattcagcttcacatgctgatatttttatcatatcatgaacattgtaaaccaatgccatttttcaaaatcatcataaatgtctgtataattcagggaaaggatataccatgctgtatttaaacatttctcactctttggtcattttggatgtttccaatgtcttgtcattgtaaattgttccacctcacatttctgaggcagtgttgaatgaatgtttattcatttttgccagcattgaatattatttttaaaatctattgccaatttggtaggtaaatagcttctctctaattcacatatctttgactactcataaggataagtattactttgcatgtttattagtcatttgtatttcaacttctaaaaattctctttatgctcttcacacatttttcttcatagttcacaggaactctttatatgttaagtatattacaggccagacatggtggctcatgcctgtaatcccagcactttgggaggctgaggcaggcagatctcttgaccccaggatttcaagagagagcagcctggccaacatgacaaaatcctgtctctactaaaaatacaaaaattagctggacatgatggtgtgtacctgtaatcccagctactcaggtggccaaggcacgagaattgctttaaccaaggaggtggaggttgcagcgagccaagatcttgccactgcactctagtctgggtgacagagtgagactttgtcgctaaatgaataaatgttacaatttattctattagagttactgttaacatcttgttatttgtatttaaaacttttgtaaaagatacaacttagtatttttctaatattattaatgtattttttgaatagtaatacatttgcttggtttaagattaaacaggcactaaggagagcaaagtgtttcctctccagtcttgcccttttgtgactgaggtttcctcctgaaagcacccattattaccaatttttgtgtatatagtcagaactttcttctgcatattctgtatctacaaatttctacatttatttttttcatattccctttttatacaaatataatatttgtaatcttcaactttctttttctaacattttggagttcattttatatcagtacataaaagctttcttactctttttatgatgccatggtattctattgtatggtttattgtagttttatgacatataaaaaagttaaggactttacagtcagatctatctttccatttttaatttaatccattgattttatgcttaaaatatctttcactgtgcagtcacttaaatactcatctgtgttttcttttgtgtttaaactttgtattttaagataaaggtaaattcatctgcaattataagaaataagagatccctcacaccttctacctagtttctctcaatgtcttggaaaactatactaaaatattacagccagaatattgctattgatagttaaattgatcctcctgcctcagcctcctgatgtgtttactttttaaagcaactgtgaaactgttttccagagtggttgtaccatatcgcattcccactagcaatgtatgagggacacagttttctgcagccttgtcagcatctggtgttgtcactattttttgctttagacattctgatacgtgtatactgatactgcactgtggttccaatttgcacttccctaagggctaatgatattgaatgtcctgcatgtgcttacttaccatctacaattcctctttagtgaactgtctcttcacatctgctgttgtctaaatgtttgtcctcctaaaattgatatgatgtaatcctgacccccaaggtgatggcataaggagatggagctttgagtggtggttgggtaatgagggtagaagcctcatgaatggtattagtgccattgtaaaggagaccccagaggactccttctaacatgtgaggaaaccgccagaagacggcactctgtgaaccaggaagtgggccctcactagacaccaaatctcttggcaccttgatcttggacttcctagtctccagaaccttaagaaataaatttctgttgtttataaaccacccaaccgatggcatttttaacagcggtctgaacagacaatgactgtcttttgcccattttctaattgaattatttctttttttactgttgaattttgagagttgtttatatattctaggtgttagtcctttgttggatatgtggtctgaaaatattttctctcagttggttgcttatctttttctcctcttaacagggtctatcacagagcaaaagttttaaattttgacaaagtgcggtttatcagttcttttttggattgtgcttttgatatcaaggctaagcctagccaggtgtgatggctcacacctgtaattacagcacttgaggagtctgaggcaggcagatcacttgagcccaggaattcgagaccagcctggccaacatggcaaaaccccatctctactaaaaatataaaaattagccagccatggtggtgtgcacctgtaatcccagctacttgggaggctgaggcatgagaattgtttgatcccaggaggtggaggctgcagtgagccaagattgcaccactgcacttcagcctgggcaacagagcaagattctgtcaccaaaacaagaaaactaaactaaaactaagcctagccctcagtcctgaacattttttaaattttttttctaaaattttacagaaatttagttttatatgcaagtctgtgatccattttgagttaatttcacataagggtgtgagatttaggccaaggtttttgttgttgttttttggcctccgatgtccagttgcttcaataccatttgttgaaaaggctatcttttctccacttaattgtttggcatgcttatcaaaaatcggttgtgcatatttgtttgaatttgttttccttattttgttttattgatctatatgactatacctctaccaataccacattcttgattattttagctatataagtctcaaaatgaggtagacaaattcctcccatttttttttttcaaaactgtttttggggctgggcaaggtggctcacacctgtaatcccagcactttgggaggctgaggtggggggtatcacttgagctcaggagttcgagaccagcctgggcaacacggtgaaaccccatctctacaaaaaatacaaaaattaaccaggtgtcgtggcacacacctgtaggcccagctactttggagactgaggtgggaggattgcttgagccttggaggtggaggttgcagtgagccaagattgtgccattgcactccagcctgggccctgtctcagaaaaaaaaaaattattcttgatattctagttcctttgcctttcaatataaatattagaataaccttatctatatcaacaacaactcttatgtggattttgaaaggaattgtattaaatctgtatatcaatttgaggagaattgacagctgtactatattgagtcttataatttatgaacatgtaagtctctgtttatttagatatttgatttctttcaacagcgttgtatagtttttagtgtataagacatatatgatttgttggatttatatataaatattttctttgagtgactgactgtaagtggcattgtcttttaatgttggtttccatatgttcattatgatcatgtagaaatgcagtactttttttgtgttgaccttgtatcctgtaaccttattgaactcacttattctagattttttttggtaagattccttgggattttctacataaactatcatgccatctgcaaataggggcagttttacttcttcattttcaatccgtatgccttttatttcccttttttgtctgttgccctggctagacctatcagtactatgttgagtaacagtggtgacaaagacattcttgccttgttccctattttaaagggaaagcattgaggctttcattaagtgtaacgttaactgtagggtttttgtagattatcattatcaagttaaagaaactcccctctatttctatttttctagagtttttttttttttttttataaatgggtgttggattttgtcagttgctttttctgtagcaattgatatgatcacacgatttttcttgagcttgtcgatgtggtagattacattgattttatttatttttctcaaatattgcatcagccttgcatcccttgaaaaacgcttactgctcatgatgcacaattcttctaatatattgttaaatactatttactgatactttgttaaagaactttatatacacaatccacattggtttttagttatattttttgtattgtctttgattttggtgttagcataaaaccaacaacataaaatgaactgggaagtattctcctcttttctggaatagattgtatagaattgctgatagattttttaaaaatatttggtagaattctctagtgaaaccatctggacttgtggattttggtggggggagattttttaaattgcaaatttaatttccttaatagttacagggctattcaaataatctggtttatcttggatgagtagtggtggtttgtgtttctttagaaacactagtattttctttgagtgactgttaagtgtgtttctaaatagacttaaccactattcactccagatgaactagattgtttgattagccctaagctattaaggaaattgaatttgtaatttaaagtacatctattttatctaagttatcaaatatattgtgtagatttgtttatagtctcttttaatatcttcaaggtctgtagtaacactccatgtttcacttgtgatattaataatttgtgtcctcactatttctttgttcatcttgctagaaatgtttcaagttcatcaatcttttcaaagaaacagctatttttaaaatttcaatttcattaatttcctatttctttccttctgcttgctttgggtttattttgccctttcatggtttttttctctcttcttttttaagttcttgagggtggaagcctagattattgatttgagactcttcctcttttctaaacatatgctttcagtactataagtttttccttctcagtactctttagctgtgtcccacaaattttgatctttttttttttcattttcatgcagtacaatcagtgtatttttaacattcctcttaagacttcctctttgattcatggattatttagaagtatgttgcttagtttccaagtgtttgaaaagtttgttattgatttctagtttaatttcattgtggtcagagaaacacactgtataatttagattcttttaaatttgttaagatttgtttttgggcctgtaatagggactgttcttggtatacgttctgtgggaacttgaaaagaaagcgtatttttctgttgctgtgtggagtgttttataaattttgattaaatcctgttggttgatggtgcttttcagttcttttacattcttgctgatgttatgactagttctactaattgctgagaaaggggtgttgaagttccaactataagactatggatgtgtctgtttctactttcagttcacatattttgctaccttctggtcttaggcagaaaattcaaccttattaggagatggtctgctagacctcgttgactaaaaattgagtttttattctatttcttatattttattatatatttttaattttatttcaaagagcaaacaaatgtcttttggagtctgttgacaaattatataattttctcctctgacttatccttaaatgtttcttcaacatgaagtacattgtatttcttaattattcttagatgtttacctcagggttccaagaggaaaatgaggtggctgagctctctgtgaagagacctaagggttatgtgatattgagataatttgttgtaaaatgcctaaagtttcagtcttctgaaacattggcttcattcattttaggtaaaaaatactgacttctgttaaaattcagagcttttgaaaattgtgagctctatgagaggtagtgttggcaaaatgattacaagtatgggctttagaggcaaagttcgggcttcctagttacacttgttacctgtgtaactttaggatggtatgtaaagtctctaatagtttcttcatctttgaaatgggattgaaatctctcaggattgttttaagaatcaaatggataactagtgccttgcattcactatatgtttgcatctcagttggattaagggatggagccaatgagtttgggattggctttatctctagtgtgagggttttcccaggatgggaaccatttcccgttttcctttcgtttgacaaaactgtattctgtaagtcacagggacattagcaggaaagtgccggtggctgagagtagtcagttgactttatcaacacatgtttctgttcttaggtcagaaacatcatctttagaaagtgaaaatatgtttacttgcacacttttatttatatgctaatcacacttactggccatggtacaataagtgtgtaccttacttatggagaggttccaccatatcccaagccaggtattagaaccaaaagcactgtgtggtatccaaatccagctttacaattattccttctgtttagacatgttaaaaattaactacaggctgggcatggtggctcattcctgtaatcccagcactttgggaggccaaggtgggtggatcacaaagtcgagagttcaagagcagcctggtcaacttggtgaaaccctaactctgctaaaattataaaaatttgccgggtgtggtggtgcatgcctgtaatcccagctattcaggaggctgaggcaggagaatcgcttgaacccaggaggcagatgttgcagtgagcagagatcatgccattacactccattctggcaacagagtgggactctgtctcaaaaaaaaaaaacaaaaaaaaaaacaccaaaaaaaaacaacaaaaaaactgcaacactgacttctcttttgtggtagtataaagattaaaaaaaaaaaagcattactgtgtctttagtaaagaaggggcacaaaaggtatcactgattgggaaaaacctgtgaggcaaagcagtttttatgaactcactgaatatcttagttgtccagtgactttctttctgcgggctttattttgttaaatcattttgatttaaccaggaaaccagagcaagaaaggctagttagcaagaaacgattcagtcctctattaggtatttgtttccatttgacacatagtcaggagtcttcacagggctatgggggaacgatagtgactttttttttttttttggaagagaatgatcttggttaaatttagcaaaactcttagtaggtctggggttccagaaaccatgtgatggctctgcaaggccttgcagatgcttttaaatattatttgggaacaaaaatgttccctttggctggtgcccttgttatgttttctcatgtcccttccctacatttctctattgctctccatgtcaaagaccaagaatctagaatccaacatgtggggcaggcactgaacccccatcccctagcatttgactcccaatattcctggggaaatgaggtttgggtcaatgcggagtgaggcccttagtttcacaggcaagatagactgactcttagacaaattggagggagccggtagaaatataaagaaaccaatttgatcttcagggccaccctctgcaggggaagaattatcaccttcaagaagcttttattcagtggctaatgaagtatggtgctcttggggcccatctttcagggcgagtgattcattttataactagttatctaaataagaatgcgtgtggcatgaactccagttttactgaatctttctatgactgtggtgttgtttactgcagatgtttcaaaaaaaaaagaattcaaactagttcaggcagatggcccggtggttgggagacaaagtgctgattggcagtcccagctgctgctgtcggagtcacctggcagacctctgagggggtgattaagtgacaggtgtgctggggatgtggccagccgtctgtcctcaggtccttttagacaccatctgcaggtggccacgtctgggctgtgagtcaaagctacaggtgatccgtgagaaggaggaagtgggtttggcgctgtgcgatcacctccatatgcttgcggggaagacacatgcagggaagaggctgggctatagattacaaacaaaaccatcttcttgcatgagaaacagagactgcagtgttaaagatcctccgtgagctgctgtttcaattcatgattacatgggggaaggacttggataatgtaattcttaagtgatttgcaatgtgcctttcaggcaggttttatttacaattctacatgaagcctgctctcagtggctgggagaaggccagatgagtgtttgctggctccattctccagcttagactagagctggggatgaacaatgcagatcaagtggcaggacttggccagcccactctccagccttacagagccacagagcccaggggattcttagcggagtaaggtcaaggtgcctgtctcagtggagtaaggtcaaggtgcctgagcagcctgaggcctagaagtcacctggctgggatgcccagcagggagagcactgtgacctgcagacagtgcctgcctgcctctgcccagccaagccaggtccccaaaccagcctcaccctccttccaaccccttttttacctcactacctacagcagtacttttcaatctgcaggttgcaacccatttgtgacttgtgaccttcacttagtgattcacaacaagcattggaaaaaaatagaattgaatagagagaattagatttctttctttcttttttttttttttttttttttggagatagggttttgctctgttgcctaggttgcagtgacactatcacagctcattgcagccttaaactctaaggctcatgatcccaagtggctggaactacaagtacctgccaccatacccagctaattatttaaattactttttttgttgtttgtttagaggtaggatcttgctatgttgcccaggctggtctcacactcctgacctcaagtgatcctccttcctcagccttccaaagtgctgggattacaggcttgagccacctcacaagtagtacctactgtttcatgaaatgtattccaagtgtgccgtgtgtttgtttgctgggtgatactgtaaaatatatcccttactgtgggtcaaaacgtttaaagctgctagacatttctgttagcaaacactccttcctaagtgagatccccccaacaaatacacatatccctcaaaaaaaaaaaaaagtgccaaagctgggcacatttaatctaacttaaaatagactcttgtaagaactctggccaacctgccaattgaggttaatgtctttagggtgccctctgaattcagaagtgctgagtgcttcttacggagaatgatgggagaagggggagtctcagggacatttcagttattggtttgtaaaaaagcatcccaaaacttagtggctaattaagaatgggttccttttatgatgcttgtgaactatatgggttgagattgaagaggggcatggcagggatgacctgactgctctgtgacgtctgaggcctcaggaagatttggtggctggaggcgacttggcctctgagggctagaatcactgggaggcgctcacaggtctagcagttaatgttccttgtcagggacacttcagctgaggctgcagccacagcacagcaatgtcctctccatgagcctgggattcttcacactgtgacctccaggtacacagcccaggattccaagagaatcaggtgagaactatgtggtccctttgggaccttgcctcacaggtagcttctgctgctttctaacgacttcagaggagcccttgagagaaaagacatagaccacacctttctagggagggaaagtcaaagaatttcataagttgctgcaggtaggaagttttttgaggggtggggtagggatttgaattttagtggcctttggaggacaggttgcagttgaacgtggtgggacagtacccatgcggcagagaccagtgggcacgtgacctggcctgtggtgcagaagaaaagggatgtggatccaggcctttatggaggctctgggggcagagtgctgcaatgagtcctgagaacaatgtatgcgtgaagtcttagaggagcagcatccccgaaaggcctgcgtgttcctctctcaggcaaacagatggtcagaaagcaatagctaattattagacagatgagtgaacacccatgcttgaagattacctgagtgctagccaccgaatattcagaacaaagaggaagcttctgaagccagaaatggtacagtcactcccataactcccttactagaaaagcctggagaggtacccagagggcagggaggttgaaagggaaggaaggctagcaagatctctgcccctttctgtacccaccctgagtccccaaggttctgtctgaaagggagggctggccaagtctccagttctttcaggggaaaaaaaaaaaacgtagttacatttccaaagggaagatgaaaggaaggaaagagaactcacttctagaggcttctaagaaaaaaacaccgtttcgaaaagcaggcaggatcggatgcaaatgaggctttcagaggcaatttggtagaaaatgggatgtctattagacgattaccagtgttcgctcccccaaactggaataagcctcttgatttgtctgcattcatttggataacctacaaaatcttgtttatggacttttaacagtgagagagagcatttctggagacactgatttccacagatctcagaacctcctcaaaaacctgagcacgggggaaggggaggccatgggctctcctgccccccaccatcagggctgtgtggtgggccagaaggccattcatggaggtctcaaaatacaccaaatgtttttgcactgctttggttgacattctttacgtgggagcccctggtatattaaatagtaagccccacactccctcaacctcacagaggtgtctcatggattaaggatttaggacaacaatccctactgcacccgcccctttaccgttccactgcttttcccgtaacaacttgggggctctctgtgggcccttgaagcagtcacattgctgccgtccccagctagggtcataggagtccctgtcccccaggcctttccctaaacccctattctagcttctggactctcctcaggtccttggagaagagtcacctcctgcccacaaggtgtccctctgccagtcccagtccttgagcccttccacatgcatcagagtttagggattcatttctttcccatccccttccgtcccctccccgcttctcccgtgactgatgtgagttgccctcgcacacattttccaaactctccaaaaagcagctttctctgcgcgcatctgtgtgtgcggacggggcctggacttcgaaccgccggcgcggctccacgggctccctgctccggccgcccccgggatgcgtgttgtaggcactggcgtggggaggtcagctggtgctcgaggtggccagtggagtggacgggcaaggggggcgcagtttgcgaactgctggggttctcggagggccggacagcccggtgttttctaataactccctcctgccgcttcagatttggaaacgcatttcggggcgtgatcacgcagctgcctcttggcattctggtgtccctcgaggtgaaggcccctgggttgggcttatgttgttgttatcgtggggtacccgagggggccaaagagagaaatcaacacccagtgatcgggcttctcgaagcatccccggttttttttttttttttttttttttaatgccccactcagagtgaccagtggcaccgcagaaagttcattaacactcccatttgtggcgtctgattcacggctgctgccgctggtgggaagctgggagctgctgctgcgagagcaaatcagcttgggctaatgcatatgttaataacgctaatgttggagcatttggtgttcctcaaagaaagacggtaaagtatctgcgctgtctcctccaacgcttaataaggcgggtggcggggagaggggagcaacaaaaagccattcacttggagcatttatagttagcatttatagaggagagcagcctgtcggtgattctgaaggcaccatgccaccactcagccctgcgccttgcattgttcagcaactccattgtaaaacggtctggtgacaggcgcgctccagcttctgagtttggaaaggcaaggcgtgctggctgaccaaacggttcccttgctagcctctcttccttaggaggaatttgctgtaccatctgttgtctgcgtgtttgctggtgtccctgaggatgtacccaaatgagacacccttggggccttccctggcaatccttcctgacatcaatttagcaacatcaactcccactttcctggatagagatgggttaggatgtatccacagcagagctgctgaattcaggcctggcaggcatcacattttatttttaaaccacaaggtgatagtctttaagcttataattagagatattctagaggaattcactcagacacttactgcgtggtgcacagtttgctgggtcttcaaaagaatatggtgctgtctgagattgtagatatgtgcccaccatatgggattctcgatgtctttcttcatgtacctggtttcaaatgactctcagcaatatctccaacttcttcaggaaatggagatagtttagttctttaggttttctttcaggttgatgtccatcagaaaatatctctgatgtaataagtgggctgcaatggaaagtaggattttaaaatttgggtatctctcatactgtatcaagagtttatatgttcaatctggttttctgcttgtcagcattaaaagactgaaaatatgtttccacagttaaaatttgtaaaggtcttgcggtaaagactgcattgaaaagctttggttccagagagattaggacggtccgggatgattctgatctgtggtgattgctgtggcatttcaccagcattgtatctgctggaagtgggagctgtcaagtctttcagtgaagttgtgcagtttaaaaaaagtatctccaaacaaacaaaagcatagaaaccaaggttctacagcacattaggagatctgtggctctttcgccatttctccagttattttttagattactctctgtcataataggccaagaaccaggatactgttaaagaacaactgcctcttggagctggggccagtgttagtgttaaggtccttcataagaagtgtatatttgttgttacttggctttggactatagtgaaatactttttaaaatgggagtgtctttgctttcttgattaggtcttttcttttttctttttcttttcttttgagatggagtcttgctctatcggccaggctggaatgcggtagtgcgatctcagctcactgcaacctctgcctcctgggtttttaagcagctctctctgcctcagcctcccgagtagctgggattacaggcacccaccaccacaccctgctaatttttgtatttttagtagagatggggtttcgccatgttggccaggctggtcttgaactactgacctcaggtgatccacccgcctcagcctcccaaagtgctgtgattacaggcatgagccactgcgcccagcctagatttgtctttaatatatgttaaagtaagttatttttccatggccatgtactttctggtgatggaacagagagggcagtctattatgaacatgaggagttgactggaataatgaatgaaaaccagctttaaggttcatgagtttcatggtaagggtgctgaggtgtcttacttgggccttcagtatgggtataactcatggagtataggatcttgacatcctattgcagactagaaggttcagcctggaaagagactgaaggtgagaggaggtggaaaagaagggaaaaggtgtttgcgattgtgatggagaaggtcctggagttaaaaaaggcaggcagtggctagcaatgtatgggttaaagacctgtagcactggtccagctctcctctgtacccctttagtgagagggaggttctcttcgcacttgcaccttctcccttctcagcagaagtaagagctctgtatcccttggtgggagggaaggatggccaagggtcttagttattgcaagataaactatcccaacacttactggtttaaaccactaccaatttattatgctcatcatttctgtgggttaaggcagggcacagtgagaatgtcttgtttctgctttgtgatgtctagaatctcagctaagaaaacatggaggctgggggctgacttgatggctgggagcctagaattatctggaggctgcttcactctgtgtgtggggcctgggctgctgggatttctgggagaggagaccgaagactgcttgtcattttccttccttgaagcatggtggcattgggaagtcagaattgaaagtctgcttacctggaagctcagggcttcaagcttgaatgttccagtgaacaaggaagaagctgcatcttttcagacctggtgccagaggtcacacactgtcaccactatcacatgctattcatagaaccagtcccaagtccactgtgatgagcagaggaggactggactccaccccttcaatgcaagtgtgtcaaacacacattgtagaagaggctgtgggatgagagatgtttttgcagaaacctttggaatcagcctcaaatggggagatagagaaaccaagcagaaagggtctgagggcaaactgggcctgctcttgctctgatctccccttagaacagctctaacttagactctgcaaatgcctaaacaactggttggtcaagttgatcatatttttaaaaacccatcagattaactatttggggttgtgtaagccaaagacaaatgggctgactgagagctttttcactgttccaagattgttatgtaggtccaggcaaagaatcgtgggacccatgtctgcaacaaaagcttggaggcagcctttctggccatgtccccccctccccattgcccctctgccttcttggttactaagcagttacctggcaaccatgcctcctccacatcggctgccgagccaagaggcttagcctgtcctccctcagctctcaagtctcccatggatcactggggacaggatacataatgagattttaattgtcacgttgaatcaaatcattttttccatgtgcataacttctaggcagagatgtaatttcaattaacttcgcttatctgataaaactttcatatcctttaagctaatttcatttgaactaataggcactatgctcctctttgagttccagctcagatgtcttaggcagagccgagatctcctgcatactcgggcacattagagagcgtctgggctgtgtgtgcagaagtggcctctatgcttggacacagctagtttatggagcctttccttttgcttttctcacttgatgaacattcctgaaagcctatttggttttattagttttcagcttaagggatcagtatttcccaaacaaaaggtgtcccattgctctaactgccagagccataaagattaaaattacacttaacttgaaggaatgtctgtatttctccctgctgctacaggacctggggcagctggttctatctcagtgatgagtttgagcatttgttttattaagggaagggggaaggtgagaaaggcattgtaatttaatatgtgggagaaaagggctgatgtgccttaattttatttctcagtaacccccatgaatgtgctagttctgcttaaagttcatttgaacaaaaacatgcctttgcagaaattaagctgctctcattatttcttttcatatagtagaattaaacttcaaacagtttatcatttgttctttgacataatactgagtttggccaaaaccaaataacttgatgctattgagcaacagaaattcaaatgcaaagatgctgcaaggtaatgtttaaacaaaccacacactggtcaatttttggatttcactgctagcattttctggctagcaagtttgtttcttatcaaatcaagaagagaaatctaaggaatgagaatgagagagaaaggtttagtcagaaggagaaaacacagtgaggttgaagatacacacacacatgcttacatgtgcacattcacacagatgatggctaggtcctcagaggatcagccctgagcttctagcccagagtgtcactggtttcctgtgtgaccttagacaagcactcagcccctgtttctacatgagtggaatgaggagtggactaggcgcaagacctatggtgggctgaggcttactagtatttgattcaaagccaagcagatggggttgcattgagaccacaagggtaggcactgagtttgggacttgccaaagaagagaagattaagagactgtaaaaagagtcacttgctttaacagtggcactcaagcctaagcactgttcctcatccttactgtcagcatgatgagtttgggtctgtctttcagggatggactcccaccaaccacctgggaagactgatatattgtggtggttaatattgagtgtcaacttgactggattgaaggatgcaaagtattgttcgtgtgtgtgtgtgtgtgtgtgtgtgtgtgtgtgtcttgttaaaggagattaacatttgaattggtggactgggagagacagacccaccctcaacctgggtgggcaccatctaatcagctgccagcacagctaggataaaaacagaggaacaggccgggcgcggtggctcacgcctgtaatcccagcactttgggaggccgaggcgggtggatcatgaggtcaggagatcgagaccatcctggctaacaaggtgaaaccccgtctctactaaaaatacaaaaaattagccgggcgcggtggcgggcgcctgtagtcccagctactcgggaggctgaggcaggagaatggcgtgaacccgggaagcggagcttgcagtgagccgagattgcgccactgcagtccgcagtccggcctgggcgacagagcgagactccgtctcaaaaaaaaaaaaaaaaaaaacaaaaaaaaacagaggaacattgtaggactagaccagcggagtcttctggcctccatctttctcccatgctggatgcttcctgcccttgaacactggactccaagttcttcagtttttggtctcctggacttacaccagtggtttgccagggactcttgggccacggactgaaagctgcactgtcagcttccctacttttgaggtttggggacttggactggcttccttgctcctcagcttgcagagggcctattgtgggacttcaccttgtgatcgtgtgagtcagtactccttaataaactccctttcatgtatacatctatcctattagctttgtccctctagagaacactgagtaatacagatttaaaaactcaagtgccaatgtgacaatttatggtggaattgtaaaacgagaaacacatctattatgcagatcccagtgtttgtagccaaagatcaacatcacaatggataagctgcaggaaaggacatgttggtagtttccagtttggggaaattatgaaataaaactgatttaaaaaaaaccatgtacaagctttcgtgtgaacatggctttgaattcacttgggttaatggctagaagtgggattgctgtgttgtatggtacatatatggccagtgtgtgtttggtgtatggtcaaattgtcttccgagtagctatgccatttttcattcccatcaacaatgaataagaaccaaattataattatatttccttggtaaacagggtctttttcatttgtgcaataaatagttattgagaattcattaaatgccaagtggtattctagacattaagagcaaaatagacaaaaatccctgtcatcatggagtttattgtcagttggtggaggaaggataagaaaataaacaagtgccacgtatgtagcatcccaaatggcaatcagtactaaagagaaagatcaaacatgggagtgaaactgtagagagtgtgtcggcaagggtgcactgagacagtgacatttgagcaaagacctgaaggaggtgaggaagtaagccctgagggtacctaggggaagagaattccaggtagaaggcacagaaggtccaaaagtcctaggataggtgcatacctggtatgtcaagtaaggctggtgtggttgagcagagtcagggagaatggggtagtaggaaatgaggtcagggaaaaaagtggtggctgagggtgaccaggtcttggagaaccacagtaaagacttcatctttttcttggagctggatgcagagccattgggagggcttgagctgaggagtgacatgatctgatctgactgagcctttgaaaggatcactctggatgctgtgttgggtagcagagactaaagggtcagagagaaagaaaggagggtaattagaaagctaacgcagtaatccaagggagagacctgtggcttagaccaggaggtggcaggaagtgattggatgctaaaactaatgttagactggagccagcagaatttcttggattgattggatgcagaatgtgagagatatagaagtcaccaggtacctggggttgggccagaccctacagatgaaggagttagtcctctataagactatcctcacttgagacagcagctataaattcaagagtcccagggccaccttcacttctaaccagctggctacacatttaggtttgatgaccacgaccaccctcaggtttcgtaattcaccagcaagacccacagaattcactgaaagcgctatacttaagattacagttttattacagcaaaaggatacaaattagaagaattgcatggggtaaaatctgagagtttcaagtgcaaagcttccatccttagggacacattgctctctcaacacaatatatgacaacactccaagggtcgtggcaactggggaagctcacctaagcttcagtggccagtgttcactggcatttcactacataagcctgattgattgaatcatagcccaggtcttcagctcccctcctctccctcctagaggtcaggcagatatcatgtgtgccgaagtcccaaccccctaatcacatggttggtttttctggtgtgacttgccctatcttgagctatctcattagcaacaactatgtagggacccaccatgagtcacttcattggcatacattatcagacatggtctgagaggctcagcatgaaaacaaagacattgctctctcttcagaaattcaagggcttataggttaactcctaggagctgaggagaagagccagccaagttctttactacacataggataacttagaagattttgacctgaacaaatggaaagatggggttgtcatgaactgtgctgaggaaggaaacagcaggcttggggagcctgggagtgtatttggatatgctcagtttgatgtgattttttttttctgtcacctaagcagagatgcaagtagacagttggtgttcagggacaggtcctggttggaggatgaaaacttcaagaaagagatgggattcacattagagagatatttgaggctgcaagtcctgagaccttgtggcactggaggaaagaagcgctctccatctggctctttgggcagctcatctctgtcctccagtttaatcattccttgctggtcacccatcgttgcctagaaactcattcctcccatcccgcctccctgatattttgtccaggtcactttgactggaggtccaagtgttgccaaattctttagtcaaatctttacaggtaatctctgggttgattgtcacagaagtggaaaattacagccaggatgggtgactttacaatgtgaacaatcagacagtgaccttctgccttgcactaccttatcactgggggacccgtcatacccaccccattctgccttcaaactcctcataaccaggggtggggagcaggggtcaagtgaccctgggaaggcatttgagtcttctggggctgttagacaccattcattaaaaggaaacattggacttgacgctttcctgggtcttttttggctaaaatgatctctcagtctaaagagtcttgtatgctggttgtatatgtgtatgtgaatgtgcctgtgcatgtcttgcctcctcaatagatagtaaaatttttatgcagggatgttaaaggatcctagagcagtttagaactgattttgcttggtcccatctagtatttctttcctatccctctgggcgtagaaattgacacatagtaaatgttcactaaatttttaatagtagtgaattgaaacagttattcagaaaatttaaatcccttccctgcctcccacccaaaccaaactaaacacttttatctgtgagttcagagtgttttagatcctgagtaatctgtttaatagcatcagttttcacctttactctggagagatggggagagagacaccgagatacctcttaaagacagaatagaaaggtggcttctggggtcagtgtctggttgggttttattccaaatccaccatttactaactctcttgggagagttacttcgccactctatgctttggtttcttcatctgtaaaatgaatctaataatggtacttatctcatagggttgatctgaggattaaacagtttaatattggtgaagcacttgaaatactgtgtggctataatgaaggctatgtaagtggaggtggtcttgggtatttagaggtgaattgatttgttgttgttgtttcctttttttgagacagagtttcactcttattgctcaggctggagtgcaatggtgcaattttggcttactgcagcctccgccgcacaggcttaagcaattctcctgcctcagcctcctgagtagctggacttaccggcgtacgctaccatgcctggctaatttttatatttttagtagagatgggggtttcaccatgttggccaggctggtcttgaactcctgacctcatgatctgcccacctgcctcggcctcccaaaccactgggattataggtgtgagccaccgtgcctggcctttttttcagaataacattaggactggccaggtgggcggtaatacttgtagcacatacctcatgcagttagtttgcactccaagctaaggttaccatgggcctaattttgtttttttcaagtgggaaatgagttcgctgtcttcgaagttgtaacctacaagtccttgtcctgtgtggcctggtgacctagttggaggtgtgtagaagacctgggggaacagatcagcacccccacatccccaccactggagacgactcagagttcattttctgctgatcatgggttcaattccttttctttaggcatggaaggtgacttattttattatggaataattctgtgttgggggagagtggggaacttgttcagtatccagaagcatttacccttcattctggctcagtcatcataatgtgccattttttgttgtgatcaaagtgtgtttctgttcctgccaagcccctgtgtcatgagaaccagcgcagcagctccaattttactgctgaggaataaaccaccaaagcaggtttctaatgaaagtgctagggagactttaattataaccgtgctcttgagctcccttggcaacaccttctcttttgattcttttcagagtagaaacaaaaatggagctgctggtaagagctcatgtcagggagccttagtgagctgggactctttagtgtagccagctctcccccacccttatggaaaagcagttcctcccagatcacctgagccccactggctctccaagctggcctgcaccccagcacagtgcagggaagaacatcttcagggtgctagtggccgattgcatgcggaaggaaagagaccaagcttaaagaaaatcctgggtttattgcccccactgagatttttttaaaattgactacaaagtgctgttgtctgggctctttggaacaggttgcatgtgtttgttcaattgcattagtttttgctctgaaaattcccttccttttctctcctctcagtggcccatgtctaggggctttgttttccttactccccttttccttttctctctctttgttttgcaatgcctccagcacatagtaagtgctcaataaatggtgttcttcctcttctttcacctggatctattctgagtttacttgctttctctttgtttttgtgcccttatctttctccctgccttcgtcccttcccccagccacctgcatgctcttcatcagtctgattcctttccccagtcccattctccttcctgccttgtgtctctttttttcattcaccttcctttgatttaaatcccaatctgaaattcttctttcctcccctccttctcccaatctttatttttcaactctttgtctctcatgtggcctctacctctatttttccactgtccctttgcccaaatgcttcttagccttggcttggaacattatatcacccgagaagttttaaaaacatcccaatgaccaaactgaaccctagacaaattaaatcaggatctctgggaatggaacttcggtagaaatgtttctaaaaagatcccctgttgatttccatgtatatcccaggttgagaaccattgcctggctttttgattgaacatgtttgttgtgcaaagccaactttatattgctgtggctatctctaggtggcttaactgatgtttccgtttttcatttagtggaaagcattttccttgtgtcagttcccagtgtgggtcctgtgacctttgttcttcctcaaggccataaagagtccaggtcaaaaatgaaggagaggtgaggacaggagtagcatggggaactgggatgggatctaagctaccctaaatgcagagagacagtaaaggcacagccaaggactggagcttccagtttctagacacccaagtggaaagctggcttgggttggggtcaggctatgtggaaagggtaagtgcccctgatccaggcagctctgcttacattggcttccagaacatcagcttcccagcctgggcagcaagaacagtgctagcttctaaacttctgcaaaccctttcttctgagcttctccctggctctggatttcaccacctcattctctgtcaggcatgttgggatgatgcactggggactctggagcaggctgttccttgacagtctcttcactgaacacagagtaaggaatttacttcatgtaggggacacctcagaagcaaatcaaacacctgctcagtggactctaaaatttctagcacttgtcaagtagagaaggaagcagcagatccagaagcactcttggaagccctgcctcacattctgcagtttttaccaggcttaacctggaatgagccctgctaaacactgtaaagccataggcatttggcatgtagtctcaccattgtataatatatgtgttcatggaccatttataaatcagctgaagaatatctgataggggaacccaagtcaaacaggcaatatgaaaatgatgatgaaaatttaccaggttctaggggtagggaagtccaaacactattgacccactaggcagaaattcaaagtccaggagagagaatctgcttgccccatagtgggtcacacagggtctcctgatcccatacccaaagtctagtacccatgcatagtgatcatctctggctccttgactttgtcattctgtgctgagaagtgctgaaccagcacagccacattgagctcagctaatccatcagtagctgtttgttcctgagactgaccagctgcaagtcggggccacagaaaatgcagggctggcttctcaaagcaagggcagcctgatttgctgcaccctggcctccagctcaaaggcaggaggataagttggtggcagctccttctgaggctgagaattggctctccttgcaggaattggatcttatatttagttagtatctaggcactggctgctacatacagattggtttaaagcctcttacttaagaactttatttccgggtatttgttaaaccagtttcaactgagagtaacctagggaagcctatggctctcaatttgagttggataagaatcaccaagggatttttttttttttaagataatgatgcccatgtccaaagcttctgatttggctggtctaaggtgaactttttttttttttttttttttaagcaatggggttttttgttgttgttgttgtttaaggctcccaattctaatgctactcagggataagaacaccagtagagtgaaaagcccatggagaggccaggacaactgaattccttgttctagagtttaggtttgccacttcctagatgtggcactggggaaaggctatgctgctcctttaaaatgtgaagggcaggctagatggaaaagttccacaagcatcccagtccaccagggagcctagaaattctacagaagctctgaattccacactaggcagactaaaatccacaccagcatcctagaggcactgggcagtcaatctcggagatccctctgagctagaaagtctagggccctgtgaccttatgtgagcagcaccatgacatgtaacaaggtccctgtcctcaaagcatcgagaatgtaattggcacaggtcaggcacatggagagcatccaggcacgagaaagaaagggatgagctgctggaaaatgatgtagcagggaaataaaacagcagcaacaacaacaaaaaccatcaaggttagttgacaaggaggcaggaagggggtggaggtgcggtggtggtgatctccaaactgttttcatgcctgtgtgaaatggtttatgtgttctctactttaaccaggagctctcaagggtctaagttataaagggggtggaggaagcggctcctgctgggcagataatccaggcacgagaggattatatttttaacaactttccagcgggaggttatggattttcttctctttgggactcttaaatatctttttaaaaagcaaagaaacatctatttgtctttcatatttcaaagatgcttctgctttcctataatcagaagagcatggtgatacctttgtttcgatgtgttttccagaagaggggtggggctggctttttgccctatcctgttctctctccgtctgcctttgcaacagtttttgaggcaactgaccgtggctagaggtggggtctgtagctgggagagaatttttctctgcacgaggtgaatgttccatttctggactgcttagattctagtcttcgcatcacttagtgtctacatctggggaaaacaaacaccatggcagctattttaggtggtccctgagtcccttccaactctgatacttcatcaccaaaatatgaatgagttaattattgatagggaacagaactcagggactgtgctctgcagtgaaattaagcatgggagcaaggtgtggtagtgagggcgctggtgaattgccgccatctctgatttctagtgggttgaggagtgcaagaccatcatggcgtgtcagcagaccattcaagctggtaaactgaggttgggatccagctcctccaactctccttgataagctagacctgccgtggatgtgatctccccaggaaaatgacatttggagtccctcttaataacaccacagatctgctcatggatgagatatgagtgaaagaatccttcttagatactgggtgtctacccgcaaatgctgtccatccacattgactctccacatcatagctcagtctcccaaagggggcccatccatgcttgtctatactttggaggttaccattatcttggctacgcagaagccctatgaaaaagtaatcacaatctgtataaatacatgaatattaaacaaaatgtccctgaacaaccagtgagtctatgaaaaattcaggaggaaatcaaaacatttctcgtaatgaatgaaaatagaaacacaatatacaaaacctatgggatactgcaaaaacagtggtaagagggaagtttatggtaataagtgcttacatttaaaaagtagacagatttcaaataaacaacctaacaatgcacctcaatgtactagaaaagcaaaaacaaaacaaacctaaattagtagaaggaaaggaaaataaagatgagagcagaactaaacaaaatagaggaaaaaatacaaacaatgaatgaaacattttttaaaaagataaaattgacaaaacattagctagactaaaagaaggactcaaaccagaaatgaaaaaggagacattacaactaatatcacagaaatacaagggatcattaaagactattatgaacaactacatgccaacaaatttgaaaatctagagaaaatagataaattcctggacacatataacctaccaagattgaaataagaagaaatagaaaacctgaacagaccaacaatgagtaacaagattgactcagtaataaaaagtctcccaacaaagaaaagaccaggactggatcacattatttctgaattctaccaaacttattttgttgttgtttaaaaaaaaaaatcaatagctttaggggcacaagtggtttttgtttacattggtgaattgtacagtagtgaagtctgggcttttagtgtacctgtcatctgaatactatacattgaacccaataagtaatttttcttctctcaccctcctccaaccttccctcctctgcatctccagtgtccagaatatgcccctgcatatccatagtttagctcttgcttgtaagtaagaacatgtgcccaccaaacttttaaatcagaactaacaccaattcttctccaactatttccccaaaattgaagaggcaggaattcttcctaattgattttatgaggccaggatttaccctgataccaaaccagacaagtacacacacctctaggtgaatattcttgatgaacatagaagcaaaaatcctcaacaaaatactagcaaaccaaatctaacagcacatcaaaaagataatacaccctgatcaaatgggattcattccagggacgtaaggatggtttaacacacacaaatcaataaatgtgatacacaacatcaagagaatgaaggataaaaaccacatggtcatttcaatagatgcagaaaaagtatttaacacaatttaacattccatcatgataaaaactctaaaaaacattaggtatagaagaaacatacctcaacataataaaagccatatatgacagtcccaccgcatatatcatactgaactggaacaagacaaggatgcccacttgtaccactctttttcaacattgtattgaaagtcctcaccagagtaattagataaaagaaaaagcatatacactgaaaaaaaggcaatcaaattgtccctctttgcagacaacatggtcttacatataggaaagcctaaagacttcaccaaaaaacttagaaatgataaacaaattcaataaagttgcaggataaaaacatgcaaaaatcagtagtgtctttatacaccaataacgacctagctgaaaaagaaatcaagaaagcaatctcatatataatagctatgaaaaatagttagaaatgcatttaaccaaaaaggctaaagatatctgcaatgaaaactacaaaacactgatgaaagaacttgaagacaaaaaaattggaaagataacccatgctcatggattaaaagaatattgttaaaatgacaatactacccaaagcaagctacagatctctatcaaaataccaatgacattcttcacagaaatagaaaaaaaaaaaccttaaattagtatggaaccacaaaagaccccaaatagccaaagcaatactgagcaaaaataacagagcagggagcatcatactacctgacttcaaaatataccacaaagctatagtaaccaacacagcataatggtataaaaacagacatatagaccaacataacaagagaatccagaaataaatccatatatttacagccaactgattttcagcaaaggtgccaagaatacacactggggaaaggacactctcttcaataaatggtgctgggaaaactagatatccaaatgcagaaaaatgaaactaggctcttatctcctaccatatacaaaaattaattcaaaattggataaagatttaaataaatgcaagacctgaaactataaaactactagaagaacacataggggaaatgcttcaggatgttggtctaggcaaagattttttgggtaagacttcaaaagcacagacaacaaaaaataggcaaatggaactatatcaaactaaaaagcttctgcacagcaaaggaaacaatgaagtgggtgaagagaaaacctgtagaatgggagaaaatatttgcaaactatacatccagcaagagactaatatccagaatctacaaagaattcaaataactcaaaagcaaaaaactgaataatctgatgtaaaatgggcaaatgatttgaatagacatttctctaaaaaaaaagacacaagtggccaataagtatatgaaaaaaattcaacatcactaatcatcagggaaatacaaaccaaaaccacagagatcagagacctttttagcctagaatggcttaaaaagagaaaaaaaaaaaaaacaaatgctagtgagattgtaaaggaaagagaactctgacatactgttggtgatcatgtaaattagtacagctatatgaaaaacagtatggaggtttctcaaataactaaaaatagaactaccgtatgacccagaaatcccaatactgggtatttatccaaaggaaaggaattcaggttatcaaagagagatctgcacttctgtggttattgcagcactagtcacaatagccaagatatagaatcaaccaaaatttttataaaaagatgaatggataaggaaaatgtgatgtatatatgcaatggaatactatttagctacaaaaaaataaaattctctcattcactttaacatgaatggaactggaagaagttaagtgaaatatcgggcacagaaaaccaagtaccacatgttctcactcatgtgggagataaaaaaaattgacatcatagaagtagagaatggaattgtggtgatcaagagtctgataaggggaggagaggatctggagaagttggctaatggatacaaaattacagctagagaggaggtatgagttctagtgttctatagcagtgtaggatgactatagttaatgatatatcgtatgttttcaacaagctggaagagtggatttggaaagttccctacacaaagaaatgagaaatgtttgaggtgataagcatgctaatttccctgatttgatcattacatactatatacatgtactgaactatcactctgtatctcataaatatgtacaattattacatgtcaactaaaaagaggagaaaaggtgatcacaaagggtgtacatttgtgggcgtgcgtgtgcgaaatgggttactaaaatccactgaagtcaggagctattcaccaaaagctgaaaatgtcaacattctttttaagaaaccattttcatgcctccagcctttgaaggactcaaggccactgacttatgctaaggacagaaaagacactgtgttatttaggcctgatttttaaacaatgcattatagtgatggcagagtgcagggtgtggggagtgggagggacaggaaaatgtatgtgcacatttgtggatgtgaacatgtgtgtgttcatgtgtgtttgtgctgactgtggaggtttgcataaatatacttcacaacccaaccaaggactcctacctccaagatccttttccttaaccgagacatgcttgccctactgtgagtcccaggttgttccaagcatgtgtgagataacctatcccacatgagaaggtcaggtctggctctcagttctgtacaccacttcacaaggtcactagtcttgtcattttcttaactttctccttctgtcttccctcagcaggcaactcatatctgggcacatgatagatgtctatccccttgccagaatgatttaaaaaaaaagaaaggcaagttctttgtttaaactaccgaagctctgagaactgcctatcagaagccatggctgtggagggtattcattatcaccaaagaaatctttgagttctgagctataagggcataaaagacactggccttggcatcacacaagccaacagacctggggagagaatacaacctctacacagaaggatccaattaaacacagcatacagtcccatgctgggtactgcagacaaaaagacggttatgacttgtctcttgagaggtctgctatctgatggcagagacagacttttaaacaactaaccataaagcagaaggataagtgctgcttttatagaaggttatatataaagtcttatgaacatataaaaaggaggccaagtcattctatctgctctgcttaaggcatatatctcagagaaagggacatttgaattagactttgcagacaaataggagtttgctaggtgagaagcagcaggagagagttttaggcagagagaactgaaagaagtagaaacatgaaaaatgcatggtgcttggaaagtaaggagcagcttaatgtggctgaagctgaggatacgtggatggctggatatagaaggtaagaaatgaaactacataacaataacaatgaacacttactgagtacttaccacatgtcagatatcatacaaagtgctttacatattcatttactctttataagatacatgtgatataggtactgtttgccttattttactgttggagaaattgaggtacagtcaatgagtgctcaggaaagaaacattcccaaggtcacataagataaatggtagagctgggacatgacctcagacagcccgacaccagaccctgtgcctatcaccgttaggctgttggatgtgcatattgtagttctgcaagttgatcatgacaaaggttaggttgatgtggcttcagggagaaggtggcatcagaaagaggtaaatgaagtggatgtgggtaggctggagtaagaggagatgagtagacatcccaggcatggaggaaagccatgatcaaagccgtatgtgtgggaacgaggatgtggagtgagccattcatgcggcccattagtctgctcagtggcctggtgcttcttggcaaagcccaaatgaacatctcattgatggccccagaagcatccctgctctccagaaaggtccagggaactcacgtctgctcactttctctctgttccttcctgcttctcgctggcctgggaagctgcagtcattcatacaagggaagatgggtgcccgcaggaatctcatgggcttatctttccctctgttatgcgtggtttttataatgtatctcctaccgagcattcctgggtgaggacggatgctatttggcagtgggatttaatgaatccagcagtgccttgctccccattaagaatccctgaggggtgttcagtcggctgagcagcagaagattgcagctgcacacatttaaataagagagacatcagggcagggtagcagaggccaaagggagaccattccttgagtgaaattgaattttgttagagttaaattgagatgctgagctgtcgttttacaaacgtattcatgggcttggctgtcactttcatttagtgggcttgccatctgaagctggggcttgctggtggagccatggcctccccgcctgagaatgcaaagcctcaccctgagaagcaggagcccaggtgggtggggggagaatctgcagagcagcaagcgggaggagggtctagtctgcaacctgctgcttcctccaccagcttcctcttcctggacctggccaaggacctgcaaaatcatgattctaatatgatgcagaataagaagtgttctagtcccacagatcaaaggtaaagttctggttaagtacaatcaacagccctatcaacgtaggtaatttattgagcctctctgtgcctcagtttcctcacttgtaagaagggctttgaaatagaatctttttagacttatggagagagtgaattttgaaataaaacataccaagtgcttagctcaatgttcagctagcagcaagtatttataaaagtgaaacagagttcttttatccctcttgcagggtgtgcaacaggggtgtggctcacttctttggtgccacactgcccaaaccccaagggggagcatgaagatgggcaagtgcagaggttgtgggtagcccttctgggctccaacccatagcagcatctagggataagtatttacaagcccaagtgggtgtgtattacagtgtgctccttcagctttgctgtctgcagttggcttgtgttagttcagttagatcctttgcagtatcctaagggcagagggctttctgtatcccaagttcttgcccagcgtgccgaaaaaattagatcacacgagggcttagagggtgagtgcaaggttttattgagtggttgaaggtggctcttagcaagatggatggggagctggtagggggacagagcgggaaggtggtcttcccctgtggtcgggccgctcaatggccaaactaacctccaagtccccctggcagaactccccctggagtccgcgttgcccctaaccaagggagaagtaggctccaaaagcagaggaccctgccactcttttccaaaggcagtggtttgccaccttcagggaagatagttgggtgttatctcactctgatcttgatatatattttcccccactaactctttaatctgagaaacgtattgaaaggctgggggcgggtaatatggatcagaaagcttccatggtgtagaatgaaaaggaagcagggagtattcacatgaaaaggtaatttgggtgtcatttgggatctcaagtatcagcctgctctggcatatttcagtgagtgacaggaattgcaaaatttacaagatatttggtttttttaaaagtaattctagcttgtccttttcctgtcctttgctaagtttctacatttgttcattcctttactcattcatcctatgttgaataagcccctgtgtaaaatttattgggttgatcataaagtcagtctcttattcttcccttaaggagtatgaaatccagagttagagggaggagagtaggtggggtagctctaggctttgcaagacaatgtctgggattctatttttaatagccttgggggccagcctgagtgggatttgccctttgaaattgatgcttgtctataatttagagaaccttgagggaggttctctcctgcagcctaaagttatctttgacgtctgacaccagcaagaggcaaattttatctgggggaatacacctctcatccaaaggagataacagctgtgagaaaaactcccccagtgctggtcctgttgacttatgtttcaaaggagaacaatttcaacatagaactccactttccctcaagctgcagatgcaataaaatggctgtaagctgcaaaaactctttcaatatggcacgtattaaacctttcagaggtagcgctttgatttttaattttacgctcttggcaggcaatcagggtctttaatagtagggaggccagagggagaatgtttcaaaacagtgaggatcttatcatagtgtgcaattaatgaataattattaaaacccagaaatagctagaaaagaaggcaagaggtggcagagcaattctctggttttgggcctataatgaaccctctggagaggggaaatatgatactgagttccatgcaattaaatcttccatttttctcctactggaagatcagcaatttcaggggcaaagaaaaaagaaaaaaatacccaactcttaaaaagtcatttgctgacaatgatgcatttgatcagtttgattttcaacatttgttgtaatgacatcgaaaataaaataatactaatgacaagcgcaataataaaacacctgctccttgaaatcaatttctaagaaagcagtattggggcatgttggtggcaccagttagaacaggtacattgttgaacaaattcagtccatgagctgcacaattcccagctgtcatagggagaacccccctgcacatcttgtgaatacacatcccccggctccctgtcatttccaggcacaattgtgtcagctccttgctgtcgggatctctcctctgaaggtctcagtcccactgtttcctttttgactcggctctagaaaatcttgtcatctgtcaaatagctgtttacagtcaaagcccggcctgctgagtggccgtgtcacaggctggcaagatgtcatgctggccactgctaagcaggtacagatgccgctgcttcttggaaccctgcaaacaataaagtagcctggcagggcttggcatgtggcagaacaaccacagacccacattgattcagttctcagccatttcagtcaccctagggcccctgctagggctctgagagcatctggggtcagctcacctttaagtagccattagccccctccgctgcaaagctggggtggggtgcgggagcagggcgggcagaatcaatgagcacttgagatggcattttcctggcatgtggtcgctcattactgagggcctcagtgaggatctgggttttcatgattgatctctcagcagtgtttcaggagacctgccaacatcacaaggccaaatgggcctgcaaaataaagaaataaatagatggacaaacaaataaatggggagggggtgctgttgttcagagagcagtgagagaggatgttttccagtgtgtgacattgtacaaaggtgcccgggatgttttatttgaagctcagcttcaggagggtacacgacagcagataatagattgtaggtacgcggccatgggcccctaagagaaatctcagatgtgttgtactctgccagatgataagaatggggatggaaaggaagaggtaggtttcttcttcctcattgccagctgtgtccctggctattcttgtcaggccaggtgcttttcttagagtgctcagagggactatttacttagcacttgctccgtgccaggtattgtgctgtgtgtgtgcttcatgtactctggctcacgtaaaacctggagaatggtggtattaccccaatcattaaagatgagaaaacggagagtcagagaggtgaaatcacttatacaaagttgcacagttggaaaccgaggggtgcaactggggttgagttgaactcctaagtcagtgttcttaattactattctagatggcttcctaggcagggatgcaaaggccccttgcagcctctctccagcacaaggagcttctgatgatatattgaatgccagctgactctgggcttctcattgtgagtttagccatccttcctcatactggggcagaatcactgcagtccccttctggctggggccttgtcactgctgtctgccaaaagaccctctgccttttgctctgcttctgacatgttcaaaacaaatctgggtcccagtctttcccgctcaacctcaagacaagaggagcaagggtcatacccttcaacctggtgtcagaggtacttcctttgtgtccttgttttagagtgcctctccattgtcacctctgactacagccagcctgaccttccagctttgtaacttagcgcaaaccaagtttcctagttctgcaaagccttccccaacttctgtctctgcttggtacctgcctgttcatttgccaagactcagtttagacattccttacctggaaagtcttttctgacttttgcaagactcggtcagtgattctatcataactattgcatgcatggaatggtctggttacttatctgtctcatccacagtttgctgaatgaataggaatacctcacccttttggtcacagatcctctatcaagtccacatagagaatctaaatacttacatgcttctggtggtttgttcttttgttcaatgctaactggtccagaatggcctgggcttcagtgtcacaggtgtcaaatcacccatacttcctaggcgtagtcatcacacaagaacatgaagcattaattaagatgacactagctgctgtagcatgcaactccaaaatgtatcatgtatgatggcttgagagaagattatattccactcatgtaacatccaaagtgaaatgacagattggcaggtggcttccttaagtgatgattcagaaatctaggatcttttggctgggcacagtggctcacatctgtaatcttagcactttgggaagccgaggtgggtggatcacttgaggtcaggagttcaagaccagtgtggccaacgcggtgaaaccctgtttctactaaaaatacaaaaattagccaggtgtggtggcacgtacctgtagtcccagctactcaggaggctgaggaaggagaatcacttgaacctgggaggcagaggttgcagtgagccaagattgcaccattgcactccagcctgggcaacagagcgagactctgtctccaaaaaaaaaaaaaaaaaaaaagaagaagaaatctaggatctttccaccttggagctctgtcatcatcaactcatggcttccaaggcccctgagctcctctgaatcagcatgctggaagggaaaagggcatggagtaataaataggtgtgggacatttctagggctagggccagaggaggagcaacaatcacttccaccttcatttcattggttaggccacatggccacactcaatctcctgggaggctgagaaatgtggtctccctatggtccagtcagccatttctgccacactatctacctcactgtgcacaatctgcagaattttgaagcacccaacttccccgtgttctgagttcggacatagtgttccctttttaattctctgggggagaacacagtgcaggaaaatttgtcacttccagtttgcctcactggtggctgcactgtctgacgtttctttgcttgcaaatgtaagggctgaagaaggactggcttctagatttattaggcgtcttttacttggctgccaaagattcctaaccacgccaggtggtgaagattaatggccaagttggcatgttgagagtaacttaggtaaagcactctttctcactgccgtcctttagaggtcatctatcacctgattccgtttttgttttcaagtgacagagcaagtgcaaatttaggcgagaaatcagtaagctccagaaggctgggaagatactaaactatttgcatatttcagcttggttcaattaagcatgtccattgcttgtggttgttatgaccaattttcttctaggaaactgctccaaaggatgcttgaagacctggagtttgatttgcagaaaaaaaaaaaaaagtggagcttcatggctcaaagcaacccttttccagaaactttatctggtaatgccactcaacagtgagaacacccacatccttgttcctttagcatctgggatggagattatacagtgtaaatttctttctttcttttttgattgacttgcatttgttctaaagtaatttccttctgtgggcatctacatgtagtaaacatctcatagttctcttccttaaatgcagttagtgaagtgttaatgtgaggcattagcctttatcatgctgaataaattgaatgccctatgactgaaacggagcttctcatctacacccatacttaatattgcagaaaaagccaagcaaacatgtgagttcagcgtgcatttatctttgcccagaagctctttatggttgtttacatgtctctctccatccatccagcattgcagtgccctgaactgagttttctaaatcatcatgttaagttctaaacgctcaggccagacaattttttgctccaagaagcaagacccaaacatcttaatcttttcaccttgctcagccttccttcctttgtagaatcaaattgaaatttgctctccatctcaggagcttcccctggactcatgtatctcttccctccatggtttctgctcttttgacaccccctcaacagcctccccctcccctcagtcttgaataatttgttcttttgtgacatgaaaggtgcattttacattttttgacactgtggttttaatcagctcttattttaatcagttcctgcaaagaactctttgcttacttcaaagcaagaccacgttctatgctttttttctgacaagctatctttcacacttagatctgcactccttccagaattgacttttgtgtatggtgtcaggttaggcacaaattaatgtctgccctttggagattgccattgatcaagcaccacatactgaaaagccacttcttcacctatggttctaaagtgtcactgtgccataaatcaggtgaccttatatgtacagatatatttctagatcctctgttgctcagtttatttttgtgctaatatcacaccatcttcattattgtaactttataatacgtcatgatagctggtagtataagtctttatcatcattcttcatcttaaacactattttggctgtttgcatttctacataaattttagaatcggagtgtaaatgtctacaaaatatgtgctaggattttcattgatctaaaatctatctaggaggaatttaaatgtttgtaacctcgagtttcctaaccatggacatggtatacccctgttcatttaggctttaaaaatttctgttattaaggttttatgcttttcaatgtagaggtcttggtgacattttaaagatttattcctagatatccatattttaaaatgctattatgaactgtaccattttaaaattggctttgtgttcagggactttgctaaattcacattaatttcaacagtttttccatagatgcttttgggtttcctgtatatgatcatgtaacgtgtgactaatgagggttttatttcctcctttccaatcattttgctttttatttcttgttgcacttgctctgtgctctagctctgtcgcactccatgtagacagacacttgtgcaaggataaggaacatttatataaaacttaaataactctattgggcatgattttttatgtgcctctacatcctcccagaaaactgtccctttctccatcctccttaggcaaaacttatgcatccttcaagtcttagattaaacacctccttcaggatgatttccttggcccttctgagactgggtgtactgcagggagtgggaattctttgttatccaaggtgattaagcacagcccttaggtcatttacttcaaatgcttgtttgcaactttgtctctcctgctgaactgcaagcccttcaggggcagaaattctgcaatgttcattgctatatcaccatcacttagcagagtgtagggcatatcacaagcacatgataaaggtttagcttatagttctcctcctcatccttgtcctgatacttgtcctcatcttgttctttctcatttacttatggaagcatggccctcatcagtatcagtgtctattgaagtttagcacaaacttttccactagtgtctttttcactaggtcacaaagtcctcaagggcaaacatcttattcttcatgattgtatccccagtgtttaacacagtgtctacgtcttaatagacagttaacaaaagtatgacagagtgattatgtgtataaatacatgaatgaattggtggatgagtgctccttgttataagaaactgaggtccatagagaatgagttgggtagcaacttaagcatactcattctgtaggattaccatatacgcctaaagccaaaactaatgccttagtatagtttgaatttccctttgcccagaaggtcctcttgtgaattcttctagcatctttctccatccatccagaattgcagtgtcttgaggaacttgcttgcttttttttttgtttttgttttgttttgtttttgtttttgtttttattttgacagagtcttgctctgtcgcacagactggagtgcagtggcgcaatctcggctcactgcaacctccatctcccgggttcaagcgattctcctgcctcggcctctcaagtagctgggactacaggtgcatgccaccacacccagctaatttttgtatttttagtagagacgtggtttcaccatgttgctctcttgatctcttgacctcgtgatcttgatctcttgacctcgtcttgatctcttgaccttgtgatccacatacctcggcctcccaaagttctgggattataggcatgagccaccgcacccagccagccaaggagctttcttttaaaagtctcttgagatggagtctcgccctgttgcccaggctggaatgcagtggtgctgtctcggctcactgcaacctccacctcccaggttcaagcaattcttttgccttagcctcccaagtagctgagattacaggcgcatgccaccacaccaggctaattttttttatctttagtagagatggggttttaccatgtaggccaggctggtcttgaactcctgaccacctgcctcagcctcccaaagtgctgggattacaggcatgagccaccatgcccggccaaggagctttcttaaatcatcattttaagcttcaagaacttcagaaaacacagaaataattttcttactccaataatcaagaccacatcatcttatttattttcaaccttctttgtctgtcttttcttcccagaattaaagtttggtttccatctgagcaaccctctctagacccaggcatctcaccccttcccggctctgttcgtttgctgcctcccccatgcccaccccatgtgtcttggttgctttgctgtttcaaaagttgggaggtgcatttttaagttttcagacaccacggatttaattgcaactgccaaggtctagtcagagcttgggaagtacctatttttcatgatctgtcatcaggagctgtgataactcagccatgagctcacaacccagagacctgcatggcacacttttgaaaacagaatgaagctctgcagggtgcttctccagaatccctcactccaacaggcaattgcctccttccttctttcagcctcacctggaggcccacccccgctttggtgttaaccttcaccttgcgtgccttcctcgcaggcatcattgcacagtgccttcccatctaaaaactttatttcaccccatgcagaagggctgagcagcagagcagctcccaacagagactgtgctttattggagagcaggcctgggttgtgttaatgccagctgacttgagaaccacaggggtgtaggcagggccaattaacaggtgagatcagggtctcttaaatgccagctactgctccaggggtggtaggtcactaattgtagctgcactcctgcccttaaataaatacacttctctagcaagagggattagttgcttgcttacttctccctttagccgtatttatatttaattgaaattctactttttagaggttcacttgcaagtcactgttttgatgtgggccaagactagggttaggcaagctaggtacctgggatgcaaaatttaaggaggcctttactctcaggtgttgatcctgcacttgcctgacacagggaacaagtgtgtctttaaatgtcacgcactgcacacctggcttgtctcaccccattccagctcttttttttttttttttttggacccagttattttaagcaagtgattctttaacacagattaggcaagtatggtgagagtcacaggaatgcaaacagcctccctccctcctgcaaaccttccctgtcatcttcctactgaaccctgaaatgttttattagcctgtaacaaacccacccccatgttagagctattgtttattaagagacttttatatgtgggttctcagctgggaccacacttggttattatttattgtcatctgacaaacctgtgaggttggttggtatctcagttttgcagatgagcaaacctggggttaggggaggtggttcttcatataaccagtgagaggcagagccaggattcgacccagtctgtctccagtctttctgactccccagcatcctatattcattgagctgcctttatacctaataggacacctgtcaccatgcaaggtaatgctattgaatttttcagcgacagatttgagtgtggaggaaggcaaggagccagaagcctgagcctgtaggggcccaggaaaagaatgcagagtggagattctagaggtaatgtgaaggaaaagttggagaggccctattctctgactttacctgttcacagctgggttgaccttctgcagaataaaatgcttctctctccatgttccatgggtcttcatccatccagctttgtatgatctcctgttgtagggttgctgcttctgtatgtaggtcaactcctgatccagcatgagctccttgagggccaagactgggcttgcctcagtgcttttgtgcagtgttttaatggagccatgcataaatcccagatttcttttaccactttcccagagaattctgttttgctcaaaaaactgttttgaaagaatcaaatcataaggaattatataaagcagaaattgaaacacgctttctttctctcaatgccccgctcccgccacggtccctactgttgagctggatgctccttcctccagaagtttctgtacacaaacacaaatgcaccaacacaaacccattcatagagacatttttaaaaaatttttttccagtagcacagtcaaacagtgcacacgttttgtggattctctttctctatttaatagtgcaacgtagccttgggtcttccagtgcacacagaattgtctcatttgtttagcagctatgtgtagatgtactataagtgtttaatgtcttctgatgatggatacttggattggactgatcttttctggcagtgaacttccttgtactaaaatatttgcacttttttttttttggcttgtatttttatggcttggagtcctacagatggagttcctggggcaaataatatacactattggattttggaggatattacagagttgttttcgaggaggctgagcaggctttctttttaaattatgaatgggaatgcctttcctttgcttctctacttgaacctcattaatattgtaccaatctttagaacactttagtcattgtgaaaagttaaagatgagatttaattgctgtcttgatttacatttctttcatatattaataactttattttttatgtgtttattgccattagtattacatgttcattcccttagtctatttttctttgggactgtttgtctttctctattgaattctaagagcttttcttatgttgggtaaattagacatttttttgtcatacgtataggaaatgtcttccctagttgtttgttctgtgggttattgttagtagtagcatcttttacaaaagccttcctatatttaaatacttgtgaaaattcagattaagggcataagttttgaatgcagacagatctgagttcaaacacaggccacacagcttagtttgcagaagtcccttaaaatatctgagcctcagtgtccatgtgtgatacttagaagtaatgagaaggagataatggaacaggttaagcattgaccaaaatagatggaattaacagaggccagctccaaaagtcagaagtgggctgtggcctgttgcttccctgatctccctttactccccttactgtggctcttccctaaaactcgtcttggtctggagcattgattccccctaaatatgtcccctccatttcccactccaagaaaagccagatgagaaaattctgttgggccccttcctgcttaacagaagctggaaaaagaagacattccctaagttaagtggaaaaagaagacattccctaagttaagtgtgtgttctgccagccagtccatccggccacctgacaaaggtcactccaacattctcccatttacatggctggaacttgctgagcctcatcatttcagcctgagatcaatttgctggattttcatttcattttcaagttgtacgttccctctttcactcagactagtaatttcaggggctatattataattttgagttgttgcttttttgagacattacaaaacattaaactgcatttagccttgaattgtcacttaagattattgcaggaaatgagggctttctcgatcacaaatgtgacaatagatggagaacacagcttctattatgactaaatggggacaaagagtgaagaagagttaagtacacagccacatcttatgtgggtgccaaggagcccagggaaaccgaggccactgctggaaggatgaagggctgggctcggtggtgctttgggaggccacacatgcaccagggatgaagcagagcccccttcccacataagcaggcaaattatgaggctgcctgggttttcttatctcccattccacccaatcctcctctatcttcagcatcaccctcacaaaacctttaaaggccggcttcacttaatgccaggctgctggcctgtggttgtggaggtccctacggaactgagggcgtttagaagatgggagaggggccaagggtggacagccctgggaccaggatgtgaaggctgaagggccttgcccttttgtgtttcttcagtttgtggcagaaataaacgggaactgcccacagacttcctgggagtcggcaggcctggtaaccccgaggacggacccagtagcaccaggcagtggggcagcatccacctctgctccataactctggctgctacacccccacaggcccttttccagggtgctgggttcctgatgcagggtctgcagcccagtgcactttcttctccacccgaggccaacccagcaggtgcgagatcatggtgaggtgcacaccaaccctctcttttgccaaggccaaatttgctgtggaatcaggctatgcacatccttagcagaaagctatgatcacagcaatttgaggcactggactgggtggctgagaaatccagtgaaagatccggcaagcatgggtaagggccctcgcaacaggctccatatgtcctggctggtttgcccaccgagcgtgtctttggtcccagctgggaaggcagaactgacctccaccccttgagccttcaggggcagaaccttgtggcaggcagtgacagtcccactttgtagacagtcacagaacggccaagaaaccaagtagagggagctcatgttcaaactatttctacccagttgtgcttcatttctatgggcaggaaggctgacggcttctccccagagtgggagttatgtaagaagttttcatttaggaagtctctgtcccctggaacctgtctaggcacagcctcctgggaggaaaggtggctgtccaattggtgcagattagacctactttccttgcactggcctgggtagttaggcaatttggtttcagatccttgccatatactctcatcagtccttggggctcagcaaccttttatccaaaggctcctccccaacatacacacagacacagacacagacacacacacacacacacacacacacagacacacacacactctccacaccctacaccccacaccacatccccatcacttcaggattgcctcccaaacctgccctagctctctgaatgaggcctgctcaccagccccttcacctgcgcaaatctctgccctttctcgtgctaatctgccaaacccactggtgtcaaaatgctcaactccttagcggggctttcaagcctttattgatgtggtccaagtccccatgcctcagtcagctggggtctctctgttcagaattcagattcctgaacttcttcctgagggtgaggcccagaggtctgtgcttgtaagcaactccccaggagaattttttttacatgaaagttgataaatacccaggcagttccctccggaggcaggaggctgcagctccagcatgagttgtctcaagatgccattagtggcctcagagaaataagccctggggactggaggtttgcccagagggttcctcatgctgtgtgccaggatctcgcaatatcttctggcctgtgactcagtcatgaaagggacattctgaggagggggacttcagctactcagtcacccctcccatctcagtttcctgggactgtgaatctcagaggccacaccatctccagtttcactgcaaaccctgccccacagcccctgtgtcaggtctgggctcagacgcccctccttcccccctgcgtggctcaggtgctccacattaggcagggaaggcctggcatgaggagtcctgtgtctacaagttgtcttccctgcctccctcccagtgtctcttggggctaggtttgcccagacacttcccctcgcctctctgttttcccttctctctccttcaccagtgggtgctattgaactcagatcacaaccttcacattttatttttatttatttagttattttgagatggagtctcgctctgtcacccaggctggagtgcagtggcacaatctctactcaccacaagctccacctcccaggttcacgccattctcctgcctcagcctcccaagtagctgggactacaggtgcccaccaccacgcccggctaattttttgtatttttagtaaagacggggtttcattgtgttagccaggatggtctcgatcacctgacctcataatccacccacctcggcctcccaaactgctgggattacaggagtgagccactgcgcctggccaccttcacattttaaatatgtccattccccagagaaatcgggaaagacctgttgtgtgtctccggtgcttgagtagtttccctttgaccgcagctgcttccctggcttcagccacccatccctagagtccctctcccagctggacctggaagatttccaagttcctgcctcatatctggaattggctgtgctgaaaacgggtccctgaactcaggtgaattcccttagctcattaccagtgtctctcagagagcaagttaacacggaaatgcaagtgtcaccagcgttgctgcagatgaccatgacttggcgcttacctctccctgagcctggtgtctagagctgccagtgcccaaggtctcagcagaccacacagagggtgtcagccacatgtcttgacttgtgataagtactgctttattctgttttccaattgattggttcagaacctgttctaccatcagcactgccagctctctgtgggagagtcagtgcctgagatgtcgcttatcacctacaggcctgggcaaatggcccatgtagtctaacacttgtcaagttgccattttgaggtacaagtagggacagctggggtgccacagaaggtttgagtatggtggaaccagagagattccagctcagaccctgtctccagcccagccagctggtgtctttggacaagcctgtttcccagctgttaagtgggttcagtgatgtccatcttccaaggttattgcagggcgtgaatttataaaaccccaagctgggccttgggcaatgcaatacattgcagccttctggttccttcgtcctaagtaagaaggcatcttctctatttccagcagcttccatagggtgctggggtgtggggcattagagaggtcctgtcacaaatctcaggctggcgatgagagggatatgcatagagatggccacctgtccacctaactctgctcatgctctcctgccccagagggtactcctgctgaggtgaggggtcccctgggctggggagagacctttgagaaggacgatggaaaaataaaagtctgccagaattggcagggtgcagtggcttatgcctgtagtaccagcattttgggaggctgaggtgggtggatcacttgaagtcaggagttcgagaccagccaggccaaaatggtgacaccctgtctctcctacaaatacaaaatttagccaggtgtggtggcgcacacctataatcccacctactgtggaggctgaggcacgagaatttcttgaaactgggaggcggaggttgcagtgagctgagatcgcaccattgcactccagcctgggcgacagagtgagactccctctcaaaaacaaaacaaaacaaaaatctaccaaaatatctaaggtttattctgagccaatatgagtgaccatggaccagggaaacagtctcaggaaatccttagaaagtgcacttgaggcagttgggttacagtttggctttatatatttcatggagtcagaaattgcaggtaaagccataaatcaatacctggaaggtatatattgattcagcctgaaaaagctggataccgcgaagcagaagcttacaagtcataggtaggtttagggattctttttgtggcaattgattgaaagacttaagctttgtctaaaaatttggagttgatagaaaggaatacttaagttaaaataagggggtctgccacccatcatgtgatgccataccagaagaaggttgaaaagtgagccacattgtagtagatcaaaaaataagacctgttggccaggtgcggtggctcatgcctgtaatcccagcactttgcagaccgaggtgggaggatcacaaggtcaggagttcaagagcagcctaaccaacctggtgaaaccctgtctgtactaaaaatacacaaagtagccgggtgtggtggcgggtgcctgtaatcccagctactcaggaggctgaggcaggagaaacacttgaactcgggaggcagaggttgcagtgagctaagatcatgccattgcactccagcctgggtgacaaagcgagactctgtctcaaataaataaataagacctatttaatgagattttatggtttgtaaggcatgactccccaggccccttcaaaaggaaaaaaaaagtcagagctcagtcctcaagaagcttgcccaagccccagagaggcagtggagcccctgggatggacgagggaagcccagcacagagtttcattgacttgcctaaagccacacagctgggaaaacccagtgccctggactccacgctcctgataccgttgaaggaagatctgaaaaagaagggctgtggccaggggcgcctgaagggaaggagagagggacagtaaagaagagtaagaaaagaatggagggagaaggaagactgggacagtctggtgccacctcaaaagtcaggaataaagttaaagcttataaaagaagttaaactattccctttatcccttttcctcgccctgcccttcaaaaagcgaaggcaaaaatgactcagcattcagagccccagtccggaaacctggctcctcactaactagctgtgtggctttggccagtttcctaacttctcttgatgtttctttcctcatttacaaaatgagaaggctgggtaagatgatctctgttgtctcttctagctggaaacatttctgtgatgattaaagcaaaaatcctggaaccccttctgctgtgattgctttgaggtggagaagcccgcacaattgccttgggaaggtggctcactcctttttagttcagccaaggaagattttggaatgatgggaaagccagaagcagcctggagctgatgctccagggtagaggagcagcccactcccttgaccaccccctcacctccaccagcagcccaagatccttctgcctccctggaaatggcttaatttacatcacagtaacctgcttaaaaggaagccagggataacctgggtgacaacatgagtttgctaggggctaccatgataaaataacgtgggttcggtggcataaacaacagacatatattgtctcacaattccggaggctaaaagtctaagatcaaggtgtcggtagggttggctcttggggcttctctccttggctcacagatggccctcttctccctgtgtctttctgtggttgtccctcttgtctgtgcatgtctgtgtccaaatttcctcttcctgtaaggacacaagtcatattagattggggctcattgtaatgaccccattttactgtaattgcctcgttaagaccctatctccaaatacagtaacaattagatgtagcagtggttagagatgcaacatatgatcttcatgatagtgaccatgacatttattatcaatgctggaataattcgaaagaaatatttttgaactttttattaaagtttacaacatacatactgaaaagtgcacacattagatgtttatagcttgaacatactcacataaccagatgactagtactcctgaaatttctgctttgtgtcctcttgtacttattccctctcaggtaaccatcattctgacttctaacaccataccttagcttctcttgtttttgtagtttctctacaaaatcaaacaaaatgtaatcttccgcatctgccttcttcagtggacatatgtttgtgagatttgctcatgttctagggtgcagctttagcctgctgatcctcactgctgtgtgcagtgtatagtatgtcgttgcgtgaatattccacagttagtctgtgttttctaccattgatgagcttttgtgtagttcccagtcggggatcaatatagacctgaagatcctagtgcatgtctttaggtggacatattttacccttttctctttgcatatacttagaagcaaatttctgggtcataggttctgcacatgaacagctctactagagactgtcaaacacttttccagagtagttgcaccaatttacaacccacgctggcagtgtacgggagttctaggtgctccaattttttttttttttttgcttctacatggcttttttacttctacatggctttttgctttgcttctacgtggctttttcccctctacctttcttaatttggccattctgttgagtacatggcgacgtcttgctgtggtgttaatttgcagttatgtgatgactcctgatgagggacatcctggcatttgttgactggccacttggctggcctccttcctctgtgaagtgccttttcaagtcttctgcccattttctctattggattatttatctttttttcttgttgttttgtaggaatactttatatattctccatgagttttctgctgattgtaggacaatttttggagtcaaagtggggagttgtggataataagctgtaataagtgccataaaccagcaccactagacagattggcaaacttgacttctcggcacatagtgcattccagttttacgaagatttaaagagacaaatttggaagcaccaatggctcatatgagaacagaagggggggaaatgccatgttttcagtatacagctttatagggctttcagttccttctcttcctacatctttttgaagatgttcaccttcagagtccaacattggaatgagtttttattcctctgtgctgctgattcagcactctgttttctatatgtctgtgatcatctgccttagcttcattaaccttctgacattttatgattctcttagtccaaccccccaattttattaataaagaaacaagcctggctgggtgcagtggctcaccagctctttgggaggccaaggcgggtggatcacaaggttgggagatcgagaccatcctggctaacacggtgaaaccctgtctctagtaaaaatacaaaaattatctgggcgtggtggtgggtgcctatagtcccagctactcgggaggctgaggcaggagaatggcgtgaacctgggtggcggaggttgcagtgagccgagaccgcaccactgcactccagcctgggcgacagagcgagactccatctcaaaaaaaaaaaacaaaaaactaaaaaagtagcctaaaatggttaaatgacatcccccaaggtgacactgctggttagtacagagctgggactagaatccaaggctactgtgcttttctccaaaggcatcttcacaagtctttagtatttaaatcaacccataagtacctttgaccatgtacagggtcattggaggcattggtgtcagctggaatattggggttggagggcaggccctggcctggaagctggaggacttggctgctgatgatagtggctcagcgagcagcctctgctttcacattggcgagataataaggctgcactacagtgtcctctgacagcccttccatccctgagttctacatccaaaaatgtctcccctgagggaagagaaaggagagctggttttttctttttttaaacaagaaccaagtaaataagtatggatttcctttgaaaggaaatgattgggtttctctagtcaataaagagaaaggagagaaatagggcttcaaataagtaaactcctttgtgatgtgagtggtattgaatagtctctcagttcaaatgggcaaaaggaaatgtctgtttatggttggaggcctccaggttatccctgagagactaagtgatgttaccttaggaggctgaacaacctccccgcaggccactacattaaagacatttatataattgagactcttatggttggaagtaagtgaaaaccatattcacattggcttaagaaaaaagaatgtattagcttatataattgaaaagcctataggtagatcctattttaggattgtaggatccaggctcaaacaatattagaaataattctttctccttctcacaatgttatgtctttgccttcctgtgcattggcaaaggagagcttttcagggaagccgccccagtgttggggatgtcatggccacagagttacaggcttgttttcctggtttagcaactccagcagaatatttttttttttccagcagatgtcctgaggttgcctcttacgggcctgatctggatcccatgttcatcacggaggggactggccctgtgtccctgattgtccactgcttctctgtgtacccacctctgggtatagagagcgaggactacctccaacctgagctggagggattgtcagggacaatggctccccagaacatcgggtactcttactggaggaagagaggattagttttaggcaggcatgaaaactgctgtctacttaaccatccaagtacaacagtgtgcagaaaaccacggaaactcaggacaggatggtggcaagacactactttgtctttacctcaaacccaggattctaggaagcagagagaaagaaataatatttatcaaatgtcaatatgccgagtaatgatgtacagtctcattttagattccagtcatctttcatggaagatattagtttcccgattttgcaatcaatgaaaatgaagataagagggttcataacttgctccttagagttgcatgctagcaaataaaggggcctagctcataaacaagggctcttgattctaaaatctccctcactgcacagtgctgttttggaaactgggttttcagtgcccagagctgtgtgagtcataaacataaagttgaaaggagcctcggccgtgggggaggagaaaaagatctagcttggattttgctccatccctagcagctgcccagctggacaacctcaggtgaatttcctgccttctctggatccccctttcctcatttacagcttggcagggttgggaaaatctatgaggtgttccaaggctgactgtggccagtctgtgattaagtgagggcaggtgactggctgtgccagcaatgacccaggtggacgcatcccaaagtggctcaggtgttatattttgggcttctggttgtggttctctactcctatcattccacccccatgttggtttcctcttttctccatctcagatgcatctcagggcatggactgcccccagcccccaaacatgcacctgagcaaatacagccttgctctgggaagcattactcctagaagagttccagaatttctggagcctaatgtcctggagttccagatttctggaacttgccccactggtgccctgaggctcctgccctactgcttcccagccttcctttctggcttgcactggtttgcttggaggagttatttggtttcctatgtctttctccatcctctcccagactcagctcagaatgcccacaggcttgggtcacatcaaacctgagagaccagcagactcaaatgtggtctctcaagtttgggagggccctggcaggagagaggaggagtcctgctcctcactcatgcagggccagcaggcagcctctccagaaaataattgggctgtcctttgccctcctgccctatctccgtccaggctttagagcgacctgaaactactctattctatctatgcacatctttctgggaaagaggataactgttttttctcctttaagtttgtaatcatttttctaagtaccattaccctagaaaaccattttctaagtaccattacccatttctaagtacccttaccctaatataaacaccctatattttctaagtaccattaccctaataaagtagtacatagtaatacgtgtgtgtgtgtgtgtttgtgcaatcaattctagtttagtccacaattgaggataagaccttggcacacactttaatgagattcagttttttccatatttttcaataaacacatattgagtccctactctgctgtactaggcatgtgctggaacacagcccttgccttccaagtgctcagagtgacccaggcatggaaattcatcactcatgtggttgtcctgtcttggaagcaagaacagtatctgggaggttctaaaaagttagggagcccttcccagaggagaggatacttgagctggtagcagtttcctggaatctgtcttgggcagagacatggagcgtcctggaattaagagtcattggaaaaaagctggagcactggactcagatggagactggtgataaggcttggaagacaggcagcagggaagttacaaaaggcttagatgtgatgctatgatgctaggactgtagtgtaagccacatgccatctggatgtcttgttaaaatgcagatcctgaccacaggtctaagatggggcctgagcttctgcacgtccaacaagctctcgggatatcccatgcactacactctgagtagcaagagtgaaggtgcccaggcatgactgagaactttccataagagagtgatcataattccttgaacctatgtatctaggaattctagaaagtgtaagtgtattgtctaatttgattcatataatgtgaattatgtgtaatgtgatttatatagttcatgatttttagatgtagatcctgcagtctagggaagttaaacaactagagttttgtagctgaaaagggctgcagaaattgaagacaacctctcaatttacaggcaaggaaactcatctgtcatctttgaggtcgttcctggtctaaaagcccaagtttctgtgattcgaatgtgttgctcatagttttctaattaaagacaaaagttgaatgaaaatcttcagtcagtcctgggaaaggccctaggcttgcttccctctctgggctaaactctggaggagggtgtgggattgtatctctggatgatagcatggtaaacatggaaacataatgctgggggtgatgcacttgaacttggtggacacccttgattggaagttcccagttttcaggctgctgtccactcattttctttgcaacctggaccaaattggttcaacgatagtgcgtcttattgttttcatctgtaaaaatagggataacagctctgtcactgcatggttgggagaatcaaattggcaggtcttcataaatgtattgttcatctaccatgaaccagacactatgccaagcactgcagacgcagacatagacatagacataggatagatccagcctcgaaccccatggagctcacatggcggtgcaaagactgacatccaagacacaagttctggctaattatgtccaagtacacagaatacagccaagaagtatgagggcaataaggatctataacaggaaggcctaacaaggaggtctcagacacttcttccaggaagaagtgatccttcagcagagaagtgaaacatgaataacagttaacaaggagagaagagagactaactgggtcagagccctgaggcaggagtgagttggctggcatcaggaaccaagagagggttgggtgtgaggagcaggtacagcaaggaaagaaggaagttcaaggacagactggaggaataagcctggttagatcctgtaggacttgttgaggattctggaccttattctaaggttaataacaagccatcgaaaggttttaagcaaggaggtgatgtgaactcttctgtgacttaaaataatcctggcttgtatggagaatggcttgagcaggagtgacagggagacttctgcctggtgtaagcaggagatgatggtagtagccccaatcagggttgtggcagtgggaatggtgagaaagggacagatttgggaggtataactggcaagcttagggatcgattggatgtgggggtgagaggggaagaagtaaaacaggacgacttgcaggttcccagctagaaaacctcaatgcatggcattggaggttattatgattgggagtagtgcagagagggcagctttgggtgggtagctgatcattaattcagtttggacatgtcccattgtaggtatagataagctctccaagctgtgatgttgagtaagtagttggctgcagggttctggccatagttgtctactgatgctggtgacatcgatttgggaattgtatatccctagagatgatatttcaaatcagagtgacggaggaggtaccccagggagagggaaaaagaagggaggtagagagctgagggcagctcctggaggtgctctgccatttggcgattatcaagtgagataacagatgaagaatagctttaaaaattaaagcaggatgttctcattgttgcgctgtactgtgcttactacgtacaacaatgtgcatctccgacatttactgctgcacttggatgggagagattatatttaatgttcacaaatttgcaagactatttcctccaagttattttcacccctattaaaagaaaagcccaccaggagggatttattcttatcatgttgtgcaacagcaatttcattttcaaatcattaacaggaaggcatcctcatctgatcattcttgcctcaaaaccctatcttagaagcctgataccatctcaaccttcctgagagctttactgatttctgttgagaccctcagctctaattcaaacacagtgtgagcctggctcctgtgtgcacctctcttagtatctctcccgtcagttgattttgtttttctgcctctggtcctggcatttggctgcagattattccaagaatttcattgctaacttacatgagatgaacagataataagaaatggaatttattttctaatttattttgaaactgaattccagattctgtttatggggaggggcggagtcagcctatgatgagtgagaacagtctttgactcaatttaaatgaagtttttcttcttcttcttcttttttttttttttctgagactgattctcaatctgtccctcaggctggagtgcagtggcacaatcttggctcactgcaacctctgcctcctggtttcaagcaatcctcccacctcagcctctggggtagccaggattacaggcatgcaccaccatgcccagctaatttttgtattttactagagacggggcttgccatattggctgggctgttcttgacctcctaacctcaagcgatctgccctcggcctcccaaagtgctgggattataggtgtgagtcactggacccggtcaaatgaattttcatgggcaagtttccttccccaggactgtttccaggcctggcagtgggggtggggtggaagttcttgctttccataaagtaaatccaatcaaaagcagacattctgcaggagtctagcttgccagactcctattcaaagctagtttgcttctttttagcttctctcttagcaacagaaaagtttattgtgtttcccttacaagtaaaaaggcccttccttgtcacagagaggcatcagagaggatctttatttcttgccagctgacattgtgttcttcaccatgacacccacaggaagaaattcattcctgaacttgtggccatttcaattgaattaccttaatttgcatttgcgactcagaaagcattggacttttgatctcctgaggtatgctttccagacaaagcagctggctggggctgtgtgtttcggtgcatgaactctggaccaggctgcctggtcaaacttctggccctgacactttcctgctgtgtgagtttggacaggtcacctaacctatccatgcctccacttttctatttgtataagcattgaaattcagcagtggccacctcatggagcttattgtaaggtttaaataagcaagtgcaagttaagtactcagaagagtgtctgtcatacatgtactatattaattttagctgagtattacctctcttctggggcagatgattggattgtctaataaggagtatgagctgccattgatcactgctgctatgctgagtgcctgacatatgataatgaggtggatactattattttatcagtttcacagagatataggtccatggtcacacagttaataagtagtggggctgagattcaaacccaggtctattttgactccaaatcctagtcctcacctccccactgctgcctccactgtacactttgcctgaagaatggggggtaaagagggtaaagaagcaaggtcaaggtcatgtggaaaggtatttttggccaattaaccagatgaccaggcagttctagagcatccctgccccttgtcatttcacctggacgggaagcatgtgagcacagggagttggggaaaggctcagagctctagtccttgggggatttgcaatttttccctcttgttgtaatcctaccttctatcaatttccccctttattatatcctctactttttttccactccttatctttaaactccaaatacctctgtgtgtgtgtgtgtgtgtgtgtgtgtgtgtgtgtgtgtgtgtgttgtaggagttaaggccttagggcagagtgggaagagctccatttccaggtagtggaaaagaactttgggctgttaaacaggctgttaatctggtcctttctctgctactgaatagaagaataaccctgagaaagtcattgactctttctgggccttatccatgagtttgggattgaggattggaaggtatctgacatcctgtggttctagtcagccttctcctagatctctgacctctaggagtggtcttggtgacagtgatgatggtggtggtgagtactgatggtggaggaggtgatgagataatgacgacaaaggaagttgttggtagaggtgttaatgatggtggtggagatagaggtgaatgcttggtgattgtgacagagacagaggtggaagtcatggtagagatggtggcagtggctgtagcagtgatgttggtagaggtggaggtgatgatgttggtgggggtggtagcggcattggtgttggtattgttggtggtataggtggaggtgataataatggtggtggtgtggtagcagtgttattagtgttggtagaggtggaggcagtggtggaaacagtggagttggtgtagaggtggagatgatgatggtggtggaagcagtgttggtgttggtggtaggggtggaggtgatgatgatggtgggggtggcagtagtagcagtggtgttggtgttcgtggtgatggagggtgatgatgatggtggccatagtaggagcagtggtatggtgatagaggtggaggtaagaaagatggtggtagtggtggtggtactggtagaggtagagatgattctggaggtgagatggtcataattgacagtggtccttttctgacagcagtcactgtggtcagcactatcccttcagtgtctcctttgatcctcctggcagctagtgttatctccatttgcagatcagaagcccgaggagcctgaactttagagagtaaggctgagcatcttggtgctgggtggaactgttccagtcaggtagaggcaaagccggaggtgtccaaggaatcctttgttgggaaatctgtgataggcataaggagggaggggagtcaatactggccatattcatgttttgtccttcccaaatcctttcctgtgacaacccagttgtgcccagatggaaattgagggttataattgtcagattttattccctgaggccacacagcatagagtgtcaaaatggcttccatgcttctgcacacgtcctctaagtactttattatttgtctacaaatttccttctttggcagcagaccccagccttatgctctaggtcctggcctgcagcttctctgacaaaggcttgtattgtccatggaggggaagggcccccctcaggtgaattattttggcataagtgaatgtcctctgatatgtctttggtaaacagggttttctgtgtcctgttatacccattgacttgcatatgtactctgtttgtaccccatagggccatcacagacagaaacagaaaaagaaatgagtttttagtgtagagaactcagggttaatcagtagcaaagggggcttcaggttaaagccacctgccttgaaggcagttgtcagaatccaagactcctcaacccctgtctagttctcctttagggctgagggtgctggtcttgtttggatgagaaagtgatcccttctctccattcccactctttctttttcttcctctaagtacagagatggaaatgagccaggcactaggccccaagcttggagggctaatactgacctctttgacagagaagctggcttcaaatggattccatagaggttcaccagagcccctcacctggaactctctttccctcctgcaaacatttattgagcagctactatataaacgttttctgttacacattgagaatacaacagtgaagatggagcatgttgccctccttgaatttctagtctagtttatactgcagtgttatgatgatgtgagtaggaatgaacattcttggtgaactcatagaagggaacttgatgtagacttgtgaagtcaaggaaggctccctggaaggagtgacatttaagcagaaacttctggactaagatctggactaagtgtgggcaattggtgtgagaggaatagggaggaaggaagagagaaggaggaaaagcaggggatgaggagggtgtggtctcagcaaaaaagcagcgtgtgcagaggcatggaggctaaagaaaagagatgggggagggggcctagcaggtcatggggcctggggcatagaagagtgccatcctatgctgtgaactgaactgtgtccctctcaagtcatacattgaagccctaaccccaaatctgactgtatttggggatcgggcttttaggagctgtttaagtttagttgaggtcataagggtgggactctgaataggacgagtgaacataaaagaagaggaagagagcttctccccacctctatacccttacttctgccatgtcggagaatgcagagagatggtggctatctgcaagccaggaagcgagccctcacccagcaccaaatcggctggcacgttgatctgggacttcccagcctctggaactaggaggaataaatttctgttgtttatgccattcagtctgtggtattttgttatggcagcctgagttgatgagtacaccccatatctagacaagggtagacagaaactactttcttgcctttagtccttgttgctaattctatagcagtaacaagaagtggtagctggtgtctggttttacctttggataatataggtcaatattatctcctagctcacacctcattctctcttctgggacggttcagctgtaaaaaagactcccatggaggaagctcttagctctgtgctccacccatgctgggcctccccaggttgggttggaaggccaggccctggctagccactcctctgcctcagtcacaggctttgggggctggtcctcccagggtctgggagcccactcagggatctcaggaaaggagacagtggggaagcagggtctgtaggcatgcttgtttgtctccacactcctgaaatgcccatgcaggagagacctggctaagtgcactggctggcttcatctgagggctgcatgattttaccagactctaaagggagctgggccagtgcaaacagcacctgcctgggaagccccacgtttggactcatgggctgtgtaaatttgggcacctccttccacttctctggggattctgctagctcatcagtagactaaactctgaggtcttttcagtgccagcattctagagttttaattctctactatttatagggagctgaattgtattaacagtgcagcctttcagctgttaatcagtgtttataagtggcatggctagagcccgtgtggtatgcatcgacttgctgttttggttgccccagctgcaagcttcttcattatatgctctgcagcttccccggtgggcttggaggacatcatgctcctcattaccaccacccactcctgtgctgtgtgttactagagaagtagcatttggcttcatctgccaggctgagagatagctacaggtttatgtagctgcaccacattttaggacttactatcagtggattgagaatagattgcatagaaagccacacagctacttacagttgagatctacatagaaaaatatttatttagcagattccagttgatcatttatcatgcatcataaaggtacaggagcactaaaccacaatgatgaccctaaactccatttactttgagtgcaagtgtctgtcctacagcttccagacaggagggtctattttagaaatatgtgtttgttatggtagtgattgatagtttttcttcttgtactgaagcttgtacagcagaatgaaatagctgtaatgcttagcaaattgcagcccatttggaatctggcttctgtggcacatttcagaggcctctggcctcaacgtggtggatggagttgcactggggagagagttctttcctgggctccatcaaacagctggaacaaggatgagacatcaaaccgtctgtcttcatggacagaggcagccatctgtggcatttacatcattttgaagttgtggcctgcgcctttctgaaaaccaaatcccaacagttcttctgtcttctaaaagaaattcctcagtaggaaaaagggcaagaaggaagatctgcataaacgaagacctccaagctgcaggtcactagaaaagtgattgcaaagtttccaagaaagtcctagcttggacttagaccttgtcagaggacatggtacctggatttagctctcagggaaggtgcagtcagtccatggtcaactgcatcccatccatgccgctcccaatgcctctctgccttccgttgacaaactcagcaatgggcggagattgccctctctgccacctccctgttagctattaaggaactggcttgaagctgacccaattgccttctcaagatgatccgaataaataatgggaagggagaggtgtgggctgggaatggttgcacatggcttgatttgtggtgatcttgaataaagatgggtagggagcaagagggaaaaatagaagagaaaagagatgtgattgctttacatactggagaaacatgtacagaaagaggagaaatggaagcaaaaaaggaaaggtggggaaaaataagaggaaaggggagggaaaaagagacagagggagaaaggataggagaagaaagaagacaggatgaggaagagctgtgtgtggaaataagtgggactggcaggacggttgtctaggagtggaaccagagggagggagtttggagctaccgtctgctttgactgtagacactgatgaaaatgtgatgctttaaaggcttcagtgacagtgctagggtccctacaagtgcccactgagccaggggctccacctcaatttatgcttctcttagaccagtgttctccaacttgtgtgagcagcagagtcaacagagggcttgttaaccccagattgtgggccacaccctcagagtctctgattcaggagatctgggttggagcctaagaatttgcatgtctaagaagttcccaggtggcgctgatgctgctgttccagggaacactcctttgagaattctgtctcagccgttaaagactaaaccaaggttggtgctgatttggacgcctcgggtcagacaaggtcagtgagtgagatcaacatctcagctgacttgcagaagcagattgcaaacactaacatataaattgagaaagtgctaaaatcttttattggatgtatttgtctctttctggctcttcattcaactaaccatatgcttactttccactggcaattgctatttaaatgtcagttgacaagcagatgcttctcaccctactacatgcaagttaatttattgtccacaaagcctgatggagtgctctctaaccatgctggtttcccactgtccccacccacccttttgttgcaaccacgctgagccttgcagctcacagaaggtaagttgcctttgtgtttctccatcccctgctcatgccctgtctctgctggtgctgcccttttccaggctgactcttactctccttaactttctgtgtgaatgttcttgcctgtgggaatgtttatccagctcttgttgctgcagtgttgttcggctcagaccattctcctagcccttagaaaaccaggctggggccaccttgtacagctcagctttgtatcatcagtccctaggacaggatccttaataggccccagccatcaagaagcaattgccaagtaaataagcaaagtacagagaacttgaatggggggataaaagggggataagggctgggggctggtggggaggtggagatgtctaacccttgctcactatggtcaggattagagagaaattgaaaaatagagacaggaacaggcaggaggaggacagagcagacataataatcacagaaatcctaaatcatcatcaacatacccctgcaccctcaaggcttcaatgattccataaaatgggactccaacagtaagtagaaaagctaatattgggaatttatttaaattacacaaaatatctttgcttgggaggtgatcaactttccagatattttgtgcttaatacaagctaagtatccatttttagtaggtacttatgtaagatggatggacggatgaatgggtagaagagagatgatagatagacagatggagtcattgtaggctaggtcaccaagtcatgacctgaagtaatattttgttttaatcttctttggctcccttgggctgggactttaccttcctttgagcaggaaacgttctccagagttttgccaaatgcctgttcttggaggacccgcttctaaaactgaagcaagacagtgcataggaaaggtgttgtatagacatgccacttgctgcatcccatgctgtcaatggtcagcacttgagtctaaagctggaaaaaaaccctaaaattacagttaaaaaaaaataatgggcttgcttggcaatcgagggtagaatcaatccagtgttctaagtagtatgaccaccctggccccaggagatcttgggcaaatcacttaacctcagtttgctcatgtgtaagacaagggagttacaaggctggtctcaaggtctcctcttgatctcctgatctctaatgactctaagatggaattctggggaacacactagtagttactttgactttaaaggttagaggggagaaaatagagcatggtgtcagatacatcaatgccaccatgtcccagcctgcagagcttaatgcacttaagatgaaaccaagcaggctgcctctaatgctgttgaaatgtcaggcttcagtgcagggtgttgttagacatctgcatttcttctgttttttaaacaacatgactctgccaagaatgaatctgtgtcatcatctaatggctcttgtcattttagtgtagtgatcaaggaggaaaaatgaaagtactttatgtggaaaaccagataagaaggtatttcatagcccagagtgcaaggctgtctggagtataatacagatctatcagtaattcagttaaaacagtttacctgctttacatgagtgggttcagttcattgatcttcattcaagttcacactaaagttatttaactgtgggctgcacattacaccacacagaccaaagaattatagattttttccagatgtgatatacaaatccaaattgtgattgcagccaaacatgcatttagtcaaatctttaatacactctattagggcgtgaataagactttaaagctttgtcttagccacagggtagctgggctagagtagagccaatcgcaaacagccagaatagaaagttaccttgggatgcagtatttattctcaacggtgtatcatctagaacaacaaactttttttaatgtaaaaatgagcaattacttgtcattataaaatgacaaattttacaaggggtcaaatttggttttcttcccctgagaggctcacctccattaccgtgctcactggtacatgtctcatgtttgtcattggctgtacctgtatgcctaatgctccattttcctagagcaaaactatctttcaaaacacaggaagaaaagcgccagccattttccccacctccagttgaggcaggggaagtttatcccaacagccctgccaagtagttggcatgatctgcattattctaggatagctaggcaaagtttagaatgagaaatgcaaaatacatccttgtgttttcaggattatataagttttaaatgatttagagttcccttatatggaaggctttctaggaaaagactggctaaccctgttcctcgctatagctgagaatgcatactcagagatttaattcagcattggttgcattgtagtgtaacaaatacaggctatgtgggaggttccttggggcttccttggtttgatataactctctggaatgtggttgttaaagggacagttgggggaatgggaagagggggagccttgctgctctggggaggggctaggaaggattcttttagtgggtgctgtccaatactgtagacactagccacatgtgtctcttcccaactgaggcatactgtaagagtaaaacctatactgggtttcaatgacttagtattaaaaaatgtaagacatttcatcaataatttttatattgattgcatgttgaaattacatgtgaaataattattttgggagtgtatcggattaaacagcagtattaaaattgttttcacccatctctttttctctttgaatgtggctgctagaaaatttaaaactacatatatggctcacattctgtatttccagtgaacagcactgtgctatatccattttacatggtggaattatggtgtttactttcttgcttgtgtttctgtatttttcaaactgaaagtatgaatagcaaacaatattgtgttttgagaaaaaaatacacagcatggattttggagtctggcaaagatgtgtcctagctattgcacttgggcaactaactttctctgagcctgcacttcctcatttgttaaattaagagaataactattttgacctcaccaggtcaaagctctccaggttgttgtcaggagtgagaaatgcatgggaaattagcagagtgcttagcacagaaactggcttaggaaaaactcagtaataaatattctgcattattataggttatttcaaaacacccatctggtgcacaatatgaaaatctctgcatttctaattcaggtctttgtctctcttgttctacaagtttgttcttgctattatatctacctacttttacacccagaaaaccaaacttccccttctttgcctcatcattgtgactctgagttggttttctgttacttgttcacactgagcttcttcccacttatttttgacttcagagcaggaattttatcctggctacaaacaacaccacaactctttatctacccctgcctttgccttgtacctggaggctgggtcttgctttttactgaactctgctgcttttgatgggatgatcagtgaaggacagttgacaccaggccagtgcatgtgggaagctgtcagaagagtaagggtcatgtaaacaacagatcaagagaatgaggagcaaagacagggcagaagaaaagcaatgttatcattctctccccttgtttcacaagcctgccttatcttctcattgcctttgtctgttggctttaaaagctgtgctatgttcagctcatggttagtacaaggtgtttctaattgcctttctggattctcaccgcctgaagtacaacctcccatggtgtagcacagttcacatctaaaaccgtgcaatttccatattctgggcaataactcctcagatgaagatggttgtacatgttctctgaaattcagtgacaggaaagagaaaaaaaatgcaaaactttgtgaaaatatgtggcttcctcaggtatggtctttttcctagttctttcacaattaatgagatgagcctctcaatcagagctggatgagatgcaaacaaggagcaggaacttaagatgaatttggaatagcacaagtggctgggaacacctgtactcctcgaagtgggagaaaagtcccggatttcttatgtatttttttaaaatcagaaatttttgttgttgctgttgttgttcctatccagcatctgtaactaggtgattcagaataaactcttgaattaagatggtatttttttaaccattttttcatcagatcaatatgttagttcacttattttagttttagatttactggatgttctcaggatagcaaactcaaaggaaaaaataaacaaattggcttatatttcaaagttttaggctgggagttgacaggagaaacctgtggaaattaacaaaggagaagagtttccaaggccttccttgctcacatatggatttgtggaggatttgaacacagctagggtcccctccaacagcaggcaaggaatactcaggccagtgcatacaggaggctcaattctggatgtgtgaatgtggctgttttttcctggagcatttatttattggtttattgagacagtttcactctgtcagccaggctggagtgcagtggcacattcgtgtctcactgtagccttcacctcctgggctcaagtgatcctcccgcctcagcccccaaaaagtatctgagaccacaggtgtgtatgtaccaccatgcctggctaagtttttctttttttgtagagatggggtcttgctatgttgcctaggtgggtctcaaatttctaggcttaagtgatccttctgccttggcctcccagagtattgagatatcaggcatgcgccaccatgtctggcccccatttattaatagaatatttaccatgggtcataggcaggaagcattcattgccaactgtcacttccctagggtttctagaaaatcagaagattgaaaatgtgagtaaatgtttcttactacgattgaaatgtaggagaggaaggaagcatttctgaaaatgcaaatcctgctttaaggtagcagctctctacaggggaatttactgtgggtgtcttggctccttacgaaaagagagagcaaatgcttcacagatcccctgatcttcctttgttcttttttgcttttgtcactgtaactaaactctcatgatacctgtgatttcagttgtttgtggtctatgtagcatctttatctctgtcagtcagaattgcagaactggtggtggttacttaagttggaatacaaatatgtgggcatgcaaacaaatgtacatgcagtaaacatttgatctacagaagggcctttgagtggtctcttctctagggcctgattgcttctgggctgttgacagcacagctcagtgctgcaaaggaagggaacatgttactggctgaactagaaggaagttttatatttgccatctctgaataattctttttccccacatgagggatctaaaagtgtctgaaaagaaacacatatgctgttgcagatatgagcatcatgattataggtgtgcatacctagtatgtatatgtccaaaaaacattcttggcgacaggctattcctgactttgcttcccctgaaactgaatgcaaaaccagtgtcattaaatatgctgctttgttgccaaagggacacttcttccatttgatttaaaaatatcactaggtcttctttgtgcagacatcctttaaaatacaaacactgctttatctaatgcagctatactgtatgtatacatctttttctttaaaacaaaaaaagacaaaaccagatttatggataacatgaactgctttctggatacgcaaacaaacaccaatgaaaacatttttttaaaattaacagacatcaactggtataaatacactgtctaaagcatttaatggtctttctttaacacagccaactcccccgggtttgaaacagtgttaaattctctcttgcttgtggcaaaagaagctgtcaagtccaacactgaaaaattggtaccatttcctggccagtaagcacagaacagaggggctaaatattttatggttttattcatttactgtgttctcatgctgtgtttttcttttctctgtctctccctcctgctcgtgtctgcccagggctgattgttgtgacattggccgtatgctggatgcccaaccagattcggaggatcatggctgcggccaaacccaagcacgactggacgaggtcctacttccgggcgtacatgatcctcctccccttctcggagacgtttttctacctcagctcggtcatcaacccgctcctgtacacggtgtcctcgcagcagtttcggcgggtgttcgtgcaggtgctgtgctgccgcctgtcgctgcagcacgccaaccacgagaagcgcctgcgcgtacatgcgcactccaccaccgacagcgcccgctttgtgcagcgcccgttgctcttcgcgtcccggcgccagtcctctgcaaggagaactgagaagattttcttaagcacttttcagagcgaggccgagccccagtctaagtcccagtcattgagtctcgagtcactagagcccaactcaggcgcgaaaccagccaattctgctgcagagaatggttttcaggagcatgaagtttgaatgtcaagcgagggagccttgagtgggaactggccctccagccctaagaaaacgtcactctcactctgcagtctcaaactatgcccccatcagggatggaatggacactggaggctttacaaaaggcagatgcccacctcagtgacttctaaggactgactctgccagcctggccttgactccggttacacagacatgggggtgaactttcactccacctccttccttcaagtacatactgaaaattcagtcaggctgaatttattcagaatgctttaccgagctctttcattatttgcacaggaacaaaagagaacacggactcccgctccctacccagaataaaaggacacccagaagaaactcactcagggaggtggggggttgggggcgagggctggaagaacaatgcaggagggggtggcatctccttcagcttcagcagtgtgccgagaagagggctaatttgaggaacaggatggtggtgcggagccctggcctgagggccgaggcagaacttccccttttcttgggccttggcccgttacaaagaggggtgttgcagcagctgatgcaaactgagttcagtttccctggggagcagaaggactggtacccggcagaggcgatgagacaggccgctgatgatgcacaggacttgcggtacatgatccctgtaacacagacccaaaggagctgagttaacgtgcaccggcaaaagaatagctgtccctctcagcccaaatccaaacggacagctcttccttactcctcccacagcccagagactaggtgaggtcagggaagtgcttcggattgtctcattgatattcaagatagatggtgaaagagacaggcactatttcattagttttaacaaaactgttccaaaagcgatttgagatgccaatacctgtgaatacctgttaataaagagctgttaaatagacttatttacattttaagtcagagttcacactgtgtacaagacacagctttttatttactttgtttttggttcaaactgtctcatgccagtgaggcccacaagcagtgcttctagattttatctcattttgctttataagcggccacagagcgctggctctcaactatgtgttgatgaaatcctggagttctttgaagacagaccaaatcccgaagggaaataaatgtatccctactgaatgggccctgagttttccacgggatttagtgaaggggcacctggctgaccgtgtgtccctcacagtcttattctaaggagaaacgctctgtcgtcaggacacatggccatctgccaagccagtaccacgcagctagcactcaatgacacacactgggtgcaaaaaaaagcttcccaagaagactagggggcctgtctcaaagagcatgtgtgtcctgtcaagctgcagtatagtcagtcatcaaattagggtgtcttaatcataaggtggaagtttattcaattcaaataatactagctaaacttttatttaagggcttccctgtctgtctcccaggcactattcagacacccttagcgtgtcagcttcttcactaccccaagcaatcctacaagggaggccctcatgattacccccattttacagatgtgaagcctcagggctagatttagtaacttgcccaaggtcacatgaacaggaagtggagcagctgggatttgaacccagcattctggctccatgctgtcaagacggtgtttactgtatagcagtaaattggattgccaattaaccacaaaaataaccggggattttttagggggagagggtttactttgaagatagcttttgttgtgtatgtatgtggcttttttttgagacggagtcttgctctgtcgcccaggcgcccgccaccacacccgactaacttttgtagttttagtagagatggggtttcaccgtgttagccaggatggtctcgatctcctgaccttgtgatccgcctgcctcagcctcgcaaaatgctgggattacaggcatgagccactgcgcccggccatatgtggctattttatatcaatgaattattttttttggatagatgatagtgtttaatactaaagctagacttagaattaacaggtcttaatcctgtttgctgccttgcacagctgagggatatagcatcccaccagcagccggggctccttacccactcctttcctgcaggtatgtgggcaggtgtggttttggttttggctccgtcctcgagaattgccactttgggtgctatagaaacattaaggaatgaaactgcctaaaacttccaagtgggaggtaaagaagtactttagatttaccgtaaaacatgcaattttatgtcattttttcccctctaactgcatgtttgtagggattgattttctaagaccattacaaaatcctggaaggcagctgctctggtaagataaagtcgaggtacagaggatgcctgtatctatgtgtgggaggcactgtttgattt

SEQ ID NO: 237 - DNA, 180284 bp, Homo sapiens
  source 1..180284: mol_type = genomic DNA
gcatgaaagagctaaatcctaatctgaagcaacaggtagtcagagcacaacatctattggcaaatcaagagatggcagtacaaattatttagaaatagggaggtaaatgacagaagagacagataaaagcagaatatggctgcctctaaaaaggagaggaacatgataggtattgcattatcttaaaatattatattaaaatagtacctgcattgtcttaaaatatattatttctttaaagtgtgtgtttatattgttttttaaaaatacaattttgaaatttattgttgaaaatggacacatggaacaaaccaaaccttgttttatcatgtaattttcagaaaatatgtgatccataaagattaaaagaaagttgtattaagtctggcagctttagtattaacttgaaataaaatatggcaagctttccacgtcctcctttatttccacaatccatatgtacgagctagattccagtcagaacttccacaaatacttcactctttggtagcagcggttataaattacgcctttgctaatttgcgttgttcccaaccaggagaaacattaccacaaaaaaagtcagtttcatcctgcagtgttcccgcagcaaccatattaagctggaagaataaagctcctttgtagtagtagcgtctattgaattacaatgtaaatgttgatgcctgcctggaaacgtcaaatgacaacaggtttacagaacgaattcagtggttgtttgcagctctggaatcccaggctgcagagttgagatcgaagaggtgcgtctggccatcttagcgttcattcaaccaaatctcctcactccatcaaaaccacgccactccccacctgcccagctcgtaaaaggatgctcacctgtttgaaaatctgtaatatatctgatgtcttttacacagcaggacacgaaaaagtgtttgttgtggataagagtgttaaaaattcaattacgcaacagaccaaactttgtgcttctttccccctctcagcacaaagtaactttagtcccgtcctcttctgccactgtcaaacagccctgttactgtgggcattaaatgccttgtggcgtactgcgcatttgattctggttgacttgggatacctgagctcggctctcattagctcttccgctcgacccacaatccctagtgtttgcaggtgttgcattcccccaacccctttcttctcttcaaccagtagcctccaccttcccatccctgctttggagaaggaggaaaacgcagcttgagatctactcgaagaactgaccctcagctctcacaggctgccgccgagctgcaagcatgccgccgctccactcgggtaaacttcggagtgagttacctgcactcggagaagggccttacctgagcgcgcctctgccaatggcagctcacctgagggagctccccagccaatcatcgcgcagctcgtccctcgggcttgtaccctttagtgaaagaattcagctccttgcgagaaagttacctgtggccgcccaagtccgccactttctgctctgtgtctgcccattgccacgatccaggaggactccgcgccgcccggccgcctccgagctcgggccccatgtgaggggcccccccttatcccacctttccggctaggtgagggcgcgagcgggcgagcgagcgagagtggtgaggggggacggaaaagcagaattacctgtagctcttgttctgccatctcgggcgctctcacacaccttcacctgcacagacttgaaagtccagtttcaccagaggctgaggctccaggaaaagcggagcaagttcattggatcaaacatgtcacaagagtcggacaagtaagtggatcacacgcgccggctgctgctactactaccactttgggctgatggcaactggtttgttatgtttttgtttttaagttgctattgttggtatttttctttcttttttctttttctttttggtggatccagacttttccgcattatgtttctaccctgattaaggggagaaaccctacaacaatgtgaatatttaatatcccctttgggccttgatagtaaaagtgggttttccttttccttcttcccttaggaatggtctcagctcccgctcctggatgaatacttggatattgccagaggttttggtagatgggcgcgggaggcctgctcttccctctctgttttagctgctcccaccgatctggcgtttagggccatttggaagttcagctgagttccttcgatttgtccaaagggcctactggaaaagtggggcttggccgcttttgtgtgaccgcaacaaagagcttttatatgaggcagaaacggccatcttctcgcaccgggcaggagggtgggcgtgagtgcgcgcccgcgtgtggccccgatgggaggcgaggcgctgggaggccggggggcgcgggggcggccggcgccgtcccccactccctcgacatcccgccttcctcccccctcccccgcctccctcccccgggtccgcccccgcattgtttggccaccttcctcaggtgcccggggggaaaggacggttcgcgaactgggggaactcatgtgaggcctcgagttagggcctcggcggggcgcgaaggggcgcctgccactgagcgattcacccgcgcccccgacggcgtctgcacgcccctcgagctcgcggccctccacgcagttggccgccacctcggacgcggcaggcgggactgcgtggggcgcgccgagccttctcggggtgctctcgccgtcaaggccgagggctcggggcggcgggaacgctgggctcgcgtccttcccgtcccggacaggcactccagacgcgtcggggagccacagcctgcgcggccggagccgcccgcgggtcactgggcccggtccggccgcgtcctgacggcctcccccctggccggcccccgccctcggaaggctttgtgcgagccgggggaggtggggcctgggcgggcgcgggagggagccggaggtgggtcccgcggcctttctcgggattcggcggggacactcccttccccctcctctcgggcgcgtccgggcctgggaactggctgcgtcctattggaagtgcgcggggccgcccttttgctttccccggtaactttgccgtggcgttgcggccaccccgaggggaccttcctgaaggtgtctcgccggagagggccggtgccccaaggccgcgggccgctgggcctgtcatggagaagtggcggggacccgtcccaagttgagggaccacgagggaggagtgggaaggccctgcggacctgttcaggggtggaggggaaggactagcctcaacataaagccgctggcaggttaggcgaacctaagaaaatgcgctgtcatacttaaaaagcaaaaaactgccagatagttgtaccccgttagccaccgatgaggaattaaccgagtacagcataccggaggggaagaactagcgttaccaacacgggagcgggtcagaggcagggtaggaagaggagagtgtgtggttgtctgagaacacccccagctcctccccatatctctctagtcttcaaggaaacacgactcgagtttgaaattttcagtagccaaatccggaggcgacagcaagtttttggggtttgttttgatctttgcctgcgtcaaagatgattgcaaatctaatttaattaatcgcgcaattaacatttagtttgcttagttttgtgatacaacagaactcgaattctgaatgaaaacgggtcggtctttattttcaccagttatacttagcagcaataagaacaatgtgtttaccatcagaaataagtactgagcgcccgcaatctggtttcaccacacgcatcacctggtttttacaggtgataagtatctgggattacatatgcttgcatttaatgaacgttgcttttatctagtcgtggtttccaagacgaaattttgtatcctgggaaaagtaatcgttacaatggtgcaaggagataattcaactggtttgtttctctctcattgggctgttgaaaatgctttaagtcaatacatgacttctggatcatttttgcgaattctagcctcgttttcttaatattctaagggagccccggcaggggtgggtctgaagcttatgcaactatgtgtgtgacatggggtggggactgtaagtaaacgggcccctgggtacagcgtggggcttccttcctgagcaagtgagaggcttcatcagcctcatggaaaatccaccttacgaggcctgcctgtagtttctggaaataacatgaacgaacacacactggatgttctttcataatcccattgagatttaggcaatctttgggattgcacaggaagatatttctggttaacaagtctggactgaagtagcatcgtcttttttatggtgtggacttttcagattgaaacgttctgcttttgatgttctgcagtgttgatgctatcgccaattaaaacaaagtatttttaggacattttgtctttgtacatattttaaaattctctactccatcttaaattttatgaagatttaagatctttgtcagcaagcatgtgtacaagtgaagcaatgctagattaagaaactcttattttactgccaaaatgtataaaatatatttagagaacgtgtaggtactatgtgatttgatactcacaggtgtttttcattaggtaagtgtattttctggttacctactatttgtaacacattcagataggcgtaatagaggcatgcgaagatggataagatgagccctgttctcagggggcttacactgtagtggaaagcaactcatggacagacatacttctaataaacacaatgcttaatagtcacaaaaaatacaacagttacaaaaatgtttttaaaaatacaatacaggggccaggcgcggcggctcacacctgtaatcccagcactttggcaggccgaggcaggtggatcacgaggtcaggagttcatgaccagcctgatcaacatagtgaaaccctgtctctactaaatatacaaaaaattagccaggtgtggtggcaggtgcctgtaatctcagctacttgggaggctgaggcaggagaatcccttgaacctgggaggcgggggttgcagtgagctgagatcacaccactgcactccagcctgggtgacagtgcgagactccatctcaaaaaaaaaaaaaaaaaatacaggtcatgataaactgcctctccctactcatcgcatttttgcttatgataatttcagtcattttgtgtgttttttgttaaggagtcctgctattattcagaaaatggctgaagttataggtctctcatgtggataacatttcaagtaatgggatgactctacattttaattaaactctctagtctttagttttataaatgcatatgcttgtttacatttggctatgcaaaatttcttttaaggttagaaacgtcaagaatttatcatatctttttcaaaccaatacatatacccattcactttttgaaagaatatgccttgaatgccactatatacttggcattgagattcactggtgaatagaacttagtccctgcctgcatggtgcttactgtgtgtgtgttgggggtgggggaaaaggggcaggcttgttgacactaaatcaacaaaaaagtaaacatatatttaattagatgatgataagtgctatgaaggaaagcaaaaccagctggagggattgagaataatggggaggtcttttgtatagggtgatcatggacagcttctccaatgaggtgagctttgagtggaggcctgagtgaagtgagggatcaagccctaagatacctggggtaagaatgttacaggcaggtggaagagcaagtgccagggccctgaggtgagagtgtggttagcatggtctaggaccagaaaggagctctgtgtgggtgaatcagagtcagagataacggcaccatcaaataaattaacatgatcagttctctacttaataatctggacagttgcacactcaaaacagtcaaaattattcttgtaagtggtcttggtaatcaagagatagtaatacctaaggagtaaatgatgaaccttcagtcttgtttctttccctgagtatcaccagtttaatgttgaggggtccagagttctgttccctacaatggattaaatcttgtacactccttgattcagagatgaataagtgcacacactctggaggatccctggggattgaaactaaagagagacaaagtacagatagtgtttcctcagacacgcccacctccctaaaacttgtagtgtaacctactaccttcagctaccatctccactccttaacattaggcttgtgcaaggtaaaatttgcccttgctgccttcctcttgctcttgttcagtttctataaactatatccatcagaaaacatggatttgtccactgtgtctggaggaacactgcatagcatgtgctttagtgagtttcccattttcaatgaagtaaactgacatacaggcaaagttaacctaactgaaaaacaagttgtagatgatgcacatgcttaaaaataggaatctccacaggaatttctaaaatcattgcatctcaaactcacctgagtttaaaacatataaaatatcatctgaggcaccctgggtcccaacccagcagtgttgaatcagattctccaggcgagagcacagggaatttccatctaaacaatgttccaggcattataattgccttaaatagggcaacactgcttcaaattaaacttaatgttagtttacataatagatgcaatttatatgcaacttttcaggtgtatatccaatgtgtaagtgaaagaaatctgtggacttttactttatgctaccttggatgaacagcttcagatatgattttaacatggatataagacttcttaggcctgccctagatgttgtttgctttcattgttttgctgaactgctgcttctggaagaaaggggtctttttgaaggggaatatgtttccagagctgcaaaagaactgatttgaagtgatgtcacccacatgggcctccatcaggcctgccaaaggtctagctagggtttctggctgaatcccactcatgtgcgagctggtgttcaatttttatttatttacatttttatttatttatttatttttgagacagagtattgctctgttgcccaggccggagtgcactggcacaatcttggctcactgcaacctccgcctcccaagttcaagagattctcctgcctcagcctccccagtagctgggattacaggtgtgtgctgccacgctcggctgattttttgtatttttaatagagatggggtttcatcatgttggccaggctggtctcaaactcctgacctcaagtgatccacccaccttagcctcccaaagtgctgagattgcaggcatgagccgccatgcttggtgttcacttttttgaggactgttgtttcactgaattcagattctattttgtagcgcaaagtcaaaggtaaagagctctagtttgatgctggtctctggtgaaatgatttgataggatgatgattgcagtttcatttctaaggctcatggtagcttgaagtattactctgataagatggtactagatcttctgttggcctacagcgagggtctgttttaaactgactgcagggtctgggccattcaaatgatcccagtgccacctgacttaagggagattaggagtaagtattagagcaatcaatgaaaagctatgtctagcaatttctactaggctcaggaaagtaaaaggagaatttagaaaagtagttggataaagccgggcgtggtggctcatgcctgtaatcctagcactttgggaggccgaggtgggcggatcacgaggtcaggagatcgagaccatcctggctaacacagtgaaaccccgtctctactaacaatacaaaaaattagccaggcatggtggcgggcacctgtagtcccagctacttgggaggctgaggtgggagaatggcgtgaacccgggaggcagagcttgcagtgagctgagattgtgccactgcgctccagcctgggagacagcaagactccgtctcaaaaaaaaaaaaaaaagtacttggataaatcaaacatacacagaagcatttaaacaacattaacagtacccaatcacctgaagaagtgtttgtttcaaatgtacagaagattcaaatcagattttttggatgttaggttgttaaatttactttttaaaaagttttagataattcaggcaactgcctcagttcctctttatggcttatggtctaactatagacatacgtttctggttaaaaaattaactatggttacatagtatttttccccttccttacttcctcccttatttaaactaacattttcttcttgttccctccttcccttctttccttccttggtttgtctccctaatgtcactttcctggtttttttttcctcccatattaacttggtgagaactgcacagcttctgcgcatagagataacggtgagtctgattttaggtgctgctatagttagtgaactttgctgcattctttcagtatttacagcatcagcagcccatccttgttacctgggccaagaggtaagatcattgcagcagatgatgtcaactaggtttaaccttggaaaaatttgaagtcatttttagtataagaaaagccttaccctaagttagagttctcactcatgatccctggcattcactagggtactgatactctcttccttttaaagaggttttcaatgactcttgttcaattataaaaactaggcctggccaggcgcggtggctcatgcctgtaatcccagcactttgggaagccgaggcaggcagatcatgaggtaaggagttcgatatcagtctggccaatatggtgaaaccccgtctttagtaataacacaaaaattagccaggcatggtggcacgtgcctgtactcccagctactcaggaggctgaggcaggagaatcgcttgaacacaggaggtggaggttgcagtgaaccaagatcgcaccactgcactccagcctcactccagagtgagactctgtctcagaaaaaaacaaccaaccaaccaaacaagaaataaaaacaaacaaacaaaaaacaacaacaaaaaaaactaggcctaacctgataaagggtagtgattggtttggcaaacttgtccagggaaaattccttaatgagcagcaacaggctggataggaatttttgctttggcccaggaggactggtgggttgcttagtaacaacaacatgtacctgggagtccctcagatagcttcactggtcttcaaatttaggcctccaaatttcagattcaccctaccatctacctgcctgcatagtttcttcctttggattaattcaggctcttcagatcagttttgtttatttttccattaccaggagagcacattttatgttgtaagtttcttataatggtaaatggtaaactgtattataataggtaataacaaaagtgtatatatatatttttttgagttggagttttgctcttgttgcccaggctggagtacaatggcacgatctcggctcactgcaacctccgcctcctaggttcaagcagttctcctacctcagcctcctgagtagctgggactataggtgtgcgccactatgcccggctaattttttggtatttttagtagagacggagtttcgccattttggccagtcttgtctcgaactcctgacctcaggtgatccattcaccttggcctcccaaagtgctaggattacaggcatgaaccaccacgcccgaccgaaagtgtgttttatgctgtaagtttcttactggaaatggtaaaaaaaaaaaaaagtactggattataatgggttaagtgggatagaaataagaaagcattcctttggggatctctacctcccatccccaattatactgggaagagagaagtgtttcagcttcatgagttttggtgagcagtagtaatattatttgtaaaaagagcaccttttgatttgccacatacaatactaatcaaataacacattttaagaattcttataggaagtgctagaaaagctggtgcatttcaggagatttcaatgtatattttgaaaataagtcagggttctggaggttgttcatgcatttgaatgggcattcagtggaaagcaatcaatgcctgtggtagatgaagtaccttattttactttgtaatgaacatggcaatgaactttgtggggagcacttcactttcactcccaaggaaatgcttcctttacaagtgtgaatgcagataccctccggaacagaaacggaaagcaagaattgcttgtggcttctctttattttggcgccagcctttcatctgaactctgaatatacaaatataactaaccctgagagccagagtcccttcttttttaaggcccatgaatttagatcagggttttaggagacaaggaaaggctgaagtgaaggagagaggagtggagaaaggagaggacagaagggagcaggaagaaactgcttaactactgttaagttgccagtgttttctcagtggagtgtgagcggccagcaggggctgctgccggggcctagggtgcgacagcatgtggctgtttggcctcctagataattggttttggttttaatttgcaatctagaatcctagagctagaaagagccttagggatcatccaaatgcatcgtagggcatgtgagtgagcaagtataggattttgatctaaaagcctggattgagaagaaatgtaagaagaaatcttacattttttcttctgtgtttcattttgggattctaagtataaattgaaaatttggagttttgattagtttgaaaaaacatgctttttttttttaagaaagattgagagcaagattagcactgcatgtttacttcttaaaccatgaacgtgagtctgtgaaatacctggttaagattctgataccattactggggagttaaaattgacttttcttcccacactcaccccaaatcattgttttttggttctcagttcagtgagtcccataaaataactgccttctgtacttcttggatctaacttttcaaagaaacaaggaacaaaggtagcttttgcctctttcctgcattgccaataagataattaacataagatcagaagattcttctttcattatttttcatctgtaaaatggaattgaactaaatgatctccgtgaataattacctgctcctatattctgtgtctcattttctccctccagaggggtctgggctggtggtggctcacagcaggggccatgaacattagcaagacaggaggttacaggcacagtgggacctgcttctgctcccaagccccctcacctccttcaccaaaatcaacggtggtctgattcagatggcagacttttggaaggcaggaggaattcagaggatcacatggaattcagaagggcagcaaggcagtgaaatcaatggtttaactagcggactcccgcacagccttgctgggatggtagaaaagtggtacaagaaaatcagataaaatgggctggcagggacgctgagaacttcttcccagagacagcccaggaagtgttcattctggcaggctcatggagtgagagtgaggcaatataagaatgaatggaacattgactaaaatttagtaagctgaaaaccttaagtaggtgaaagggatgacctcctcctcctcctcctcctcctcttcctcctattctttctcctcttcctcctcttccttttcctcatcctctttcttctccttctcttcttctctgtccccttctccttcttttttttctttctcccccttctccctttccctattactccttttaataaaatgtaattcacagacacccactgtcaaaaaatattgccaagtgaatagtttagtaaatgttcagaagagatttcaaataatataaggataagaatagcagccgcagtttcacttcaaggataaggtaatatattatttcacttcagggcacacaatgatcatttatttaggtcgggaataaaatctcctctggtatcctactgtgttatagaatttaaaagtctctgaagtcgactttttctgaagtcaattgcccctgaaaggttctcatgttggagggaattttgattaggtcacaggacatttatgtttcctctgcaaactaggatttttaagttgctctggagtcctggtgtatacttttaagaatatgtgtatcttacatattttggaaaataattttaaaaagaacaaatacctcaatagaaaggtggtcaaagagcatgagtagacaattagtaaaagctgtataagtggctaataaagacagaaaataatattagctgtaagctgtattagtgataagaaaatacagatgatataacagagatattctaagtttctctgtcaaagtggctaaaattaacaaaaccgggttcgggtaaaatatatttttggagtattataatttatcataaactttctggaaggcagtttggcaaaactggttgaaatgggtctacccattgataactaaattccagtttcagggatttgtcttaaagacataactaaagatataaagtgccacatgatttttaaaagtgaaaaatcagtataaccctaaaagcctggctatcaagggttggtttagtaaatcatggtttagtgagatgatgggacactatgcaagcattacacatcacattaatgaaaaaatccttaatgataagagaaagtgttcatgatgtattatatcagaatgtttataggcataaaaagatgaagaataaagaattcagaaaaaacacaaaaagttaacagtggttttctctcttaagtataaaataaaggtacttttttgtctgttagtgtttctctgtgttttcctattgtgctgatgtgagcttgcactgcttttgtaattaaggataaattttatttatgcatttatgtatttatgtatgtatgtatttaaaaaaattaaaggttgtatataaaaatagttattaagtggagacacttaagaataatacacacttctctaaataaaacggaaaagcctacttgctgcttgcttgttgcaggtagaattgacccgatcccctgcagaaatccctgccctctcctctctgtcccaggaatgccacgctgcccttcacgctggcatgctgcctgtcggttctgtgctattccttagtgacctgtagattcattatctgtgtctccacaaccttgtccttttagatttgcatatgtgttaagtccaatcattaaatccagtgatttttcaaaatagcaaaagtaggtgtataagtttccaacatgtgtataatttgaagctgaggaatgactaagaatgaaagaaactcagtttgttccactcagtgggctgcatgtgcctatggagtttcacttgaagcaaactctctcgaggcaaacctgctggcctcaccacctcagaccccgcctgaatgttcatgggagagacttggtgttgggtccagttttgagcttttttgaagggacagggagagcctggaatatgacttcctttaaaaacaaaaggtagttgtaggcaaggtcgggttttttttttgtattttctagaataaaaatttatattttttttagagtatagacttgcttctccctggagggccacacagtgactcatctgactgcttctgcaagctggtgcatagatcatgccagaccagcttgggtctgctagttaagctgcaggagattgcatcataggatttactgcacgcgtctttaatggaagtgttgtcgccaacgtgaacttctttgcttatcaacctatccaagaagcatccacagcagggaacaaaaagtacctgatgggaacttgctggggaaactggcctcccagagtcactgaagttgccaacattgcattaggaaaaaaaaaaaaaaaagaggaggctaaaaatacaacaacaaaaaaaaggtggaaatgaacttttgtaaaatgtgagcaaaaccaaagcaatcttcggctgcggaataaacacagaggtggtgaaacaggaactagtaggtatacattttggccgtgtgctcaaaagtgaatttgcaattgccccttctctcccactcccaactggccctcccctcccccatccttttcttcatattgtatagaaattcttcaaacctcaaatactatatctaatatttttaaaaaatcatgatgttcttcggatgttaaaagtctaaatgggccgggcgtggtggctcatgcctataatcccagcacttagggaggccgaggcgggtggatcaccttaggtcgggagtttgagaccagcctgaccaacatgaagaaaccccatctctattaaaaatacaaaattagccggatgtggtggtccatgcctgtaatcccagctactcgggaggctgagtcaggagaatctcttgaacctgggacgcggaggttgcagtgagccgagattgcaccactgtactccagcctgggcaacaagggtgaaactctgtctcaaaaaaaaaaaaaaaaaaaacagtgtaaataaaggcacctatccttacggggcttgtgggagggttgagggaaggactacagtctccttttatcttgtgtttatctttagttttagcaaacattctataaggtatgttttgtatcatattcagccacatgaaaaacacaaatttgcatttcgattttgttcacaaaatttgggacacaagtcgtttatcacttttaacatcctgaagttgaactggtgcagcagtagtatcgttatgcttgttagccttcataatccttcctaagcaataaaatacccatgtggtcgaatcccaggacacgttgaattacaagctccaagtttttccgctgcagcgtatccaagtgtgcttggaaagaagaacaaaattaaacatgctatttagagctttcagggctaactagattttgatgttgtcattgtagcaaatagttctagagtgtggaagaagttgaaaatgtttttatgatacagagatttttattgtactgcatatttaatgaattattttataaattgctgttgtgaagcatttgtgaatgacctgcctcctagctttcaatgctattgcccaggctgacttttattgcaactgttttatgatacagttttgcattgtatgtgtttactttttaaagaagcatttcctgggaggtttctttttctggttatgaaaataatatatgcttatggggaaaaattggaaaatagaaacaagtatctagaagaaaaatcactcataattccagcaccctgttaatactttgtcttttcttacagtttctaatatgtgcatgcatagtatatcaatgtggttttacaaagagtgtgcaaattatgattctcttttttacatcattcatgccattctgcattttccacttaatactatactattggtactttaccaatcccttaagtattctcgtacatagcatttaaaggtgaaatctaccacctcctatttttaatatttatgttgttttgacttttcagtataataaatcatgtttatatgtaaaggtttttatctccggttattactgtagaatagatttctggaagtataagaacaggagacataaatatttttaggtcattgatacataatttgaaaatgactcctagaaagattttaacaatttgtgttctaccaacagtgtttgagggtgtctttttctcattgtctcaccagtaaatgacaattgtaatttgtttatttgcaaggcaaaaaaaaaaaaattgcaatttgatagttaaagagattaaacattttctcagatttttattttgtaatttgtatttctttttagtgaagctcttgcttttaccctggctactacctatgattgtgttatgttctggaggagagggaacttggctgagggggactttggggctgagatccagctgtgctcccctctggcgtctacccaaagttgtaccttccaacatttgtacagttgcaccctatgggctaacagaggcctgttcttatttttcatttattcaaaaataaattgagatactcatatttttatcattgacttgtgagagctctttttgcacctaaaactattaacccttttgttaaaatcctggctatcatttcaacttgttactttaatttcaagatttaaaaatgttcagaggtttaaatttttaaatgtcaaatattttggtcttatgtatgtgtgagtactttcattcctttcacatatggaaagcttgagattaatctatggattttactcattaaatttttttctttcattttaccctttttttagtgttatttaaaatattctataagaggtagttaatttatacttaaatgtaaaagtatcagaaaataacacttttctaccactcagagatgttaatactgttaacaatttgaaatctatatttttactcccttttctgtgcatgtatatacaattacactatgtatgaaaagataagatagtgatttatatactgtttagtaacattttttaaattgatacttattacagatagctttccatgacaataaatatttttaatggcccaatagttttacactgggtaaaaatatccaaattaaccatttctcctttgttgtatatttagatttttccctgttttttactactaaggtcaatacttgaatgattatccctttttttttttttttttttttttttagacaagagtcttactctgtcactcaggctggagtgcagtggtgcagtctcagctcactgcaacctccgtctcccgggttcaagcaattttcgtgccttagcctcttgaatctcttagctgagattacagatgtgtgccaccatgcccagctaatttttgtattttcagcaggaatattggggttttgctatgttggccaggctggtctcgaactcctggtctcaagagatccacccgccttgaactcccaaagtgcttggattacaggcgtgagccaccgtgcttggccttgaatgattatccttatcactaaattttgcacacttcttagttatttctttgaaatacattccaatgaatagaaattcctaatcaaaaggtacgcactttttgaagacatttggttcatatttccaaattgccatccatatattttctcctaattaacactcccaccaatggtgtatctgagagtagaattccacattccgtctctaacaatgcatattataatcctctctttagtctttgccaatttggtagattaaaaatggtacttgttctgaattgcatttctttccatttactcaggtttttttttttttttcatcacgggagagctttatctttgtttgctttaaatatatagagagtattttgagatcttgaaagtgcttagggttttgtacagagttcagctgtagagcatttatagtcagtaaaaaagagtttgttagcagagtgtggagccatgatctcttctctcagtacgtcattgggtctgagaacaatccccaattcacagccctcattcctttgccaatgaaagcagtgactcagatcagcatttaaagtcccctgatcaatgaccacaaattcaaggtacctagtcaagggtgagttcgggatgagttcaggatgaatacatccaaacgacaacaaatgagtggccaccacataagcctatttgactatatgatttatagagtgcctatagccagacacaaagctgggcaccaagctaaatgcagagaccccaaagatgagacagttaggtcaaggtttaagattgtaattagaaaaaacataatttaggaaaaaaaagcaattgcacatttaccttccattcttcagataattagttgtgggaaatgtggaggcaggtccagaatgaggcaagacagtgtgagtcttcaaattttgtacttttatttcgatttcaaaggtctgccactatttttcatttctcaggcttggtcaggctttcatcccttccctgtttgtttgttttcctttctttctttctttctctccttccttccttccttccttccttccttccttccttccttccttccttcctttctttctttctttttctttctttcttttctctctttctttctttcttcttgtgtgtgtgtgtgtgtgtgtgtgtgtgtgtgtgtgttttggcctattagtggttaagaaacactttggttgtttatctaaatagtagggctatttaaaatgaagtcacttttcaaagataaggctccagggccctgcaattaaacttcatattaaaaacctttcctagagctgcgggttaaaacatctgtcacatgcatgttgcttataatgttaaacataacatctgtggaaaatggcaatttatggaagtaatttggtacttttctaaactgagatacaacattaaaacatgtagggcaattaagaatttgtcttaaaagtgttgatggcattagagccagctgctttaatcaggagctcattatctggtttgtgaattattgaggctattttcttcaattttcctcttatggttagccttttagatatatatatattttttcctctacaaatcttgcagagagggcatgaacagaaaaattcagcttaattagtttggctactgattaaggggaaaacatacttaattctagtagaaggttaaacttactattttaaatacattcttagattatctaggatttcatgtgatccaagctatatcttctcctacttttttttacaaaatgttcttgaagctgtaaatataagaattgcttgattaggaagtcaaccacttgcaagcaacaaataatggttctcctccataaaacctataaagcacttaagtaaatgaagggtaatctttaagtaattggttgtattgcatatttttatttatttatttatttattttgagacagggtcttactctgttgcctagagcagagtgcagtggtgtgatttcggctcactgcagccttgacctcccaggcccagatgatcttcccacctcaacctcttgagtagctgtagctggaactacaggctcacaccaccatgcccagctgaattttgtattttttgtagagatggtgtttcaccatgttgcccaggctggtctcgaactcctgggctcgagtgatcagcccacctctgccacccaaagtggtgggattacaggcatgagccactgcaactagccatatttttaattttttgcaaactaactctataagtatttgtccatgagttttatgactttttcagtaaatattttaatgtcagcagagcattatatacagtggatttatcatcattgacttacatttaggttacatgtaggttgttgctagagttttcactattataaagtcataattctatacaaatccttaggcataaaatctttcaagatttttatattcctgaattaagggccagtgagcgaacaaaaaagattttttgatcatttcctagaatgaatttctacaagtagaatttcctagcttaaaatttacaaatattaaaaaatatatgttattacacaataactatcaatttagtgagaaaaaagataaacttcccttttatatttctctcctaccactttcaatagaactttaacaatttttgtggatattcttccagatgtttttctaggcattgtaccacatataagtgcgcatgcatttgagagttttaaaatttttcacttgtcggccgggcgtggtggctcatacctgtaatcccagtactttgggaggctgaggcaggtggattacttgaggccaggagtttgaggccagcctgcctggccaacatggcgaaaccccgtctctactaaaaatacaaaaaaattagccaggcatggtggtgcatgcctgtaatcccagccactcaggaggctgaggcaagagaatcgcttgaacctgggaggtggaggttgcagtgagtggagatcgtgccactgcactccggcctgggcaacagaacaagactccgtctcaaaaaaaaaaaattttttttcacttgccttattatttacaaaaataattttatacatgttgttttatgattttgatagttccatatcaataatacagtcacttcattttttgggttgcatgatatttcacatgaagaatatacaagtgactaaaggacaaattcatagaagcggaacctttggggcaaaggctaagcatattgaagcctttgatagattgctctccaaaaatgctacttgaatttataatccaatcaataatggtcaaatatgcttattgctgcctaccatcccagcagtgcatcttatcagtctttttcaacctccatctcctgggttcaagtgattcctcaagcgacgcctcaggctctcgagtagctgggactacaggcgtgtgccaccacacctggctaatttttgtatttttaatagagatggggttttgccatgttggccaagctggtcttgaactcctgacctggggatctgcccgttgccttggccttccaaagtactgggattataggcatgagccactgtgcccggcctcatcttgtttttagtttttttttttttaaatatcttctaggttttatgccttgcttaagaaggctttctctgctctaaaattaaatacagacaacttttcccccaagcaaatttctcctaaattttattctatcattctatttattttattcttttgtggtttcacatttccactaaaagctttgatccacctgaaatttattcaatgaagaaatgaggtgaggtctttacataattgtttttctagatggccaaactattctgccaatgccatttattaagcaatacataatatttccctcacttgtctgaaatccagcctttattatagattaaattcctttgtgtatttaagactattttttaactcttcagtgtgttacattgatctatttatgcctatgaagcaactatttatttaagtttatacaatgttttaatatctggaaatgttgtgccatctaattagtctactttaaaaaaatctctctggttattttgccttttttttttaatgcaaactggaatcagcttctgtagttcttaagaaaacctgatttgagagtgaggagaagggaagggattcattaaactttatgaataactttagtatagagttgatatcttattcacatcatgcattcctataaaaacaaatacgttttgctctatttatttaaatcatctttgatgttcctcagtatcattaaacattttcttcattagaacttgcacttttattatatttacttttaaaagtttatccaaaaatatgttatctttttggtactattttaagaagtatctttgcttattaaatatgttttattttatttacattttgagacacagtgtcactctgtcacccaggcccgagtgcggtggcatgatctcagctcactgcaacctccgcctcccgggttcaagcaattctccggcctcagccacccgagtagctgggattacaggtgtgcaccacgatgcctgactaatttttgtatttttagtagagacggggtttcaccatgttggccaggctgtgttttgatttcttaaatctttctcttttattacgctggtcgggattggcagaggatgctttcagtatttcactgttgagcataatggtgccgttggtttcttggctattgtcttagtgcaatcagactgctatagcaaagtactgggtggcttataaacaacagaaactgatgtctcaccgtttcgtaggctaaaggtctgagatccgggtgccagcacagaggggctctggtgaagtccttcttcttagctggctagtttcctggcctctccacctctaaatgccatcacattagggatagtatttcaacatatgaattttaggggtgtacaaacattcagtttattgcagctgttaataatttttatatttttttccccttgttttcttaatatagtgatatcaatcaataaatttcctaattttttttgagtagttttgcattcctgggataagccttacagggtcatgttgttgttgtagtagttgtttaaataataggttcagttcatcaatatttttctgaggattttatgtctgtattcatcacgatcccactacttactggggttgtggccttgggtaaattacttaatttctcttagtttctcatctataagaagggaataatagtgagagatcttgcctcccagcattatggtgaggtatataacccttagaacagtctgtgagacatggtaaacactcagtaaatgttctcattgttgttattgtaactgacacgggtctcctctttcctgggtgtgtgtatgtgtctctgtgtatgtgggtgcaggctatcgttgtgcttttttttttggagatggagttttgctcttgtcacctaggctggagtgcattggctcgatctcagctcactgcaacctccacctcctgggttcaaatgattctcctgtctcagcctccctagtagctgggattacaggtgcccgccaacacacccggctaatttttgtatttttagtaaagacaggggtttcaccatgttggccaggctggtctcaaactcctgacctcaggtgatcttcccaccttggcctcccaaagttctgggattacacacgtgagctatcgcgcctggccattgtgcattttgatatctgtgttataccagctgattttaatgagctgggaaactttccgtgctttattatgcgctgcaacaattcaaacaatgttgaaattatctattccttgaaggttgctgggcccatgaaagtccttgactaacctttcaatgtcttctatgctccctttgtgtatctgccgaggctttcacactaaggcgaagtttcagcatttatgttttacaggaagtcatcagcttcaggtctcccttatctcactgggtctgtcttctcaccctttcttcatcagattttacctctcctgctattctcttcaccccagccccactcttacacacatacacatacatttacatgctcatacccatatgtgcacacacacaggacagttcagtgcttttatgaatacttggctagaaaaactggagccacagtacattagacttacacagtgattcctgtggatagaactgggaccaataagtgaaaacaaagagactttgtctcagtttatgtatgtgttagtccagatgctccaagaagcagacaccatgatgaggttaaacatgcgaggatcttactaagggaatgcacctgtgagggaatggagtaggggagctacgcaagggaaggagagcccccagactctgaggcaagcccagcccaagggctggagaggtacccagcagtctaagaaagcttcctcaaagccctaggagtcctttattttgtgccatcagaggagtcctgcatctgccatggaatctgggtcagtacaacctctggctgggagcagcccgtgggaggcctggctgcagctgggcccatgggcagctgctctcccggcagctggagtgctgcaaggtgcctgctagtggctgccacaaagtgaaagtttcctaacaactcgagctttctgccagtggaatgaagagctttttcaggtagtgacttatttccagagatgtttaggcagacgaatgttaggatggggctctctgtttgagggagaaagtctcaacctttaagttccacttccatgctcacttttctctctcctcctcttctccttcctcctctactctctgtccttccccctttcttctcttcctccttgttctttcttcttctccttttttcttcttcctttcctttcctttctttcccttccttttcttctttccttcctttcctgcttcctcccttccttccccccttcattttccttccttccttccttccatccttccttccttccttcccttgttcctacctccctccctccctccttatagggatcactgcaatgaggtcttgaagtaggaaagagagaatagactcaactccctctctctttctctctctctgtctctctgcacacacacacacacacacacacacacacacacattaatattatatatgaggttggggtgtggccatcacttttcctacttcatcagcttttcttacaaatttaaaaaatgtcttatgatgcttacattccacagttcaacatcctcttcccctctcccagcctgagaatgtctttcttcccagagtcctgtctcattgttgacaagttcaggaactacaggtttacttaagtcacggattctgtccttgttacaatatagtgaggaaaaagaaaatgtaaaatgggaccaggaagcctatgtctctcctgccatttctgctctttccacccttcagagtctgttgaaaaccaagacgtgttgcatgctgggcactgcattttcatgtttcagtgagaggcagcttaagtgttttcacatggaagcctttctcccgtgaggcatgcccgcagtgcagaggttggatggggggtgatttccaggatcaaggagatagggtgtccaggaaagcctggggattgcacctaagaggtcagcttgaccttcctcttcccttcctctctggcgagtttcccattacaaactcctcctgtcttttgccagctgactggtgttggggccactgtagtctaccaaagacagcttaagaatattgcactttacaataatgttaatatcaagctctttcatagttactgtacgtagtgtgtcacaggcacccctctaagcactgtccatggataactcaattctcgaatgacatctgtgagggttcatgagaaaatgggagcgcaggttggctcagtagcttgtcagaggtcacagggctgacaggcagcagagatggaacttgaaccctgtggtctgactctgtggtctatgaatgtaacctcatgcttcactgcctgtttcctgaaaagggaccaaatggggttttgatctcctgcttctcaggaggtccggtgcccatttgcctactgcctccctccagaaacctggtggtttagtggttgacaactgacaaccacagactgcctctgggctgcagacatgttgcaaatgacccacataatattttcttaaaatataattttaatttttatcaaagaagtatatttagttcaaaatatcaaatcatacttaaaacaatctgtaaaaaatagtagtttcccctactcttctctctgattctgatctccagcaactgtactggatttctttttacctcttttccttttttttttttttttttttttgagacagggtctccctctgtggccaggctggagggagtgcaatggtgtgattatggcttactgcaacctcgatctcccaggctcaagggacactcccacctcagcttcccaagtagctgggactacaggcacatgccaccatgcccagctaatttgtaaagactgagtcttactatgttgctctggctggtctcaaactcatgagctcaggcaatcctcctgtcttggcctcccaaagtgctgggattacaggcatgagccaccgcacccggacctattacttcttgtttacctccatatgtctcagaaataaatactgctatttcttgatctatcattttacgtattatctattcacttccaaccatgaagataaaggtttggctctgccacaacccacttgcatgaatcaattgtttcttcacttattgccaccatctgaaacctgcttgcatggacttttaaggccagtgaaaagcctgggcatttgaaggtgtggcagggtggaaaactcacataccttggttaaatgttctggatcaagttcactccatatctgcaggacagcatcatcctgttcctgtggtgggatgcctttgggttttaggtcagtcctctgcttgatcatggagtcctggggcctctgcttcgattgaggaccgtcgctttggctcttcacatctcccctttccaccttcacatctcctagtcactagggctaaaagtaaagggaagctggggatactggagccatgtcaataactcacagtggaaaactcttatggaacttcatccggggctttcagcagtcttctccctgcccccttcccagttttccttccttcaaagggtcttactgcatttatctcccattttgttttcagttttgctaagttcctattctctgctgaggatgattcatggacgcctccttccactcagcctaacccctctggatggaccagtacccccaggacaacaaagagtgcagggaaagtgtccaggcagctgccacaataacattaagcaagccactaatggccaccagcgcaaagggctgtgctgtcagtctagtggactctttctgctaacaaaatcaggctgcattttgtatttgattcagctctgcaagacactttccttgggcaatattccaacagttgttggggagtctgtgtagttaaaaaaattctcactttcctcagagacaatgtagacaagatgaggctttcatagagcatcagacaatataaaaagtacaacactgacctttgttttttcttcagactttcatgtccgtttgcagtcatttgatgcaagcatcacaaatgtaattaagcagctatagttcctagaaagctttaaggctttatgcttcttgcaaccctacctgactttctaacaggattgcttggctagcacctgcttgatatgagtgaacctgggagagagaactccacatttttgtgcagcagtgacaccagatagaagagacaggcaactcgggctcaccagcacctcgcttattcccactacatcacatggccagcaggagagcccatgtaactgcagggttctagaagttctagagctttcaggctccacacactcttccctcctgtaacacagctcacccttctgatctgagacttcgtccacagtatagcagccttttcctaaactcttctgtgaatcttcccccatatcacatacttccctgcctctaataatcatatcctccacctccttgtgactttccctattagaaaatcattaatccagcctggtcaacgtggcaaaaacccgtttctacaaaaaatgcaaaaaattagccgggcgtgatggtgcatgcacctgtaatcccagctacttgggaggctgaggtaggagaatcacttgaggcctggagatcgaggctgcagtgagctgtgattgtgccactgcactctggcctgggcagcagagtgagaccgtgtctcaaagaaaggaaaaaataaataaaatccctagtatagggatgggcagccatttccagggtaccaggagtagtacccatacaggatcacctcctcacttgtaggaactccacttgacttctggtgtgtttggttacaagaatataatacaaccattctgcagtgcctggtcttcagctatttttgccattgcctccctgctcatcacccatgccacatgttttctttctatgcactgatcaatgtcccttcaacagaacgattcactccaagtcaatgagttagctctgcaagtatgagatcgttctgtgctgcttctcttttctcccatactagaaagacccccaagttctttccatctctgctaaagtctgaaagtggaggtaatgacatctcaaagagttttctaaggtgttgtctactcctttgggcttctgtccatgttgggaggatattagcaagcactctacgtaatttgttgatttaacttctgtctcctgtgctgctgtttgtgaggcacattggtatgaaaatcttccatttcccccactggcctcgtctgttggaatgtatgacatggggctgtgcagttgacaaatttttgagatgtctgcacactcacatacacacatacacaatttctgtccatttttgttaggttttatgggagagtgggtttgtaatgcagccctactctaatgcctttcacctgaaatctctactcatttttaggtgtttcaagttttgtagtcaaagttatcactttttcttcattgatttttttttttttaattttaagagatagggtcttgctatgttgcccaggctgatcttgaactcctggcctcaagtaatcctcccgccttggcttcccaaaagtgctggaattacagctgtgagccactgtacttggcccttcattgattcttctactgtttttatgtttacatagctattcccaaatccaaggtcagattaaatattcatcacttattacttgaatttttttttaaagggtcttgctctgttacccaggctggagtccagtggtgtgatcatagctcactgcagcctcagactcctgggtttaagcaatcctcctgcctcaccgcagagaagctgggattacaggtgtgccaccatgaccagctttttttttttttttttgtatggttgcatatgaaacaacaaaaaacaattgtctggaatttatttaaatcatctcaagtaaaggtttaatttaaataagctaacatacaaatgaccttcatccacatcacacacaccccaccctaaccctaagtgtattgcaaacacacatatgtacgtatatatgaagatatatgtatatgtgcatgtatattcacataacatatgcatatacagataaaaggctttctcccccatctactcactgctaataatcaatttaaaaatgagaatattttaaaatccatgcacagatccaggactagaggacttgagtgcttataattattgtctaattattgaaaaacaaataattagttcttattttcctaatagttccattagaagcccatctaaattttaatcaggcaaactcaagtttaattggcttttattatttccagcattttaattttagatcaaacttatcataaagtcaatttgtttgccctatctccttttctagaagggacatcttgtgtaagcaacatattttgtatggattttatacagactttcccattactttcttgtggaacacttgtaagtttctaatctattctcttagctttaaagacagaggtggagtccaacatttctaccatagagtatctctgttacacaactttggaggagattatagactgattcacgtagtatgtgaggttacaaattgagtgagacataatacccacttgcacaaagatgtaaaatttaagacagttatctgaataaagaaaatggcagaaaataatgactgccttgaaataaagaaaagggctacagaatcttaaggaagaccttataaagatgatttttctcattatgcagaaagtaatccttagtttatccttcctgggccatttcagtaactgccttgttggtctcctacaacctcttttctgttcaatcccacgcagcagacagggtgatcttttaaaggtcacaagagaacatcttgtgtttttaaaagatcaccctctgtatggattgaacagaaaagagtttgatcaagatgttcccttcctaaagacctcacatgagtaccctgtgcacttagcatacaaaatgtaaaatcctaaaagtgaattactaatcctggcataatctggcctctgcttatctcttaagtttcatcagacactgccctcttccttcttgaaacattatggtccagctatactgcccttcatttagtccttcgattgggagaagttccaacctgcctcagggaccttgcacatgctgttcctgtaatgacattccttcctcttttccttgagaaattcctcctccttctgcaagtctcaatttgtgtttgaatactttcacagtaaccccatcctaagcagccccatctcaatctaaattagatcctccatcagtctgagttcttcgtgatgaataatctaagataggattactcatgcaatacttgtattaggggaaccacctgtgagaaaaaaatacagagggagctggcaaagtgggggaactgtcagacaacaatgtgagtctgacttggagtgaagaagagagggaggaaatgttgagcagaagcttccagggctgctgtgcagtctaaagaagatgcagcagggccatggggtgggggtgagggtctttgagtcagagccagccatcagaggagtccctgttccccaagaatgtgccgctttggtagtcctaccacacatgatcgctggctggaagcagcccatggcgaagtgtggtctccacacaaatgtggtgataaatttcagtgacgggcaacaggatctttggcccatgatgctttctgtggttggaggtgttgtgaggtgctcctggctaccacatggtccccatgatattttctcttgtagcaccctgtacttttcttcattaacactcgtcacatctgcagttgtatattcttctgtcagagcttcaccagggcagagactgggtctgtctttttcatcgctgtatcccagtactcaaagcagtaccagctcacagtaggtgctcagttaagacctgtcgaatgaatgtgatcttaactttcatggtttttaagtagcagtgtttccgttatttaacaagacataacttccatgataagattttttattacatctttatacttggacttatatacctagggattagggccgattataaaaaaaagttttaaaaatgtaattttttgttagcttttagagaacgctgtggtaataagctgacttgaactaatcagttcgtagatgaaatgctccttaataggagagactgtgtctggcttggtcaacactgccccctgcacctagctcagagcctgtagtacagcaggagctcaataaaggtttgttcaatgaactgagtgggaaatttagggcaggggtgtgaatggaggaagaaaactttggtaggaagctgtttgtaattttggttttgtcctcatggaagagtgcttatatgtttgcaaagcactaaagattttttttaaatatatatttttattatactttaagttctagggtacatggcccaagtgtgtgatgttccccttcctggcaaaggactaatgattaaccaacagtatgcagttggttcttcatatccaaggttccaaaactgtgggtctaaccagctgtatttcaaagatagtcagaaaaaaaataataacaataataacaataaaaataatacaaatgaaaacaatataacaactattttcctagcatttacattgtattaggtattataagtaatctagaggtgatctaaagtatatagtaggatgtgcatgggttatatacctaaaataccaggccattttatatacgacacttgagcatctgtgggcctggaaccaatcccctgtggatatgtgtcctccagcaatttgtccttgaattatttcagtgttaacaaaataactgtgtaatcccagggaaatggtataacctctctggacttcagttttcctatttgtaaaatgagaagtttggagtggatgatcatgaagatttctttgcagcacttgtgtgctacaggtctattcataaacacaaaaatgagtacctcaggccattgccaagccttacaaatacaagtatgtttatacatatacatatacatatatatatatacacacacatatacatatatatatataaacatctatatctgagttgttttggaattgaagttgcatgaaatataacttgcttttttttttaactttaatttctaaataggccttctgttcatatactgattgggaccacaaagtagaaatctattattctttgtttctttttttttttagatggaatctcgctctgtcacccaggctggagtgcagtggtgcgatttctgctcactgcaacctccgcctccctggttcaagtgattctcgtgtctcagcctcctgagtagctgggattacaggcacccgccaccatgccccgctaattttttttttatttttcgtaaagatgggtttcaccacattgcccaggctggtctcaaactcctggcctcaagtgatccacccacctcggcctcccaaagtgctgggattacagacttaagccactgcgcccagccaacatctattattcttacaaggaatgaaaggggattttttttttttccatacaggtgaagagagaaaggtgtacaataaaaacctctttccttggagaggggaactgcataaagatgactgtgaccatgcttttatgtatgaagcagaggaaaggaaatcaagaatgttggatgctatggagagaaaacacccaaaattattagttccccactaccacccgtcccagcttgtttcttcagtccagtacttttatatccactgaaagtttttttttttttaaggggggtggggtctcactgtgtcacccaggctggagtgtggtggcacatcacggctcactgcaacctcaatctccaggcctcaagtgatccttccacctcagcctcccaagtagctgggactacaagcatgcaccaccatgtgtggctaattttttaaattattatttgtaaagatgggtttttgccatgttgtctgcttggtcttgaattcctgggctcaaacgatcctcccacctcagcctctcaaaatgttagaattacaagtgtgagccactggcccagccttcttttccatttatattcagttgcataagctatatatatatttaaaaccactaaataaagacaaatcacgcaccatcccacctccaaaagttacttgttttgctttcttctggttcataaccttatttgttttgactcacatacttattggtttaacgcagttgctaccataatcaccaatcatcaggtgcgtaatagaatgccccaccatttggatttgtcttatgttttctcttcaagatgtgcctctctcagggtataacttggttaaggtagtagctgccaggtttctgcactgaaaaatcactgtttttctctttccaaataattgaatcactttggattgtttatatttttccagaaatgttcccattttgtctgttttcaaatattagcataaagtgattcacaaaattgtcttttttcagaagagaattgtcacatctaaaattgtcttccttttctaatatttgattatctttgccagtttgttagttttctttgccatttcaaagaaccaattttcatcttaaattgtcctttctgtcaagtctttacttcgttaatttgttttatctttattacatccatctttctaagttcttcaggttaattcttttatttttttctaacacgttacatgcttagctctttaactttttagcctttgttcccatctaacataagcagttaaagtatgaaatttgcctctaagtgctgatttatctatatcccacaacatatagtattttatcatggagttctaattaaaaaaaaagcttcctttaagagctgttctttgacctgtgaatatttagaaaactatgttataatttcaaaacatatagtctttaaatttcatcttctttgctgttggtttaaaatttaactatgttgtggtcagagaatttggtttgtattataagagttctttgaaatgggtagagtcttgcttaatggcctgatattaggtcagttttcttatgtatcatgggtacttaaaaaataatactggctttaaaaaaaaaatccagtttgaaagtatttatcttttgaaggtagggttaacccattttcatatattataattgctgatatatagagtcttgttttttctatgccataccattatttttatttttgtttatttttgttgcattgatcaacatatctttttttttgagatggagttttgctcttgttgcccaggctggagtgcaatggcgcgatctcggctcaccacaacctccgcctcccaggttcaagcgattctcctgcctcagcttcctgcgtagctgggattacaggcactggccaccaggcccagctaatttttgtatttttagtagagacagggtttcatcatgttggtcaggctggtctcgaactcctgacctcaggtgatctgcctgccttggcctcccaaagtgctggaattacaggtgtgagccactgtgcctggctaatatatcttttttcattatttttctctggttattttctagagcagtgcttctcaaatttttgttctcagaatttctttaatactcttaaattattgaagtcccagaagagtttgtatttatgtgggttatatctattgatatatatcatatgaaaaattaaagacagtaaattttaaaaaatacttatttatggctcaattaaaataataattgtaaaccatgtgatagttataaagcatattaacatattgttttatttcattattatgctttttaaccttttttttttctttttgagatgatatcttgatatattgcccaggctggtcttgaattcctggattcaagccatcttcatgcctcagcctcccaagtagctgggattccaggtgtgtaccaccacacccggcttgaaataacatttttgaaatgaaacataactggttgggtgtggtggctcatgcctgtaatcccagcagtttgggaggccgaggtgggtggatcacttgaggtcaggagtttgagaccagcctggccaacatggtaaaaccccacctctacaaaaattaccaaaaattagctgggtgtggtggcacatgtctgtaatcccagctactcgggaggctgaggcagaatggcttgaacccaggaggtggaggttacagtgagctgagatcatgcccctgcactccagctgggcaagagagcaagactctgtttcagaaaagtaaaacccaaactaaaattttcaaaacatacgaatttaatgagaagagtagtgttatttcacatttttgcaactttctttaatgcctggcttagcagatgactgctagattctcacatctgcctcttcattcaatctattacaaaatgttattttggttagagaatcctgcttcacactgatagttggaaaaggaaaatatattttcatataactatatattctttgatacctcaccaaaattcaaaactggtagtttttaaaggttaattgcaatgtggaaactgaaatcatacactgaactttctctgttacattaaaatctataggcttgtcttgcactttgaatagaacttatattgtgtgttattctataacatcatgcattggcatttggaattattggttgactgagttatttggattttccaaatgttaatgtgcttcatgatacattagcaaaaaattatatccattaacctcatcagaaaataaagtactagaaagttatcagtagtggtggatgcaagtttccaaaaattttctttttttcctttttttttttttttttttttgcttgaaagctcaaattttaccattggcaacaaatactgtctgttgttttctgtgaagtgatagactctcgcttggtttatttttgagaagacatcagccaaacactcaagtctgaacacgtagtttgtcaatatgtcattctttcaggtaaaaatggaatcccttaaaaaaagcagctagtttcaactcctactcaaagcactgcacgagtgcttttccttgaggcaattgctgtatttcggtatgcagtcaaagtgctttacacgtacttcctgctttgtcacacagaatattaaaaagattggtacccaaagtgtgaggttaataaaattaatattctatactgcttcatgaaggacattctcaagtgaaactagcacgtatttgcttgtttgtttgcttgttttgtttttattgtatgtgatgataaaaatataatacctcaagtatagtttaatgccgctgtctttattcatgtcagaagcttgaacttttgcccaacattagttttataccattactacaaatgtcaacagagggaataaggcacatatatctcagtattattagggaaatagttttaaactcataaacccttgaaagtatctaagtgatttctctaggtgtctgcacaccatactatggaaattgttgctctttaatttctatatcctatctttatcctagtaattgttacccttgaacttttaataagcataaacttatcttttctatcaatatcaggagttaaccattatgtattactctccttacgtacaaagcaaaatcaacatgctttttattttacctcattattacataaaaaatttttttgtagagacagagtcttgctttgttgcccaggctggtctcaaactcctggcctcaagcaatcctcccaccttggcctcccaaagcactggaattatagctatgagccactgtgctgggcccactacaccttttaaacaactcttctcctgtcacctctcaggtgttttattttagtttggtattatatttaagaattctttcttagtggcatacatttcatttctgtgatcagaaatcagctacaattaatattttactgacttatttgatattctctgatggctgtatcaattttcttctttatccatgcatctctttctttactttggctgaagggataaagttttcaaaagggatatatgagtggaatcgtttttgaatcttttcacgactaaacaggtattttattttgccatcacactttattgatcttttgctctgtttagactttcatgttcaaatccctttcctcttgtctagcagcatttagtgatatggatgagaagtttattggctggcagtttctagttctgttctgttgaatgttacttaagttttttcccagtatttgtagcatttttaaatttaatcttcaacccaaaaatgtcaccaggatatgaatagaagtgccactttttcattattctttccaacacttcggtgccttgccaatactcaagttttttttcagctgtaagacattattattctactctattctagtcttcttttgtgtatttgtttcttccctttcatcctcttcactgctttcttctgtaactcttgttaaattgaactttatacctgtaatcatcctgcataccttttaactttgtcttatgattttttgtttgtttaaaaactggacaatgctttgattgctcagtttattaattcattttgtgctgtctttcctattcagtcctcgtacaaacttttatttttattctaaaaatcatgtaacttgttttgtggttcttggtttctagtagcctgtgcttgtgttgtaggtgcagtagcttctttttacccccgtctcttttcagattttttttttttttaactaacaagcaaaaaatcaaaaacaaaaacacaacagctttaagttggaacatcaataagtcaaattgctgctggagttcccacatgtagctggggaacatgtgccctcattgcaaggcaggaggtaggtacgtgactgtgcatttaggtatatttgtgaccgagaagaatcacagaaatggaaaccactggagaacagaaagcagcatgaacttttcagcaggcaatcccatagcgcgaggctcttttcctattctttgcctctgtatcctctgtgttccttctggttccagctgaaccagtgataatcccaaatcagtccttcctccttttcagtttctcatcatcttcagactttctggagattgaagagccattcaaaccaaatctttgagctctttcctttagcttatccaggttcatgataggtttgttgttagatgacagaccttttgttgaaactgaagaagtcccaaacctagctgcccgggcagttttcttactttacaagctcacgggtacatggacttgttcagccctcttctgcattctctctccctgtggtatttcagatgtaatttttaccactttcttctctgcttccacgtcaacagttttttcagggagttcttcctctttgacagggatttctatggggctttgtttcttcttcctctgtttcatctcccagtacatcttcatttgcctcttcagcatgccctgaaaaatatgcctggagccagcactttgggaggccaaggtgggcggatcatgaggtcaggagttcgagaccagcctggccaacatagtgaaaccccatctctactaaaaatgcaaaaattagcctggcatggtggcatgtgcttgtagtcccagctactcgggagactgaggcaggataatcgcttgaacccgggaggcggaggttgtggtgagccaagattgaaccactgcactccagcctgggcaacagagtaagactccctctcaaaaaaaaaaaaaaagtgcctggagccttttgatggcatcttgtttcatttccttggtctccaaaccacaaggaagacattcttgctttagttcagcaatcttccacttatggtgcaccaccgtcttggtcgccatcttgttacccctcactccagtaggcccccacccactgcctctcaagtatcttccttttaacattattttctgtatttagcattaattattttcctcataaataaccttttttgctcatcttggggcttctcttttactcatgtaaggtttccttaaatttccttacattctcagttctcatattaaaagtgaagagttagactgaagacctttcagccctggcagggggccgctctcttgatggaagctctggccacaggctctgaggatgcctggagggtcctttgtatatatacaagtgaggcccagcagggtaagctgggggttagacacacgaaaggactttcctgttgctttaagctcatgttttttgtctgttgcctttgtggcagtttgaagttactctaggtgttttaccatgttatttctctctctggccctaggaaccccaaaggcggactcctctgtatttaagaagccaactaatgttgtagttagttccattgggcacactgtacaggaactggcttagccataggcactgaagacttgagttttccaagctcagagagaaaaacagtcctcaagcacacattaacccctcctgcaccaaaggtggggtgcagccttctcaactctggcttttcctttattccagtctcttctgctttctatcccctagaattgcattaacatttcttttccatattggctgtaaacattagaggtaaacccatgaaatggtgtttaaatggaaatcggtcctgcaggcttgtaaagtgcttttgtgctttctctcttactgctagagattcaactgctgtaatttcctcagaaaaactgactctctctttaattctcaaagctaatttggttataacataattctttcctttaaaaatcatatttttgtttgctcttaaatataatagttcccttatttcccaattctttaatctatatttctgttacatgaatcatttgctatcatttttctgcaggacatttaaaaatagatgacctctagttgtattatactaaagataaattaggacttgctacccatcaccccattcaattcattcaataaatatgtgttgcctgctttcctgcctgatatgtactctctagattgttccaggaccttggaattctacaaataatgtaaacttgttgtctttcttcagggagcttacaaactccgcttttgcataatttctctattactctgaatttggatatcatcctctgttatattggtcttttgtatcctgtctgtttatgagttttcccttttcaactaacttttttctaattgtgaaaatagagcatggtcaagagtaggaaatagagaaggatgcataagaactcaggctccgaggttgtgcgtggtggctcacacctgtaatcccagcactttgggatgctgaagcaggtggatcacttgagctcagaagtccaagaccagcctgggcaatgtagggagaccttgtctctacaaaaataaaaaaattagtcaggcatgatggaccactctggaggctgaggtgggaggatcacttgagcctgggaggttcaggttgcagtgagccatgattgtgccactgcactcctctagccttctagcctggaggacagagcaagaccttatctcaaaaaaaaaaaaaaaaaagagaactcaggcacttggatgcaatgctgatctaatgctgactgctacctgaacctgggcaagttacttaacactctattctcaatttactcatctgtatgaagggcatgatatccatatctgactctaagtttattattaacataacgaatacatgagttaacccatgtgaggggcttagaacattagctggcatatagtggatgctcaataagtagtatgatggtattgttgaagattacttgacaagtcaaaaagtagaaaggagaaaataaaaattcacctataatcattgtcaacattttagattttgatttacacacacacacacaccacacacacacactaaccaattttagtcatttcataagttgccatctctacaaattctctccatttttaaattcttttcttgtcctcttcctttcactttctattgttatatccttctcattgtttctagagctcagtgggttacctttcctgtagctctttagttttatttccaatccttttacttaataggtgaagtaagagcatgcttagggcactacaaagctggggctcccgagagggggtgggggagagagagagagagaccatgcttcaagtagtagatcagtatattttgcaatcagtatctaaaacgaaaccatcttaatttcaatggacataaattttgttttacagtttattgtttttaaaaactatgcactttatgtggtggagggcattataatattttcactgaattaattgaatcttctctttcccgagcatagccatctttaacgtgaagctatcaatatcgtcctgggcttatggattcatttcacttctaacatggaaagtatctgttatctcttgtgatttgcctctagcaagcactaaaaggagggatattgctgaaagcaactagcagtcaaacaatcatttgtggcatttaaattgtgacattaaccctgggtaggaaaattggttcattaatttccatttgaaagtcttattctgttaatgggaaaaaggccaatattccaaaagaaaaaagtagttatcacattttgaacctttgctctttcatttttggtctgaatatggtcatttttctgctagggagatgaagtgattacttaagtcagtaatcagccgtagtgaatcagctacaagaaaatgagaccaatctcaagtgctcaagactcagaatataaactatttagagagtagaattcagctggccgcggtggctcatgcctgttatcccagcactttaggaggccaaggtgggcggatcacgaggtcaggagttcaagactagcctgaccaacatggtgaaaccctgtctctactaaaaatacaaaaattagctgggcgtggtggcatgcacctgcaatcccagctactcggcgggggggctgaggcaggagaattgcttgaacctgggaggtgaaggttgcagtgagccgagatcatgccactgcactccagcctgggggacagagcgagactccatctcacaaaaaaaaaaaaaagagagagtagaattcatgtgctctcaagataaaggctatgcttgtgtgtgtgtgtgagagagagatagagagagaaagagaaagaggtgggggagaggacagttgagacagagtacatagcatgaaatcctggaaattatataaatgtttcattacttcttcttaaggaaagggtagtgggtagaaatttctttttgccccaagtcaagtcagttttgggaatgatggacaacaggtagacgaaaggaattcttaatatcaggcctttgctgattgaagtttagccttcccctccagttacctcaggtccaaatgtaaatatccttggtttcctaggtcacatttaaggagaatagaagaatgaatctccacttttttttttaaatttgaaggggagagttaagagggaggagaaagatagttcaaattggattgatgcttattaaattaaatttataattatgcttcctaaaatcaaggcaacttacatttgcatagcactttatagctcaaaaccaactttacaaatatgctgtgaattgattttatgaaaacctgaagaatgcagctcctcccattctcttattaatattttaagccataacttttacttcaattcctcaatggcaatggagcttttattcattcatttaacagatgttaattgactaccaagtatgtcgcaggcactgttcaaggtgcttgtgatatattcatgaacaaaacaaccccagccctgtggaacttaggttctagcggaggtagacacacaaggaacattgaccataataaaaaagtaagttacattgtgtttaaggaggtgatggctgttatggaaaaaagaaagagtcgagagctgggtaagggagatagaaagttttaaaggaattggaaattccagcatgggtggaagcaggttgctgcattaaatagggtagtcaggttaagtctcattaaggtgagatttggacaaaagcttaaaggagatgagagagctagccttaggtatttgggggaagaacattctgggaagatgaaacagctgaagtcaaggccttaaggtgggaccagtgcagcaagatgagaatgagtgagaaggagagtatggggagaatagactgtagaagtaagggacccatgatcctgggggacctggtaggtcattgtaacaaccatcacttctattctaaaggaaaaggggagtcattacagaattgagcacgagagggcatgatgtgattttgtttcaatgggatttctctagatgctgttttgttgagaatagactggaaaggagggagcgggtaatcataaaagcagggaaacctattaggaaactgtattcattttctattcctgtgtaacatactatctcaaaacttagcagctaaactagcatacattcatgatctcatgcactttctgaggaatctgggagcagcttagctgtgaggttccggctcagggtttcataaagtggcagtcaagttgtcatctgggttcataattgattcaagacttgactcagacaggagagtctactaggctcactcacctggttgtgggcagccctcagttcctcaccggctgtttgtcaaggcttcagttccttgccaaaatatgccatgatatggtagtttgctagcacaaggggatggggtgggagtaggggagagacttacaaagatggaagctgcagagttttattatctaactctgtggtaatataatatcacttctgctatgtcctattggtcatatagaccaaccctggtccagtgtgggagaggactcacgagggtgtgaattctaggagtcaaggatcaatgagggccatatgggaggctggctaccacagagacagtgcaataatccaagtgcaagatgatggtggcttggaccagggtgctagcagtggaggtagtgagaagtggtcagagtctggatatattttgaaaatagaaccaatgggattttctaatgaagtggatgtaagaaaatgaggaatcaagtatgacttcaagtattgcaactagaagggtagagttttcaccaacagagacaggaaaggctgagggcagataaggatttaaagtgttgtgtggtggtgattgaagagcagatgtttggcttccctatattatttatcttgctcttctctaatcctcatcacggcccaattagagggcactactctgtgtctagtgctctgccaggtacatcacatgcatttctctcatttaatttatcagctctttcacaaatgcgaaagctaagatccagacaggttgaatcacttgttctatgtgatagggctggtaaagttctatatgatagggatttgactcaacgaccatctcctgtggtcacattctggatgtattttgtagctgtgttaccctggacaacttagttaacctttgtgtgtgttaacattttctacaaacaatctgacacactttagatgtaagagcctaaggccagtctgagtgtgtaggtgtgttaatttactcagggagatgtgtgtgtgtgtgtgaatgcacttggggatgaagtagagtttcgtgcttctagaagaaagccaaagactaagctagagaagaaggttttccagatcccagggtgaagccaggctgttgtgaatccaaggcaggacaaaggccagtgactgtgcatgggagctgccgggctttttatttgatggaatgccactgttttggtgtcattcttggatctgacagctcagtgacagttttcctttttctctttcttcttttttcttttttttgagacagagttcactctgttgcccaggctggagtgcagtggcttgatcttggctcactacagcctccgcctcccaggttcaagcaattttcctgcctcagcctcccaagtagctgggattacaggcgcgcaccaccacacctggctaattttttgtatttttagtagagacagggtttcaccaagttggccaggctggtctcgaactcctgacctcaggtgatccacccgccttggcctcccaaagtgctgggattacaggcatgagccagtgcacctggccttcagtgacagttttctttgcatagtcagtcatctttgcatgatacaaattaaatggtagattatgtaataaataacacataggctgtgaaaatttttagcaaagggaggccctgaaagattaaaatagggaaaatcctggaaaattttctggaggatgggatgttgcagctggactttgataagagcacaatttagacagagaagcaggaagggaatttcaggcaggggaacagtctgagcaaaggtatagaagtaagaatgggcatctttaggaagctgcagagaaaatggcttaattccttaaattaaataagtacaaggaagtaaattttgaaaagtaggttggaaccagataatggaagaccttaaatgtcagacagaggattttggacttgatgttataggcagtaaagagtcatagtatactctgaaaaagttatgttctatgaagattatttcactagccttcaatatggatcaaagaggggaaagttgaaggcatgaagagataagactggagctgtaataataaatacggtgattgacttcatgtaagggataaagagaaagaataatagctagcatgtatgcagcttttatagtgtgtcagtatatttaattctgacaaaaatagtaggaagtgaatatcattattctgtctacattgggatacttctccattttataggtgaagaaactgatacacagaaaggttaactaagtaatccagggtaacacagccaataagtggtgcagccaagatttgcacccaggcagtctggcttcagagtctgaatattaaaacggtacataaggttcagccttgagtgactggggacagataatgatgaggagtgcctggttgagaactgatgattagcttagtgttgaagacattgattttaaattgacagcaagattctttttttctttttaactttcattttacattcaggggtacatgtgcaggtctgttatataggtaaactcatgtcacaagagtttgatgtacagcttatttcatcacccaggtactaagcctagtacccaatagtcattttttatgctcctcttcctcccctcccctcaccccccgccctctggtaggcaccagtgtctgttgtttgtctctttgagtccatttgttctcatcatttggctcccacttataagtgagaacatgcagtatttggttttctattcctgtgttagtttaaggataataacctctggctccatccatgttcctgcaaaggacatgatcttgttcttttttatggctgcatagtattccatgatgtatatgtaccacattttctttatccattcttctattgatgggcatttaggttgattccatgacaaaaggattctatgtagaaatacagaaatggttctcaggtactatatatctgttagtcattaaagtagagcaatgaaagctgtaagaacaatgatgtagagaaataagaaaaataccaaggaatggtcagagttaaagaaagaagaggagaacaggtagaacagaaattaggaaagaatggttggctaaagagaagaaccaccttagcatagtgtctcacaagtaaagcaggattttacaaaagcaaaaaaatggccaagaaaattcaaggagttaagacctgaaaacagtccattggactttgagctggttattagtagaattagttctatggagcgtactactactatctaactattatctgtggaagatctataatgcaccaagcacttcaaatgtaaatatctgagtgattcctttagaataatattataaaatatcatgatacagaggaagaaatggaagctcaaagagacacctgctcatcaaggagatgagcaactcatctaaattcactcattgatagagctgagatttaaaccgaagttacccaactccaaaagcatcctccccctatatcaagacaaaaattccataaaacacaaacaaaccaatgtccttgtagaaatggatatgagaagttgattaaaagtaataatttgtgtgcatacttcaccatcctaattttttcctttgttattttcttttttaaaaaaatttcttttctttcctttgtttttgttctctacaaacccttgtgtctagggctgattttcaacagatcacagtgagggagctgccctgttacataagaagccctgacccggaagcagatcatccactaatggtttagaacggggtttcccatgaacatgcattgcgtgacgggcactgtcctagtttttgttttggatcccaagtgtctttataagtggatttgtgtctggatctgttgaccataactgcacatatctttagacggggaaaatgttatgtgttaagcttcctctgcttctccccagcaaagcattcctgcatttgactgctattatactcaggggagcatggagggggctgtccaggcagaatgatctggagccttggagactggctggtcttggtctcagtggcacagctgcatggtccctttcatcacttcagctgatgactcatctctcagccatctcccagcatccacacagagaagtcatggattaaagaaaacgaacaagaaaaaaaaaaagttgtctgtgtgacatggccttagccttgctgtgattgctctggcgatccccaaaattttcctccaaagcaggaccttgggatcgagtttacagttgctgtttaccgttctgtgtttgaggctacccaggacatagcccacctaaagcttcacaaaggatatttaagaagcggaccagagcagaattagaattgcccttccaaaagagcaatgataaaacagcttcagagtgttcctaactgtggtgaaagttgttctgtgaaactttcctttctttacaagtctacatttttgctcagtgtaccagagagattattctgtttttattaaattaaacttcattcaacagtgctgtgtaccagagagattataatttgtgaagagaaaaccaaattcattgcatagttaaagggaagagcataaaaggcccctgtggctgccaagaatgtgaaaagaaacagctaataatgttgtgatttcccaaaatactttttccactgatcacgtaaggattcatcaacaatttcattttaggggaaaggctgatggcgctcttaaatttatgagcaaagctttgtgctaggaaagatgaaatcagcaagctaagagactcagcaggagggagtagggatttcaagaaggaagatttagggaaaaatccctccagtgaatcaggacacatcttagtgtaaatcgagacttggctctgatccttcagcttggtgcttcctgctaaacttttggaatttagccagtgttataattaacacctcaccccacctgcactcctccacagcaatgtgtgcgtctctgaggcatgacagagtaaaatcctcatccttttcaatggtgtgatcactcccaataacatgaagtccttcctgcaggactgggcatttttggaagtgtgcatgcctgtgccttcatgggcaacgactgaggttccaaatcctctgttttactctccaagtggaggctgcagaccaggcaccgagggtggccccaactaatcaatcgtggggggccggtgacattgtcacagccagggcccaccacctctgctaccttcttagttctttctggaggcctcattatagaacctcaggagtccaccagcatatcctgtctccaaatccaaccctgcatatttagaagttttctacatggaaatgctattttatcattagattaaatatgtaaatttttctaatggactctccaaaataaatacaaatatgctccttttgtaagaaaatcccattattctgcactaccaaagtatccttcactttaaaaagcatttcccacatctcaccatctcagcattgaccagcacattcctacctatgcttcagctttgtttagaaatgttggccccttatttgtcctgtcattaggttagtcccctctgtcgtgtgccctcacagcaccacccatgtcctttctcacacgcatggccctgtgatagtgatattctctctctctggcaggtacgtggggtaaagaacattatgtcacgtgccactccatccttaacaaccagcacaatgtctggcaactattgggctctcaataaatatttaaagaatattgttgaatgaacaacttcaatttcccttcaattaatgattatctttaagacttttaaattatactcaactttaccaaaaattgatatatccacaaattttatgggaacataaaactgtgcagtgatagtcatacctgttatttgcaaagtactatgcagtttgcagaatcctattttatcaattattttatttgatcttcataagcacattgtaaggtaagtaggcactgaattatttaagaaagtgaacgttagacattacccagcttctcaccactgtaaatggtgaacaaatacttacttctaaggcctatactacttcatgtcaccacagtgcctaacagtatggtagtaagcctgccaaccagggtgttttctcatgtattccaagaagcctgattatacccttgtaatctaactcatttgcaattgagtcaatgttctctctttccttccaatcagtttcaccaaaccactggctcaaagagcctgactcagaggcctagcgaccggaattccactctgctaaacgtgcatttcccatctgccccaccccaaacatatcttaccaatgtcagtgtctttttttctgacctgacacaaaagcatgcatcatgacagcacacaaagggcccttgacacacttttcattgtgagttcacgccagttctccatcacaaagtgagctgaggaaccatctaccattaggagatcccataggaatgtcagcaaaaatagacctcttttttttagtctttttttattttccattttattttattttatttctatatttttcatttcaatagctttaggggtacaggtggtttttggttacgtggatgcattgtatagtgatgaagtctaggcttttaatgcacctgtcacctgaatagtgtacattgtaccaatgtttattatatcactctgtttgcctttgcatacccatagctgcttagctcccacttataagtgagaacatgtagtatttgttttttgttgttgttgttcctgagctacttcacttaggatagtggcctccagttccgtcactgttgctgcaaaagacctcctttcattcttttttaatggctgagtactatttcatggtgtgtgtgtgtgtgtgtgtgtgtgtgtgtgtgtgtgtgtgtgtacaccatgttttctttaaccactcatagattgatgggtacatatgtttttttccatatctttgccattgtgaattgtgctgtaataaacatacaagtggaggtgtctttttaatataatgacttattttcctttgggtaaatacctagcgatgggattgctggaagtagtggtagatctacttttggttctttgaaaaatctccatactgttttccatagagattgtactaatatacattcctatcaacagtaaataactgttccctttcccacatctgcaccaacatatgttggttcttggcaaaaagggacctcttttatgactgcatgatcatcagaagtccttggcagttgaatttctattgattgatgttggtgttgcctttgccagccttgtcacatgtccctgccatgttacgatgtgctgacataggtgttaactgaaatacaatgtctcattgttccatgttggttccatttcaatgaacaagcatatgagggctaggagagaagtgaccaaacctctgcaggctctgttatttgatagccgagcacccagcaggggaaatgctgaggactgtcatggtctttgggtacttgagtcatcatactcacctgaagacattgccttgtttgtcaattgctgctttatgcaaggctggcttggttaggattgattgactcccacccatttctgtttctactgtaaattccccgtatagactccctcactttccatgatggtctttgtagcttgtagtttttatatcacctaaatattgtagaattctgttgtagcacaggatctacaatagagtccgtctcattactgctgttccatatcattttacacagcattacctgaatacactgtgtttgcaaagtagcttacattgccttttacattgagacatgggttggtctataatttgctagtaatttcaagtatagattaaactagataaaacagttttcaataatcattagcatattgattacattcaatgtcttacacatatttataatgagaactcagagaattaaatgaaacctgctctctcttagggttccattcttgcattcattaataaagaataattaggccaggcgtggtggcacatgcctgtaatccttgcactctgggaggcccaggcacatggatcacctgaggtcaggagtttgagaacagccgtctctactaaaaatacaaaaattagccaagcaaggtggcaggtgcctgtaatcccacttacttgggaggctgaggcagagaatccttgaacctgggaagcggaggtttcagtgagccgagattgcaccattgcactccagcctggacaacaagagtgaaactccgtctcagaaaaaaaaaaaaaagaataaataaataaaattacttggcccctagaatgactggatacagagctctgagtttgaagaggaccaattgttttagtcaattttgtgctgctataacagaatacctgaccctgggtagaaatttattggctcacaattctggaggcccagaagtccaggatcaaggggcagcatctgaccaaggacttcttgctgcatcatcttatggggaaagatggaagggtaaagagagagtaagatggaaagagagcaagagggggtgaagctatttcagtcacaatgaacccactcctttgataatggcattgatccattcatgacctaaacacctcttaaagatgagtgggctcaacaccatgtgggagccctaccttccaataccatcacaatgttgactaaattttaacttaggttttggaggtgatgaacattcaaaccataataccaacttatactactggtactactttttaaagacttattacttctcatagacagtaaaaaaataaatcagtagttgtcactttaactttaaacttcttcccttccttctcccccattctggggaaataaaaattaatgtttgtagtcatgtaatatgtatattattaggggtaaaaaatttgctctctctgaaaatgaacctcacatttctcttgtttttacagtaataaaagactagtggccttagtgcccatgcccagtgaccctccattcaatacccgaagagcctacaccagtgaggatgaagcctggaagtcatacttggagaatcccctgacagcagccaccaaggccatgatgagcattaatggtgatgaggacagtgctgctgccctcggcctgctctatgactactacaaggtaggtccccagcctccacttttctcttcttcctgctccaggacaaccctttgctggtgggaagaaggaacagattgtttgtcccaggccagggaactaatagcatttccaaagtcaatatagaattcagcctcttcctgttctccttgctccctgcttccccatctacaaagctcaactttatcacccatccagaggaagtactcattttgggataatattttttgtgttccttgttcacatgcataaatattatttgcatattattcttaccatattacaaatacttccttgttgctatgtttactttaggattattatttttgctgaatgaagtatattacattgagtggctttattagtccattttcacactgctgataaagacatactggagactgagaagaaaaagcggtttaattggacttacagttccacatggctggggaggcctcagaatcatggcaggaagcaaaaggcactccttacacggcagtggaaacagaaaatgaagaagatgcaaaagtggaaacccctgataaaaccatcagatcttgtgagacttattcgctatcacgagaacagtatgggggaaactgctcccacaattcaaattatctgccacagtgtccctcccacaacacatgggaattatgggagtacaattcaagatgagatttgggtgaggacacagagccaaaccatatcagtggctgtaccataatttagttattgctcagtggttgaacatttaggttgcctctagatttttctatttattagaaacattcagggtttctagatttttcagttttataaggaacattccagtgaacactttcgtggaagacttttgcaggaatttcaacacctaattttgttacaaccctaactttctccatttgttttgatgagtagtaaatttttattttgaaaaagtcttaaggcaaaataaatgtaatgcacttatatttcaaaaatataattgccatatactacctataaaataggagtatttcaggaaatcaaacaaaaacaatgatttttctcaagcataaagaactatgcctggtatgacctgctccttttgaattattaaagtataaaaagttgaccagtatttactgaatgagatttattgcctgccttgattgtaaacacctttggctgatgctgggaattggcacaaatgtgaggatggctgtgtttattttgctggttgggcacaatgaactcttattaactcttattttagaataagaactgaatcccaccttcccttctccctccatcatggaaaaaccacagagttcagcaaaatcatgcaggaaagataatttcccttttagtaacctttggtcttgcttcctgtttcttttctgcttcctacttcctgttaacttccagcagcctccactttgcaagctattgtctcctgtctctcccctagaacagttctcatgctttcaaaaaatctcccaccaccacctctggcattgccaccacacctattcttctgccagagttttctaaaattacacattcctttcccaccttctttcccattaaaacactcaggagggattccttcttggggagatgattgaaaacaaagcgaggctttatctaagatgaagagcaaggtatgagtggcaggtgcaagtgactgacaggtaggaccatccagggtattttaaataaggatattgctaactcaaataaatgcatcctttatagttaagaagtgctagagaaatatatgaagggctttctattggtctaggctttctccagtctaggctgactttcccacttatcaagagagccagcattggcagattgtgaccaccctcttatgaaggcataaaactcccagcaggactcctgacatagcaagaaggaccttaactttgggggacttgggctccagatgaaaggatgctttaaggcctaaactacattgcatgtaactaaggctattttctctacagtgaaggggaattcctgaaaaaaaaaaaaaaaaaaaaaaaaaaaaagtctgaaaaccaaaatgatttcatggtaggctttttattcttcttcttcttttctggctgtggttgttttatagttttcattctttctgattgaggatctcatctgagaaatgcaaggataaattctaaatgtttcaaattgaaaattttcaaaatgtattgaggatagttgggaagcacagaactcatcaaattaggctgcttcgtgtactgggccacttcttgagggcttaactgtttttggtctcatccttagaaagaaattgaaaagtgattttcttctatgatgaaaaaatagtcaaaacttgacagttgtattgatcttcaaaatctataaatatatctttaaagtgaccctgatttgattattcagatcattacaacttctctttgtaacattttttttttttttttttttttttttttttgagatggagtcttgctctgtcaccaggctggagtgcagtggcacgatcttggctcactgcaacctccacctcccgggttcaagtgattctcctgcctcagcctcccaagtagctgggattacaggcacactctaccatgaccagctaatttttgtatttttagtagagatggggtttcgccatattggccaggatggtctcgatctcttgacctcgtgatctgccctcctcaacctcccaaagtgctgggattataggcgtaagccaccgtgcccagcctgtttgaaacttttataatgttaaattaatatgtcagttaatagttttcataaggctttgaagaaatatattgattatatttaggagaaatatgttgttcctattctttaaaatatagattttattctgttattgtgaaatggatataatttcatatatctgtatttgatgacaattctttttttgtgttagtgagaaagagaagcatatcctgaaacaaacataattagtaattttttttttttttttagacagagtctcgctctgttgcccaggctggagtgcagtggcatgatctcagctcactgtaacctctgtctcccgagttcaaacaattttcctgcctcagccacccaggtagctgggattaagacatgcatcaccgcaaccggctaatttttgtatatgtatttttagtagagacgggattttgcacatgttggccaggctgctcttgaactcctggcttcgagtgatccaccggccttgaccttccaaagtgctgggattaggcgtgagtcaccaagtccagtccataattagtaatttatgaaggcaatatattttatttcccacagatgcagaggataattaagtattagtaaatatgggtgattaagtactagtaaatatggtacccagattacttgtcctcttatgctagcatttaaaggaaagttgaaatattgctttctgtaactattctgagataccaggtagggagtttacataaaactcaagttgcagccaagtctagaactccttctgttgaattaatatttccaagactgtgtggactactagagttacatagcttcttttatttcacatgagctttgctatacttttgcttgaaacattttagtgtttctggaaataattggtcttattttcaaacactgtatgttcaaatgatcattttgaagcccttttcagttgcctgggtgttcacagcttatatatgttggtgttaaagttataacaaagttaaatgtcccttgaggatagacctttttctgtagtcaagtgaaatgttaatgaaacacagcagtctgtttttttttttggtttaaatgcgtgtaaactctgggaagttaaattattgtaaaaattgctgccatgttatcattcacattttatagactttgtatgcctcttcagaggatgaattgattctatttttgtcaaagaaaccatttttcctcactcctgaagttggagtatatcacccctgtggggacagtcatggactctgtccacagggaggagttcatgagctacacgcaggcactccagaaatggtggtccctgtcctgtgaacgtggcaaaggcatacctttgcataatacttcataaatttcaaggtcttttcacctacagttgataactgtcaccacagatcattgcagtgaagtccatcaggttttacattttatagttcatgcaactcagtgggatttacccaagatcacaggacaatcctgtatgtttcctaatagccattgttttacaatgtccaccatttacaaaatgcccttttttgaatccatttaaaaattttaaaagtatgcatttggagcttaataagttgcttactcataaagtggtgtttattttttaaaatccaaatatatagaatcagtcataatttagagactaaaattctagcccagttctctatccagtttaaactacttaccagtaatagctccacagttgtgcgacctttccatgaatttcaggcatgacagaaaaatgtgacagattcaattagccagatatttaaaaaatgttttgacttactttatgtaactttattttcctcttgaaagagctggtttatcatcatctggttccagctgtagtgaaaaataggcttccctggtcagttggtttctatctgttctattgaccagtactgctggaaaccaatttgttggttgatttgtttgtccatctatccatctatccatctatccatccatccatccacccacccacacacacacccacccaaaaaatattcactaagtagatatgacctcccagtaatgggggtaaatattggatatctaaaggcagatgatattcggttgaccacctcagagagatcaccgacaatcacagtccaggacaaacacattgctataaacctataaccatggtttatggaggtcaatgctcaaaaaggggcatgttccaagagcagtgggttgactgacaacctcccagataattcaccagctttccagaggaagcaatgcctactctgccacagagtagaggatgatctgtcacatgcacagaccaggacagaaagagagagagacagagagttggtgaggggagttcataacaagggtaagatgcctaagatgattcctggattaatcaaggcagagagtacagaataaaggctctgaggagaacaataattaagagttgagtttgatgtgcctgcaggatgtccaggtagggacatctaggactcaagggaagagaccaagttcagagttctcagtttatctaaagatggtttgtaaagccaaagtttcaaaaaagagcatggttcaaagaagagcaaacccgcaggttaataaccacctttatggtattgtgcctagcaccttaaaccgagcacagctgtcagcacagagctcacatcaggggctcttggcaacaacagcattcacttccatgaatctttgggagtcgctaacatgtttcagtgtttggaatccctattcttctatttctttggtcctgccctttccaggccattttcattgatcaattgattctttcaataagtatttagtgagggcctactacattccaggcattgaggacataaccatgtacaaggtaggcatagagactgccatatcatggacacagaaaattagatgggactcaaagtatgggcacaagttagcctggagaaggcatgggtggtagtgtgggggtaggaggggtggggcatgttctaggcagagaggactttgtgtcatggctcttttatgagaaggagcatatgcatggtcgtagatatagttggcccaagtgtgagaagcaaaaacaggggctgcctacattgagatgggagacgtatttgagactacctacctgagagtaatgggaagcactgatgggttttaagtataatagcaacacgacaagatcagactgcattttaagcagaccactctgagtcttcctaatggatccagaaataattcacagttatgaaatgaaggagaggagagaccagttagctgattcagcagcccaagcaagggaccctggaggctgagcctggaggctggtgtccaggggcaggggatgggtttcagaagcacaggggactttgtgccacctggttggaaggggagagggcgagggatgcttgacagtccagaaaaatgtgatggtgccatagcacacaacaaaagaagtaaatcatctgtccctgcttcagaggcctttcctcgtctggcctttgctcatctctgaggccacatctcccccaactcattcctcacgtgggacatgccttccttgttctgtcctgccctctaacctttttataagcagccctggtggctagaaagccttctccatccacctgacaaattcctaccatggctcagcccctctggggagctctgtcctctaggcttccagagaaccctgtcggtagcacagttttatctcgtatcatggggtattaaatttttaaaacactataggaataactatattttaggaaagaaactaagtgctctctagtggggtgggcgagtcataaactcagggtatagtggcaggcagagctggggaggcaggtctccttttttctatatatgtatagttttccagtttattaagtttttaatctcaatgccagtggaatttctttctccttttttccctcttttattatttatttttattttttttaattattatactttaagttctgggatacatatgcaggtcttttttttttttaaaaaaattatcatttcaacttttgttttagatttggggatatgtgtgcaggcttgttacatggatattttgtgtgacactgaggtttgggatacgactgtgcccagcacccaggtagtgggcataggacccaaaagatagtttttcagcccttgccctgcatccctgccttagtagtcccgtgtctgttgttcccatctttatgtcaatgtgaacccaatgtttagctcccatttataagtcagaacacgcggtatttggttttctgttcctgcatttatttgcttaggattatggcctccagctccacccatcttgctgcaaaggacatgatttcattctatttttacgtctgtggggtctccttaaatacttacttcttccttaatgcctttaaaaaaattgtcataaaagatatataacataagatttaccattttaaccattattaagtgtccagttctgtggcattaagtacattcacactgttgtgcaaacatcgccaccatctatctccagagccttttcattttcccaaacagaaaactctgtactgtttaaacaataattcctttcttatcctcctacctgctgctcctctctgttttaccttctgtctgtgaatttgagtcttctggagtaactcatataagtggaatcatataatatttgtccttttgtatctggcttagtttttttagcatagtgtcttcagggtccctccattttatagcatgcaccttaatttcattctctgttaaggcagcatagtattccgttgtatggccatgtcccattttgtttttccattcatctgctgttggacatttgggtggtttcctccttctggctactgtgaatagtgctgcaatgaacacaggtgtgttgagtattgaaattgtatgtttatctgtcatctccaatagatgatgagaactatcatttatctcatttctatccagtgtttagcaatgcctggtatagtatacactctgaaagttaacatgaatgatttataattgatttattttattttttattaacaaatataaagtaccagacactccaagtgcttagaaaattaaattaactcatttaattttactaaaaacctgtgagataagggactattgttatgcccatttttcagatgaggaaagtgggacagagtttactgagtggtagagatgagatttgaacccaggcaagcaggctctaggtctggactcttggtcactctgctctgtccccacactaagccaggtatctgggcttgtgtacatagtcaggtaagtggaaatcacaggaattgctagaggactccagtagagggatgattttcatgaatgttctttcatctcaagaaagcaaaggctgctttttgggtgcaaaggagtttggctagaaggaagatctggagatagagcaaaaaaaaagaaagaaagaaagaaagaaaaatacacaaacaaaaaattcaatcaaccaacccaattgaagcctacttattcatgtgtttgaaaacaatggcagagtaaagtatctaggatgcagtagacgattagatgatggtcagagacagagctggtgggatggcccttctttcaatgagcactttttcaatatttttcaggtaatatgttggcattgggagttttttttttttgagactgagtcttgctctgtcgcccaggctagagtgcagtggcgcgatctcggctcactgcaagctccgcctcccaggttcacgccattctctggcctcagcctcctgagtagctgggactacaggtgcctgccaccacgcccagctaattttttgtatttttagtagagacggggtttcactgtgttagccgggatggtctctacctcctgacctcgtgatccgcccgccttggcctcccaaagggcattaggagttttaagacaataatgaaagtgtatttagaaacaaaattgtggaagcaagtccacaagctgtgtaggaaggtggacaaaggggggcccaggtatactggatgcttcccccagctactggctcagtatggcccgccccgtgcctaagcactcccaaccacgtcagcacttaaagttctcatcagaggggagggtagctccctgttctttatggtgacacttgttgtaactctattatgtttttgtctgatcaaaggcacccaagtctagattcacctctgctcacattgctcctctcccctcttacactcccaaggtggggagcgcatgagaggtgctcgggtccagggagagtcacctaggccagcagtgagcagccgaatcatgtctgttgtggccatatgtttatcaccaacactttgtctctggctccataatcattgtcactcaggctactagcctttatcatctcctggtgatagcaacttttccaccatttcctggagaacattccattttggtttctttgcttatgccggtgtccagctctgaacatggtcatggttgcctctgtgtatgtctgactgatggttggtgatgtttccaggttcctcgagacaagaggctgctgtctgtaagcaaagcaagtgacagccaagaagaccaggagaaaaggtaaaggaatttgcctggcccccagaataactctatgttttctaaaaaacaatgttattaaactgtatgttttgttcttgagaggagatggggtcaagaagcttagcatcatctatctgtcttttgagtctggaccaatgctagatctctcaatgaggagagcaaattgcatgtttggttgtgcatccaaagggtctctccaccctcttcagatacccctcttcagattccaaggaggcttaaaatcctgagtcagaggtgagatgctggtaagatagcccattgctgggattaacttttctgatcaatcctatggcattataactgcaattaggcccctcaggaagtgagacacttgaaggattgcttttgatgatcagggaaggggaaagaaaggaggttgggctctttctcagccaagggaggcataggtggaggcgactgtaagggctatcgctgtcagggtgaaggggcaggacagctgcaggagatcaccatggaacaccccttgtctgccctcctcaatcaagaaccagctgaaaagcaaggcacagtcagataaattaagattcaaaaggggcaaaaaaatcaaaagcagctttatttctgatgaagccaattggagaatgtgacttggaatctgtagcttgtaacatttcagtcctgacttaggtaagtgtacccattcagtcccaggcatgactttgtaccgtttatggcacagcaggggtgactggagggtgaatcccctctctttagccaggatgatccagaaaaagagacaggaccagaagggaccgaatcaccctgctcagctacttctttcaaactcatccacttctttttttttttttttttttttttgagacggagtctcgctctgtcaccaggctggagtgtagtggcaccatcttggctcactgtaatctccgcctcccaggttcaagctattttcctgcctcagcatcctgagtagctgggactgcaagtgcgcaccaccatgccaggctaattttttgtattttggtagagacagagtttcactatattggccaggatgggctctatctcctgaccttgtgatctgcccgcctcagcctcccaaagtgctgggattacaggtgtgggccaccgcacctggcccaaactcacccacttctttcaaactcacccatcaataaatctcttcccctgcagtgggatggagagaagccatagtgtttttctattggaggttcttccatatggaagtaaaatcccctactagcacatgtgtcagaatctgacctggccttgataggaactgcttgtgacattacagtcttctgtgattagcagcaggggcctctccaccaaccagcagccatatgctgtgcagcatctccagggcgcaaccccagcagaacatgaaggctgcctgcatctgagtcactgttccattagggatctcctgaagctccacactgccctggagtcctgggacctcgctggaagaagaggctgacactcttcaggccctaaaacttttccttgacccagccagttttattgagttaaacttgtgctatctgcttagtcctgtgccagaattatagcaggatcagggaaaaacaagtttaagccatgtgctctgtctacctttcacatcacagacaagtgagtatctcttaggacaacattacaaagcaacagctgctcattgtattttaatggttacttttgtgattttcatagagcactttaaaaaaaaactgcagtgaagtatagactaaactaccttatatagattaattatgacttagagttttcattgaatataatttggaaggatgtcattgtgatctgcagcatattcatgaattaagttgctatatgttaatatagtatcattacaactgtttgtatacagaagttgctacctggaaaaataacagaatctcaatgacatgatccgaattttctaaaaagtatgtttaacacaccattattatcattgcatttttcttgtattataatatttggttcaattttaaattatattgcaggtaatttctgtctcacaataattcttagttttaattattcattttttagatgtatttgtgaagttctctggtattagcttcaaaagctaaaactgtttaacagaggcatagttacacattttaggttggtgctgaatctgttattttctggtggtatgataacaatattcaactagatttatacaattccatatcttgcttatttgtttattaggacaccaaatccaaaaaatattttgacttgtattctttctttagaattcctatgttttgcatgaattaaagaattaagaaactttgccccaaatggactctaactatacagaagttggttaactttaaatattttggcaaagccaatgagactgtgtgtgtgcaaagcctggggtggaaactgggtaacaactttgtagccaataaatgtagaccaatttatgtactcctaacctgtaggggcttatccccaagtattaatggttatttcttcactcaaggatctgggctgacacgagttcgggaaatcctgggttttgactaaacaggtgaaggaatgctggaacctttactgggttcatgatgtttgcaacccagtcacggtggtctcgttatggcaattttgtttgttttttattactgatttcatgatggactctttttttgtgtgtatgtgaggaatatctattaacattccatgcaatgtttaaacaatgaggtttaggacatggtaatgtaaatgggtggtctgggttttggcatcctccaactagctggattcagatgaaacataaattctaaattttcactctttcttatatacaggttcactctattgatttgatcacgaaatcaggtcattacttaaggctagaaagtgtgcagacttgtgattttactccttaggaaattattttctagacttatttcttctacacataaagttttagatatcttaaatatttttctatttgctgtgttcatgtggagaaattctttttgcaagtttcactttgaagtttcatctgaaaaatcaaagctgaaaatatcaagtcctgcttggtacttaggcaagctcaaaggctaatgggcttccttctttacacacaggagccagaagagcccagttcttggaagaacattttttttttgagatggggttttgcccttgttgcccaggctagaatacaatggcatgatctcagctcactgcaacctccgatcccggcaggttcaagtgattctcctgcctcagcctcctgagtagctgggattacatgcatgtgccaccacgcctggctaattttgtatttttagtagagatggcgtttctccatggtggtcaggctagtctcgaactcccgacctcaggtgatccacccacctcggcctcccaaagtgctgggattacaggtgtgagccaccaagcccggcctcagaagagcaaattttaagagaatagccctcacaatgagagatgccacaaagccccagaaagcacatgctagataaaaacagaaacaaacaaacaacgcaggcatcagagagggggcaaaagatgtattttctctccacattactcagaagaatccgtaaattagtgagaggtggccccaaaattgcactgaccagagggacttggctaataaaatcattttgctgtcaacaataattttccattaatgagttcttatttgtttctgctctctcccagacttctttagtatagatgaaagtattttattctagtctggcaagaattaatattctacatcctctcctttctctctgtaccacccaggaggtctgagatctgggagatcttgttttacataagccaagctacaccacttccttaagcccccaaaggaattcagtgctaaggacgtcagtgagctcatgttctctctcaatttggtgaaaatacttgaatgataaattctcattattttatttctcctttaaggtgcccacagaatggtaaaaaatatcctccccactccctagtccttcaaattaccatgtttgtcctagtccttcaaattaccatgtttgtcctcctcctgcttttttctttttgtgttttaaaactaactttttggtaaaaattttcaaacacgtacagaagtacagagaatagtgtaataaaccccccaaatacccatcccattctccagttcagcaatgataaatttttgccactgcttaatatctgcttgatactgaccttttctctctttccttttcttttttttttcagattgcaatagtatttaaatccctgtcatgtcatcatattagttaacctctaactaattctgatttgtgtgtctaaaaaataaaaaaggacattttattacataagctcaaaatcattatcacccctaactgaattaacaatacttttttttttttttttttgagacagagtctcgctctgtcccccaggttggattgcagtggtgtgatctcgactcactgcaacctctgcctcctgggttcaagtgattctcccacctcagcctcccgagtagctgggactacaggcgcatgccactgtgcctggctaattttgtgtttttagtagagatggggtttcaccattttggccaggctggtctggaactcctgaccacaggtgattcgcctgccttgggctcccaaagttctgggattacaggcgtgagtcaccgcacctgacaacaatacttccttaatatcgccaaatcccagtccatattcagttgtctcaaaattcccattgcctgataattgcctttttggtttgttcaggtcaagatccaaacaagagctgcttctcatacttgatttttatgacttttaagtctcttttaatctagaacttcttccacccttcctccttttttcatgcctttgacttgttgacaaatttaggtcagtaggatgtgctgcattctggtttgtctgatcgcttctttttgatgttgtttaagtcattctttgtgttcctgtatttcctaagaggtgaaagttagatatgaaggtttgattagatttagggttaggttttgttttgttttgagacagtttcattcttgttgtccagtctggagtgcaatggcgccatctcgactcaccacaacctctgcctcccgggttcaagtgattctcctgcctcagcctcccgagtagctgggattacaggcatgcgccaccactcctggctaattttttgtatttttttgttagagacggggtttcaccatgttagccaggctggtcttgaactgacctcaggtgatccatccgccttggcctcccaaagtactgggattacaggcatgaggcaccgcgcctggcctcgttttgtttttgttttttacagtgagactgagtgcttcaggttgcatgataccagggggcgcatggctcactcgtggtcctacttctagtgacgcaaggatcccattgcgtttcgttgtgaagtttgccagccccctgtcccttaatggcattaacatccaatgattattgcctgcattggttattctattaggcgttgccgaatggtgatttttctaattctatcatgttgcggggggtttcaacacacagaaactgccttggcaccagtgaagcccagagtaatttgagtggaggagaaaaccgagtgcaagtcctaaagactgttccagtgaacctttccctaaatcaagatcacctggagaattccaagcgggaacagtacagcatcagcttccccgagagctctgccatcatcccggtgtcgggaatcacggtggtgaaagctgaagatttcacaccagttttcatggccccacctgtgcactatccccggggagatggggaagagcaacgagtggttatctttgaacagactcagtatgacgtgccctcgctggccacccacagcgcctatctcaaagacgaccagcgcagcactccggacagcacatacagcgagagcttcaaggacgcagccacagaggtgagtcccaggctccatcgacggccagaacccaaacccagagcccctagctaatttttttctatttcctttcaaagtgtgataaatgaattaaacagcaagttttagcttcaattagttttttaaaagatgtgtttgttggtagtctggcattctttctaaacaggtattaataaacctgtcgatgtgtatgtgtatggaggaatatttctatttttcttggttcttagatgatggatttctttgttttcattttagtcttaagactaaatatttatgagaaattaagagatgtttgtgtggaaacttctgctttgtaaagttttcaccttgatcttttctagtttgtaaccttccaaatggtaggtagctaaaggtagggcttgtccattcttttttaaaaaacaatataactttggctggacgcggtggctcatgcctgtaatcccagcactttgggaggccgaagtgcgtggatcgaggccaggagttcaagaccagcctggccaacatggtgaactcctgtctctactaaaaatacaaaaaaaaaaaaaaaaaaaaaaaaaaattagccaggcctggtggcaggcacctgtaattccagatacttgggaggctgaggcgggagaatcgcttcaacccgggaggcggaggttgcagtgagccgagatcatgccactgcactccagcctgggtgacaagaacgaaactccatctcaaaacaaagcaaaacaaaccaataaaactttaaaaaaccttgtctgatggaatactcaagaaggagaatttgcgttatcaataatcaagtgtgtgtatgtgtgcattctttctactttacaaatagagaatatgtattcttctcaggagctcataggactaactttgcttgtttattttaaattcagaagttctaagtgcacagttgagaattttggtaattgtatacaattgtgaaaccaacatcagaatctaggtatagaaagttcccttgccctgaaaatttccttgaagctctttgcatttgaagccttccctgctcaccttgcatttggcgagcgtggatctgcctactgtcactatagttttaccttatctaaaatttcatgtaaatgaagtgatagaggatatagtctcctatgttgccttttattgcttagcatagttttgagactcatttatgttcttgcttttttgtttgtttgtttgtttttgaggtggagtctcactgtgtggcccaggctggagtgcagtggtgagatcttggctcactgcaacctctgcctccccggttcaagcgattctcctgcctcagcctcccgagtagctgggattacaggtgtgcaccaccatgcctggctaaattttgtgtgtgtgtgtgtgtgtgtgtgtgtgtttttagtagagacagggtttcaccatgttgtcaggctggtcttgaactcctgacctcaggtgatccgcctgcttcggcctcccgaagtgctgggatagtggtgtgagccactacgcccagccttgttgcttgttttagtagttgttttttaaagttgctgagtagtatttcatagtgagtgtataccactatagctagtcactagttgatggacatttggttgcttccagcttttggctattatgaaaaatgctgctgtggacattcctgtttatatttcaacatggacatatgctttcatttctctcgggtaaatacctagagctggaattgctaggccatgtggctcatgtatgtttaacttcataaagtactaccacacggtgcttcaaagtggctataccattttgttcctaccagcaacgtatgaggatccctgttttccacacccttgccaaaatttggtaacttttaaacttcagctcttttagtggatatgtgatggtgtctcattgtgctttgaatttgcatttctttatgtgtagtgaggttgaacatcatttcatgtacttatttggcccttcctataacttcttttgtgaagtgtctattcaaattatttgtccaatttttaaattgggttttcttccttttattaagttgtaagagttctttatataatgtgaatataggcccttcattagtcacatattttgcagtccattagcctttttgtttttttaactatatctttccatgagcgacggcatttaatctgattaagtctactttattaatgttgtcttttatagtttatgcatttgttatatcatttaagaaatctttccctaacccaatgtcacaaactttttttgtttgttttttgtttttctttagatgtttattagtttcatgtctttcatgtaggtttctgattcatttcgaagtaatttttttttttttactttttaaatggttttatgtgcaaataatgaacagatgttgtacctataaattctactttccaaaaacaggagctttttaaaagaaaaccacataataacttttaaaaggcactgggattcctctgcttctagatcattgctaggctagaaaaataaagtttgttctaccaggaatcacaagttagaactaagcattcttcaaagtggaaattctagactatagtgtcattccaggcaaagattattcatttctcatccccaacatccacaactacctatcagaagggttaaaccaggtcaaaacagtccagcataattaggcttcatcaaacaatgtcattatgctcttctaagatgcaaataaaccaagcaggaaatactaaaatcaaaataatatttgacactgtcatacaaattgttagttccttgttgtatcccccttctataacattaataaagggaacattttactgcaaagaatattttattttatacatcactagccatgaatttttgccattagttattgtacaaatgctgtctagtgccattatccaaatggcataaccattttacatccacaattcacttctatagttttaagtagaattttcatgatttatgtaagtacatctatcagtaaagatttaacactgagatgcaatctaacatctgtaatatctgatgttttgtagatggcaatgtaggaaagatatattttaatcacttttcatttaagtgaccttatgtaaaaaataataatttagcagttccaagtctccaaagggcattttcaaatgtacataaaagaaatggttacagagatttttaagaagcatcttccatgtccacatcctcttgtaactgttgtaccattttctcttccaactacttccctttgcctgcaaggggggctcagataagatggatgttttgctttacttctttgatatcctgaacttttgtagctctttatttttcttcgatctgttcattataaatttagcttggcgtttctgtttgatttcttcaactctcttcattgaatcaatacttttattccatagctctcactggtattcgataggttcatttctacatttttcaaattcaaatgaattatacgccgtaagccctttaccagctgctttcaggaatgctttggttcacctagctttggaggattgtgcttctttttaaagtttttatgacatttagatttgcaaaatctgaacaccttgcaattattgtggacaaacgtcatgccgtggccagggtagatgggccctgaacaaatataacacttctcaatatgcatattgaacccgtgtgggtccccaccaaccaaacaccaagcttgagaggtgatgtaatttttatatatggtgtgaggtaaggattgagacccttttctccatactgatatccagccatactggtttcgttgtggcaccatttgttaaaaagatgatcttgtattcattgaattgccttgggatcttggtaaaacagcaatttgtgatataattgttggtaccttttccaacttttgatgtagaatatgtaatgtgtatttttattagctcagatcagcttcttcactgtttaggagcactgcctctgcattcaagatgggggtcattggttctctacttttcagcccacctaggccaataaaagacaatggcagaaggagagaatgtgtggttttccagtttcctaaagagaagtgagtgtagtggcagcatgataatatctttagcctgctgcctatttaatttccattgggaaaaatgcagctgcctgagcttgagatttcatctttaagtaataatatttgaaaataatgaatatttgatgggtactcactatgtgctgggcatcattctaaggatatataagcctcacaaaagccctatgtggtaggtactattattgtcatctctatattctaaatgaggaaactgagggatagagagcataagtatgctcatggttatttagcagtaagtgggagggataggactcaacctaagctgtctggcttcaggacctaaatccttaaccatatgactacacactcagagaagcctggggccttctaattctcaatagttccattgcttaagacagtgattcaccaaaatctttttaaaaacatttgactgtccttggtccatctcagattttttttttttaatctttcaggtgagcaaagagtacaaaaggttgatgagcagggactggctctctgcaaagttgcagagagcaactgttgtatactaggacatagaagttgcactagcagccctgccactcctggcaccagtcatttctgagtgcctgctgtattctgtggaatcagggagtgatgaaagtgacatatgataaattccttgtccttaagaggctgtcatatttcttgggttctggtagctttacaatcaaactttcaatgctcttgaaatttaaaaaatggtcttaaaattatctttcttagcttcctgcatcatattgcttaaaatagttagcaaacttattttttttttgtttttttttgtttttttgtttttaaactgaatgaaggatcttgtagagtctttggtattgttgattatttgatttgctcttaagtagtgaggggtgcttctgtagaagaaaataactgaaattatcactccatgatcccatgtgaggtacatgttttttcaccaaaagattgccactgatgtattttctcacacagtgtagaaatattccattagtcacagaagagtgtatggatgtggtccaatgtcaacggaatcatcatgctatttgggggatgtgttatcagttatgtttgttgtttgtattgtagataaagaggcttgtgaaaggaagctattgtattttgggctttattttgaagtagatgagaaagtaaagaaacttaccagaaacgaaatataaagactattcccactgattttggttgagctgctgtccttgtcttggaaatcagtgtttacatggcatgttgtatttcagcctggtgtaaattaaattgaatatcctactatgatctttagctatttcattgtcaactagttataagattaagtgatttcagagtaatttcaccaagaaaatttcattaaggaaaatttgtctaaactcacttattctaggcaaactattaaaatatctagaacccgggttgaataatcaaatttattttgccatttgagaccaattcttctgtgtgtatgtgcacgtgcatgtgtgcacagtggtagcagggaagggagtagtttgctttaactcaggctgggatttttgaaaagacagtggtagcattaaaaagtgctttagactgggagtggtggcttgtgcctgtaatcccagcactttgggaggcagaggcgggaggatcatttgagcccatgagttcaagactagcctgggcaacatagtgagaccctgtctctacaaaaatacaaaataaaaaaattagctaggtgtggtggcatgcacctgtagtccgagctgcttgggaggctgaggcgggaggattgcttcagtccaggaagttcaggctgcaggaagctatgatcatgccactgcactccaacttgggtgacagagcaaggccctgtctccaaaaaaaaaaaaaaaaaaccactttaatggatgaattttagctaatttgatctatattttattccacatcctctttgtaataacatttggcaaatatgtgttgatttatactgggtattaggcactgtggtgatgtggaagcttagggcaaaatgcatactggtttctgccttctagaagcttacaatctgtctgtatgtgtgaagggaaataatgctagatgccatttattgagttctactctgtgccaggcaccatggcttactcattttacttcttatccttactgtcatcctgcaaggaaggtgcattattttttccattttacagatgaagagacagaggttcagagaggttaagaaacaaaccaaagatcatgccactaataagcaaagagtatagttgataaatatacaatggagtggtatttaagaccaaaaatattttaagaaacatttaaaaattaaaagatggaaggatttttatcaaaaatcatatagatatataatcataataaatcaaaatggaaggaagaatttgtttattctgtactacagttttctataagtcagttaacaatagtttctggtttaggaacaaagcaacatcaagatctcagtgatttaatacaataaaatattatttcttgctaataaaacactgatgcatgtctgtacagttctcttccaattagtgactcaggaatccagggtccctgcatcttgtgacattatcatctctatgtgtggtttctagtgtctccccagcagaggaagggaggccatggagatggcatactgacttgtaaagtcatactttactgactttagtcatattgactagttgacctggaagtggcgcaactgcaccatctcacattttgttggctagaactagccacctgatcaacataactgcaagagggccgagaagtttaattctcccattagtcctcccatgtgctcaggaattgagaagaactatttataagtgaacatcggacagctctactgtgtatttcataactcaactccaggcatgttatttgtagaattaacatagtttgcagagcatcttgaaatgaaagcaagtaatgactatttgtcattatctggatagatgtatgatcattagtccattgattttatattcatctagtctgaaactggaagtgatcctggatctaaaccctatccaacttaattgattgacagctggtagtccattatcctccacacatttaaaggacaaaatctcaaaaatgttgattcatctactacattggaacatggcctcactttggattaatgcacacagttttattatgtttatcttaaacatatgatgcagtggctatggtaacaccaaatttctgtcactttgttaatgtgttttagcaccaagtaaaattttagaaattctctgggatacacattttataccttaggaggatttaaatctatatgtagtcaaagttgataagactagatcactcattatttatattaacatggcatttactcacctcatgcacagaatgtctatgaatgtcccagttctgttaaagctgttatttaactttgcagcaccatttgacactgttgatcactcctccctcttgcaaatgctcttggcttcatgtccacagcttcagttatcatctgtgtccaaaagaccttccaattttactctccagcccggtcctctcttctgaactaatatttattataatgtaataatatttatgttataactataataatataaatataataatattattatatatattattataattaatataattatatttattatatctaactgcccgattgattttttttacttatcccaagtctaacttatgatcctcccccatacaaccttatccatgtttctctggaaacattgcactctgttaggaacattaaggttgactgccagtgatgccaattttccctttctcatagcagtgaatttgatgagctcatatagaacttttgctcttcttcagaatgcctgcacacagtttgtagtttttaaaatatttgattagcgttttttcctactttaccagaagcttcatgagagcagggacctattctccttttgttcaccactgtgtctgtagcactgagcacagtgcctgatataaagtaaatgttcaataaatatttattgaaagagtgaatgggtaaatgatgggacctaaaaaattgtggctaatcaaagacaagaaatggtttagcaatttatgatttccctacagttaaagaatcattgtctttttgagacatattcttaccagatatcttgtctttgcaacccaagagaaagaacagaattccaatatttgagatttaaatatgtttactattgcctaatgtctaaggtcctttaagagtaatctatcaagtatatgttagcataccttctttactatcatttttctgagttcaaatttacagatgcactgtatcaaatcacagtaaactacagtgatgttggctgtctgactgccttttggcatcctacaaattatattaataggtctccgagcaactgtggaaacttgataactgtagccagaatgacctgagcattttgattctaattcctaatactaatttacttacagccatgtaacccatcaatgtaatcaggtctcatctaaaggatggtgatgttttctaggtacactatccatttaattcttttaaaattataaagataatgtaacagaattgaagaaaaaattttaagcttaatgaaaagtaatatctatgtttgtaacatggtaactacagtagtcaccactactataacatggaactgtgaaaaatgtttatttcttcacagttcttgtcctcatgcattcatgcattgaagtgggattctgtatttcagccagaatgtagttgagtctttctgagtctgaagatttgtagtatcataccttctcatgccatctgggggattagaaccacagaatttacaagtccaatatgctttaggaggttagcctatcctcaggctgcagaaatctatggcatggatggtaattcattcttgccatgtttactaatgctgattcacctggtttttatggattactgcatattccttcaagcaaacactttggaaatgcatctgtgtctccaatagttttttcatcatattaccctcctactccaaaattttctaattcctgaccatattaaatgtaaatacattttcctaaatcagcctgtccagtagagctttctgcaatgatggaaattttttttaatactatccaatgttagtcactagccaatgtgttaatgtagtacttgaaatgtggctagttgactgaggaatcagatgtttaaatttatttcagtctaatccacttaaatttaaatagcacatggagctaggggctatcatattgggcagcaggacctacattttcaagtccctgctaaataaccaggcaaggcctgtgtccttggcctcatgtatgcaccacatttgtactcatcgtttttgtcttgactcatggtggccctcccttgcttgggttactttctctcagttccttcagttaatccaggctgtctttgacttccaagggtcagagcgaagctcaccagctctatgaaatccccctataattttgctgatcttcctttcctggtaatgcccagtccatgcttttccagtcaagacacatgaaagaatgaatgattcaacatagactttcatatatagccattttctgtattttagttttttttttttaatgtgaatttattccatcccctcaaccaatttttatctctctgaggccagggcagtgttatatataattttgtgtttcttctggcaccaaagcagattgtgaagccccagaaaattcccattgaatgctttgctgattacctaatttattgcaaaagaaacacaaatctgtacctttgattctctgtcatgattatttattcagccaacaattatttgggcaatgttcctgggattcatgtgggtaaaatttgaagggaagataatcttcttgaattcaagaagtaagattggataaaaagaaggatcataaatatgtatggaaactgtgatataaggtatgctgagttccagagatgatggttaggagttgtgaggaagtttggaaaatagctgtggtaacatttttcctttagaaggaaacccttgaaatgctggtcaaagaatgtaagtttattgcacagaaatgagaggcaggaaggttatctcttaggaagagacacttgaaaaatggtcatagtgaaaaaacaagatacgtggtcaatgaaatgctttttcatcagtattctacaatattcgcttccgatcaagaattagggcttttggtcgtctacttttgaaaaggttctaagatgcagcaaagcacatcctatatgcactgtacatacaattgaacatcttgagacccaagcttctttgtgtgtaatactaaacttagtttccccagaaaacctactcttaacaatattgtgataatgaagatccttagagaagggcactgaatagggtcaaattattactttataatagtatttatacatgtacatagtgctcactatgtaccaggctctattcttagtaacttcacttttttaagaaaatagggtcttaataggcactccagcctgtcgctcaggctgatctgaagtgacgtgatcgtagctcactgcagccttgaactcttgggctcaagcgatgcttccgcctcaactttctgggtagctgggactacagggatgagccaccacacaaagctaattttattttatttttagtcaagacaggtcttgctttattgtccaggctggtctgaaactcctggcttcaagcaatcctcctgccttggcctcccaaagtgcgggattacaggcatgagccaccatgcccagcctattcttagtactttttaaaacttatttaattcttctaattattataaatagaaattttatagatgaagaaaatatagcatttgcctcattttatataggtaacaggtaaaagagctagaacttgaccctatacaatcttgcttcagaaactatgttcttaaccattctactgtattgctttttgctgcgctatatgacctctgtgtaattcgtgttctgttacttcagaatttatgacatttggaataagtgttggagacaatagcaaatggaagagatgtattatctatttgaggaaacagcttccagtacctcaaactctgtaggaacacctgcagacacgtgaataacatacaaagcacaaatgtattttctgttgagtgtagctctcagtgaggaggtgataggtgagttctatgactacttttgctgtagttgaaaacataatatcaaatacataactttattttctaatgagagaataaaatagtttggatacatttattattatcatttttgcataatgacttacctatttgttttaattccgatgactcatattttgcagaaatttcggagtgcttcagttggggctgaggagtacatgtatgatcagacatcaaggtgagttaccaggagatgcatccttagaaactgattaactgataaacctttaaatgtaccttcgagttatacctttaaaccttttttctttgtaaacttgtacagaacagtgtgatttcctttgcctcagtgcttttttctttatacaaaggacttctatatcattatttccagtcttggacaattttctgggacctacaccccttttcttccttctgttggctagacattcttttgtaggtgttcctctgaacctcatactcatgtgcttccagcccaacaagtgtaatatgaagccccatcttttttcttctttccctccttttccacttgtttcacacctggtgttctgcttttatttcctattgtggctaatgatgtacccattctccaagccaccccagctagaggtaaaggatctggcttctttcctgttggactttctcagcacttgctaaatgctgaattgtctgttccacctgtcatctcctttccaagttacccttgtcaactttctcctgagctattgcaatacattggatctccctgccaacacttcttttttattccactgtgcacatagccagctaccagctatcatgcactcaggtgccttccatgtgcagcagtgtgagtagggttggggataagatataatctctccttacaagaggtccacacttttggaggagacaaatgtgatgacagacaaattgaaaaacatttgctaagagatgagtcctgctacagagatatataaagagctaaatggacctataggcctgcacatgtgtgtgggagtaggaaggtgtgtggggttgagggcaaatattcacaggaagtggcatttgagctgcatcttgaaggattaatagcaggtgttttctaaggaaagaaggaagattaagaacattccaggtaaaagagtcatgttttaagaccttggttatgatcatgtctgaagacaggagagaatggcagctgggcgtggtggctcatgcctgtaatccagcactttgggaggccgaggtgggaggatcacttgagctcagaagttcaagaccagcctggccaacatagtaagaccccattacataaaaaaaaaaaaaaaagagtgagagagtggcaagaaatgaatttatctcccccatttacaaaacttactgaagattttatcatttcaggcagaattgaactcaaattccttatgaaggtcatcagggccctctatgttttggtccctctttacttaaaatctcatctcccactatgtttcttgcccctttgcttttacacatatggcccttttccattctcctggtttcctcttaaagtcctctggttccaatctcaggctccccactcatcctccccagatcatcttatttagaattcctgggggcaggaagcgggaggcaaggaagaatggacttgaaattgccttctaaaatgtgggaataggagtctaatttgcgtgctgtaaatccaaagcaccatgtcagcagctgccaggccagtgggaagagcaaggacctaccagtgacttgacctcgtttctctttccgctgctgccatggtccagcagagcgagcatgtctcttagcctctccttagctgtgaaatgaggaaggtgggctgaatcttgggtttttatcctgtgttatgggcaggcttgatggacacaaatccctgaaattatattaaaaatcgtttatgttcataagtgcctttatctgggaaggaaaattcactgctttcttcatgttttcaaagcagtctgtgccctagacaagacgcaagctagtggtctaggtgattcctaatatcctgtccaggtctaaaatgttatgattcaatggtactgtgttgaaattgctttttcagacaaaatgacaatggaatcagttctgttttgaatgatttatttcccaacttcttttaagacacatattctggaatttgcttagtttattagcttaagcctaagattttttatcataaaacaggaatattattctgcccttcagattttcttattataaaagttaaaaaataaataaaacattacaggaatatttaacatagaaagcaagagccccccataatcctgtcaggaggccattttcagagataaagtttgagtcatctttgtgcccagccttccaacgactatgaaataaaagagctaaaaaaataaacacaatggagagtttctgatgatctagaaaatatgtggtgtttgttattggattgtcactgtgagccgtcctgcagtatagcagaaataaatatttctgaatgaatgtgttaaacaaaaaatgattgtggttcatacctgttgtgttattttaaataattgatatactcttcgaagttgggaaaaatcagtgtttttcctttgtaaattatatcatgttttttaaaaaatgtgagggacactatttagagcagggatctgcacactttttctgaaatgaactagagagtaagaattttaggtttggcaggctatcgtctctaccacaacgactcaaccttgctgctgtagtacgaaagcagtcatagacagtatgtaaacaaatgagtgcagctgtgttccaataaacctttatttacaaaaacaggcaatgagatggatttggcctatgggccatcatttgcaaactcctgatttagaacaaccctgccatgagttcttccgcaggcttgaaaacaagaagcaaaatacaaaaagtactccctgttattagggaactagattctcaagtgaatgtttgagttttggattttcatgttttgagatgttttatagtaagatacagctatctgtaacaccttggttagacaaaaaaaaaaaaaaaaaggttaggtatatacatgaattgaacaaaattatttatttagttgttttgttgttagggtaaaaatggcaaattctattaattcttaagcttcaagcattacctaattgccagctaagatctaccaggggttctcctggtagagctgttttttgcacaattggccaggcacatcgtggactttatccccttccaaaccatctggtttatgggccactgttagaaatgttgtatacattgtactagcaatgacctttgatctggtctcatctcttttgccatatgctgtgttttgtctctaaaacagtaaacattggttaatgttcatgtgaaatgctatgatgtgaaattggtcaaaagagcagaaatgtccaagtgagtggatctgaccgctgtttgttttctttcacagtggcacatttcagtacaccctggaagccaccaaatctctccgtcagaagcagggggagggccccatgacctacctcaacaaaggacagttctatgccataacactcagcgagaccggagacaacaaatgcttccgacaccccatcagcaaagtcagggtaggggccacatttctcagataaagtacaaaggaatccgatgaacggaatggctacctcacagccttgtggaatggcatggaaaaaaaataaaaccttcaacataaataattctagaacgaatgtcagagagttggggcaagagcacttattggctcgtagttgatcattgtaatcagtaaccagtaaaccccagggaagggacatggttggaacatgctgtctgactgtatccgaggaattttcccgcttcactcactgcttatgtgcttcctcgttgttgttattttcaatcaattgatcttaatttttcaagtaagtagctgtaagtcagaacccctctgtgggtgagaaagagctttgttctattctgtaaaggaaaatgcagttcactctgaatccctgggcctggtggaacttggtttcaaagccttctgcagcccagggctttctcagggttccagagatgaggcacgatccccaccaggagtcacttgggggagttttcagattcatgagtattatttctacttgtgggaaatgaaactggctctcccttctctggaagcctgccagcttctggcgtacttgctactgccaagaagggagaggcccggtaatccttctctactgaaaaggaaaattatagcacagctctgaaaagaggtggaaggactttcctgatctgttgtaaaatgatttatggtgttgggtccatgatgcccagcccaccttattttagtcacagctccctcctcctaccacttcagaacacttaagaagggggcacatggtgtgcctacagcgccacaactcgggcatgccgccagtgcaggtggggcgcaggttccacgcaaggctgagctcactgcagtgagaaagctgctggtgtgctgtgtgcccatcaggagaattagtaaattctaatgctgtggtcaagactgcggtgaagaatatgccatcacaataataataacaagagtcataaaataacaatttatatttattatcttcaagcgccaggtattgtattaggtgccatctgtctagtaactcactgaaactgacaacaatcctatgaaaaaggcactgctgtttttatgatattacagataaggaaacttggtgataaagtttcagaaactagtaaccggccaaggttacatagctaaaaggtgagggaaccaggatctaccccagggcgtcggactcctgaacccaactctctttactgtgaggttgtgctgtgttgagcagcatggagggctgaaggcagggaaatgttagcctggatgtatttctctctggatatatttcctataaattacatcctccccctcttgtatatgagcatctggtaagaagacactgaataaattagcttttttttttttaagccttataaattccaagtgttagtataactcatatacaccctcttaacatcattatcatcaacctggaaaaaatggtgggtggttagtattctaaggtcatgacaacagtttggagtacagggactttcccaagaattctactttgctgaaatcatgaaaataatttaataagaaaattttatttctttatgttccattttggctaaagtgaagagtcccccctttcttggaaggacttcaacctccacccttggagactaagttggcgcctctcagagtggctctttcttactccccggctctggagcaggaaggagaaatgtgtttgtcacctatcagcatttatttctgagaacagtgtttcattccaagtcaaagcatgtagggcgtggtaacaacagtttcaaactgcgttttcctttatcattgaagaaatgaatttccataccaagaatatgccattatttatgctaatttagacacttgccagaaaaaatattactttaaattttatttttattttgcgacaaataaataccaggaagccacgcagtaaactttgacacataaatggaaaagtttgaggcgtggcagagggtagaatgaaaagctggctgagctggtagttgcaccagcacagagaatggttttctttgttgtcatgtatccagtgcctctgaagatctcactgcttgtgaattcgaaacgatatggatacatatttctaaacagttttcctaacaaacatctgctttcttgtgtaaaaattgtttacacatactttaggcaagagccagatttcaaagtgacagccagccaccggcatgtatttgctgtctgttattcgtcaggtgccagggtgaatggcagacactgtttctgtccttgctaagtttgatgttaattgggaagacattgccattggctgaataatggtaaataagtaaatgactactaatgtgtaaactgctacaaaggagaaagttgttttggttttggttttggtttttgagacagggtctctctctgtcacccaggctggagtacagtggcatgatcactactcattgaagcctcaacctcccaagctcaaacggatcctcctgtctcagccttccaagtagctgggacttcagacgtgcaccaccatgcctggctttttattttattattttatttgcagacatagggtctcactatgttccccaggctggtcttgaattcctggactcaagagatcttcccccctcagtttcccaaagtgttgggattacaggcatgagtcacccggcccagccctaagaagttcttaaggaatgagagtccatgaaatatttttcaggaatagtaggaaagtgcctaagaagtgttttggatgtggagtgagaggaggagtattcctgatactgtaattaaagggtttttttttggaagagggttgtttttggtactgtctccatttcataagtgacggtgaattaatgtgtatttagtttaatgaggctgtttataatttagaactgaaaagagttttgaattcttatttctgcaagatataattagtttctcaagctcatttttaaagtgcatccactttagatttaaatagatatcatagttgctcttgcgtttttcagtgtatgaaatatctgtagtttagatctatgttcaccaatatgaatttgtctttcagcattttcctcatttccttagtatttttctcattaattttgatattccagcctgagccacttaattagaccacaaacagatgtttgcttctttacaaatggcatcacattttatgtttaaggagtagaaatttcaaaagaatgcttgtttccaatacaagaaaaaaaaatttggggggggtttctgctgacctcacaaaataatacatttgctgctaattggttaatccagttgtttataacctcctggtaaaactgatgtaggactcttttttttttccttcatgcttcaaaatgaatttgaaagacaaattcattttttaagtaggtccattttataacaaaacggaccatacagccaagcttgtctgggcttttctaaagcaagaaaagcaacatgacacaaacacacctctggtagaacttccagaactggagactgaggcaacagaggcactgaacaaaaagtaagctccacgattctcccctctgcagagtgtggtgatggtggtcttcagtgaagacaaaaacagagatgaacagctcaaatactggaaatactggcactctcggcagcatacggcgaagcagagggtccttgacattggtaagttgaccttgacttccctgtatagtcctcgataaactgacatgttgtctcaatgccaaggggagcctggcgtagtaatcacagctggagccacagagctcttatgatgtgcccggcactagtctatgtcaggacatttagtgcagatcagactgagtaaccaaaatcaggctaagccgagagcaaagcgttttctattctatgaaagtcaactgtgtctcataaaatcatagtcatatagttagatttgcaatgaccatttcaattcctaaaacgtgttttcatggcctccccgtttgagcctagtaggcagtcagcaggtcagatgaactcttatccctgtgacataaataaactcaagctcgtgtgaccctaaagccatttggcaaaggtcatgtgactacacattaagtttctagttctctgtccagtgttctttccatttcaacacatgcctagtgtaagcaatgctaggtggtcacgcaagtgaaccatttaaagaaggagtgaatctgccaggagtctgtgtacccctaaacttgaggtccgttctgtagagaccagcagccccctggatggcacatcactcggggtccagtctggaaggcaacactcatgcccaataattcactgggcatgaattcattgccaaggttggaaaggctgaaggcacaatgagacaatccagctattacctgcagggctggagaatcaaagggaggaggaggtgggtgttggaggagccacccagcaggagctgggaccacagagagagctgttttccaatgggagatgaaagcacagcagaattgctgccagagacattctcagtgccaagagggaggagaagaactgtcctggcttctctctgcctcgtgatctcctgccagtgcctcccatcggcagaatttaactcggagtcagagggcacattaccgtggaaagtgcagtttgcagaatcaacctctgagatgcagagcaaagtaggggaagtcagggaatagatcttaaagcttccaaaaattacttaaaaacagacagtaatgtatgtgtttccaaataattttaccactgtttccataagaagtaagtcatttctcatttgtagacttcattaccccattttgctgactaagatgcttcagtccaaatgagtgtgggctaagtgaaggttcccatcctgctgggtatgaaaaggtattactgagccttgcaaaggacaattactttgatttcttacacattgcaatgaggacttttcagatcttccatttcaccctggctaggacttcttgaccacactggcagagtttaatgactaggatagggtgagaggctcactgtagaagacaatgaaactagttactggtttttcttgcaaaatagttaagccgctcctcacctccgcatcacacacatacacctattgtattaactagtcaaacatatttatcgaataaacaaggaaactgaggcctaggaagtctcactggcccatatcacatgactccccctcagataattagtgcaagagccgggataagatctgtgttcctgacctgagctgataaactaaaccaagacctggtgactaggacggggattggggatacttgccttaacctgtttagttaaatctgcatagagcagaggaacaattttattttatttgaaaagttagccttataattattacccaagaaaatgaaaggagcaattaaagagaaatatggagtaggtccaaataaggcaaataataaaagcattttactggcatacctgttgatccaactttgatattgttacagggtttacttttctgagactagaatgatttctcagatcttgtaaaacttcagatcttcttatcttctttatcatctcttgcctgccttcagacttttctttctgtatacacatgtgtccccataggcacacacatgctttatctctgagatttgtgacctttactaagtagcttcatgggtagctgggctacttgcttccaacctgagaacaaggcattaaatccatcagttagcttcaatgagacatgaattttctgagcacagtctctaccccaatctcaacctgacatctgctcacatagagagagaaaatatgcaaaaatctcatacaattcattcttctgctagattaaaaaaatcaaatcatgcatttctctgccagtgggttgtaaacactatttcccacataaaggagcaccgatggtgtcctggcacatatgtctgcctgttgcaccgtcatctgctttaactctggagtgtgatattgagaaggtttctgaggtcactctttgtctccactaggactatcatggagggttatcagtgcctgcagagggtgaaggaaggcagagagtgcgtgggccgtacatttgctagttttggttaggaacattctaatggcctaaaaaataaaaaagtatcctgaattatttaatgcatttcttttttgaaacccccgtgaaactggaggttaaactcagggctcaaaagtctcaattcccaaatctccaccagcatctatgatctgcaggttcaaccaagtcagccaggcagtgaccctgaggctggagttagagaccgagatgagggccccttagctaaagcaagggttcttttttttaaattgatacataataattatatgtacttatggagtacctgtgatattttgatacaggcatacaatatgcaatgatcaaatcagggcatttgggatatccatcgcctcaaacatttaccatttctttgtgttcagattatctcaaatcttctcttctagctattttgaaatatgcaataaattattgctaactctaatcactcagctctgctattgaatgctggaacttattcctgctctctaactgtgtttgtacccattaaccaacctctcttcatccctccctccccgtcactcttcccagccagggtgacctcaagtgatctgcctgcctcggcctcccaaagtgctgggattacaggcgagagccactgcgcctggccaaaataacccattttcttgtttaaaagccaagatgctaagagggaagaattttacgcaagatcacacatgtgataagtggtatgtaggtgggatagaaacccaagaatgccaaaatgtgcaccatttttatttttatttattttattttatttatttatttatttttgagacggcatcttgctctgtcacccaggctggagtgcggtggcatgatctcggctcactgcagcctccgactccctggttcaagggattctcctgcctcaacctcctgagtagctggggctacaggcacacgccaccacgcccagctaattttttgtatttttagtagagacggggtttcactgtgttagccaggatggtctcgatctcctgacctcgtgatctgcccgtctcagcctcccaaagtgctgggattataggcgtaagccactgcgtgccaccattttttaaaaaacaattattcgaagccctctctccaccatatactgcctttgtattccagcctctagccagttcttggcacccaccaggccctgtctacatggagagagactggttcacagacatcctgattctttggtctgtgccttcctctccagacatggaggacgttttgcagtctgagtggtggacttcttggctgctgctagttctgacattggtggaagccagtttgatatgcggttcttgtacattgggtcgtaaactgtttggcaggagttgggggcaggggaagaaaacattagcaatgagctctaacttgaggtaagtaaaccaaacaaacccaggcccaagtagattctgctgcttttcaaaacacataagcaaagttctctgagtctcacaagttcactcttgtgagctccttgaataacaacaattattcaaggtcataaataagtttacattctgcagtcccaggagcattcctatgtcggttatacctcttgcgtggaatctctgcttaaattaaatttgtcatttgattttctctgagtgagaaagcccctttaaaagaagacttggagttagtgatggccccatattagttagttaacaccggtttgaggaaaagcacagttattccacattcgttctgcaaaagtttactgaacacctactatgtgccagaccctttgttaggcactggcaatacaaatgtaattaaggcagagccctgtactcaaactgctcaagactaggggcaagaagatgactagctaagatatcacgtggtaagtggcagcatagaagagcgcttcccagagaagtttctgagactcatctgaaaggataactagggcatgtgaggtcaaaaaggtaggaagggtgctgcaagttgtgcaatagcacattcatagatacagtaatcaagacaaaaaaagtgggactgaagctgggcgcagtggctcacgcctctaatcttagcactttgggaggccgtggcaggcagatcacttgaagcagaaagttccagaccagcctggccaacatggtgaaaccccatctctactaaaaatataaaaattagccggacgtggtggcgggcacctacaattccagctacctgggagactgaggcaggagaatcccttgaacccaggaggtggaggtttcagtgagccaagatcacaccactgcactccaccctgagcaacagagcaagactccgtctcaaaaaaaaaaaaaaatgggactgacaaattatttaataaagtctgataacactattagccaaggtggaaggggtggatactctcatgcacgctagtgagagtgctagttgatttgttgatttgacccatgcagagagtagggttaaggaagggagtcctcagtacatggggctgtggaaaggcttgtattttttaagggcatcttagaatggcagggagatgaagcatagatggaattttctggtctcaaactctaaaagaaaccctgattaagctgtttctatgtgtcacaggctgaagccttgggtccccaatggaggctgactgagcccaggaaggattctaggggtccacagacccagaaggctctgagtgttagaggttcattgattcttgacacctcagtcctggtggcaaacctcagagctgcaggtagaatgttagggaaatgctatttgagttcctctgcgaccacccacctcagcgtctttgcagaggaacgtcactaagccagaagtggagctcagagtttcttgctctttgttgctttaacagtatcttggctccacaaagtcttgttttacagttttattggggagatattcaagtgtgtgtgtgtatgtgtgtgtatttatacttttttatactgaggtttaacatgaatatcttgtttagccatgtttttctgttgttgaatgaagcagattttagagatccaagatgtgtaagagagggtaataatagaaattgtacctgcaaattgccattcatccaagtggctgtgttacatttgctcatcagccctcccagaactttaataaggacagacagtggagaatgtgcggaagtaataatcaaatagaatactgtgacaaaatgaactttctcttgaatgagttgcagtgcttgatgttggaggctttagataaccactggggatttttggcaggtttgtaatgggatatctgtatttcagggaggtaattctgagccagcatgtgggatggatgcagtgagggatggactggcaatggaaaaccagcaatagccaggtgaaagactgggattgaaggcatgaattgcaaaggagaaatacaaagttaacccaggagtgagagacaaactgtcaagctgatagagccttgatgactgattggctgtgggggatacaggggaacaaaaggatcatgaagaaaagcacagctttgctaactggttggatgccctccccagaggcaggtgagacagaaggagcagcaaggccaagtgttgagggagtggaggttggccaggtactgagttcagccaggggcatgttgattttgaggcaccgtctacacatagaacaggctgggagtttcccaggacttatttgcacagtggagttatccagttttgcacagtgtgtgagccatttaaaaaatatttaaaatggatcacaaataaaaaaagttaactagactagatatcagtccaaatctcctcaaatagtggataattccaaaaccacgttctcgggaaggcatatttttctatttgttacctttcaaacagggaaggaaaattagaagaggttcaacaaccaacattaacttcatagagtgaaagccagaagctacaacagttaattggtagcacactcatatataacttctccctacagaagagaactaagaattcctttactactttctggtgcagatgttccaaaataatgcacataacagctcttgtgctttcagaacgggcagtacaggttgtgatgtagtgagcctgattccacaaacacatccaaataaacatcattatagtcacatccagtgtaagcattattgacacaaggttgtagttaattgtgaaataaactgtatgctctttattcaatctctgtcttcaatgttggttcacagtaatctttcctgtatcaggatttattagttacattattaatattaatcctgtagatttccatggtaattagcaggcaattatagtacaatttcagttattagcatatgattataggatttttgtctgtgtcctaatagaaatctatttcttaagagtcaatgtttaaattgtgctctgctgaaagtagttttatattaaagtcacacttttttgaaaacttaagttttcaaaatgaaatcaaagcatttcttcacgtttgattctccatagttctctttgagggcaaaggaagcctcttaagagactcttgatcacagactttagttgacctctgtggatgattcagcatggctatcctgttaaggtctagaagctctttttaatctggagtcatgctccactttcaaacaagaatcataattaaacagtttatttaaactgttaaaaaaaaagagttttttttatttgagttttttagaggaagctggctttggatgagccctacaagcatgctttctcagtttttatagccagtcctgggctgggctactctgagagctatgcagaaaagtgggagggtggagatttaaggtggtgtgtaggaagaggtgacgtccacatgttgggaagtcaggtagccaggtggctaggtggtcaggtggctaggtggtcaggtggctagctggtcaggtggctaggtggtcaaatggccaggtggtcaggtggctaggtggtcagatggtcaggtggtcaagtggccaggtagctaggtgaccaggtagccaagtggtcaggtagtcaggtggtcagttggccaggtagccaagtggtcaggtagtcaggtagccaggtgatcaggtagccaggtggtcaggtggctagctggccaggtagctaggtggtcaggcagccaggtggtcaggtagccaagtggccaggtggccaggtgatcacgtagtgtgaatttgtggcccaaacaggcctgggagacaagagcaccagcaactccccactttcttcagcagggcttcccaccatcccacctagtttagttctctggttctctggagggctgtccttttccccaaattatacagatttgctctctccctacagtctggaaaatgtaggtcttccctcctttaaaaataactcaagtaaataggatttcattttttgatgtttttctaggctgtttccatacttctgaatagatatgaaaaataaatttgattacaaaccaaaccaaacctcttgagagctcccaaattaaaaaaacaaaatccaagggctggtgagaattaaggctgtagttggagctcagtcagaagagcgagctccatccccacgtcctccataggaccagatgagaggggaactctggggtgtgagccagcaacagcctcacttgcagctccagatccttcctctgttgcatccgcccttgctgttatcacgagttcatgtgcagtgtaagacatgctctgttttctagagacgtgctaaagctgcagttatggaaaactccttttcatctcaaccttgattagaaacagttatgtgataaaagtacggtaggctgtgaaggttaattaacttaaaacactgtaaatgcaagtgttctctaaagtttaatatttgtttaggcagaaaataattttcaatcataattgagccactgtgggttttcagttactggatacctgtctcaggatgaatcctggaaactcattctgttgaggctagtatctcgggaaaatcccttccgctgtgtgtgtgatgggggtggtcctcgggctccctctggttccctccagggaagggtcaggattctatccccagctccagtccctgatccctgcagactctctttcaagctattgctgggccctcttctttccttccacctcatgtttctttttttttttttttttttttttttgagacggagtctcgctctgtcgcccaggtgggactgcggactgcagtggcgcaatctcggctcactgcaagctccgcttcccgggttcacgccattctcctgcctcagcctcccgagtagctgggactacaggcacctcatgtttcttaaaagaggagcctacacttcctgcccgacatcttaaactgtcacccatttctcaatccaacataatctgtcttttattaatattttaaaatgacagatatcttttcacccttcactattttttcctacttacttccaacctcttgtttgacccatctctggggttctccttgcctagaatggccctctctcgcttcttcacctggaagacatctcacaccttgagaccttgttccctgtccccacttgggtaagatcttcttaatcttcccaggtagagtccactgttccctctgcaggctttggtttagatctaaacaatagcacttggcagtgtttcacttggtttattcattcattcatttattcatcctactagacgctgaactttttgaatgaagagaggatttttttaaccttgaatctttgtatgcttagcagctggtacagaacctggcagagaacagatgctcaaccgatgttgcataatcgatgagcacactgccatgtgtggttttgtgcgtttaggtgacagtgacagtaagcaggcctgtgcctggttcactgagaaatctgactggggttggactctcctctttcatgctgaaagaatcatttctggtagtatttttctgatactagaagactaaatatgcctttagtacttccatttcttatatttaaatatattttattgtactataaacattttgatataacttaaatacctctgagacttaattgctagcctacaaacataatatatatactcataaacaaaggtaaatgtctccttttaaacttaactagaaattatttctgttttcctgaaacagacgtggaaaattgttgaagggcaaattttttaaaacaagtaggtagatgtggaattaaaacttacaacgaatgtgtcccttcgtcattttccttcactgctcctcggaactcagtttatctggttccagcacattattgtttaataagccttttctgatatttctcctactcctggaaatgttaaagccatgagcagttaaccagaaggaatgttacagagaagataaaagcagacgatggatgcttgaagagacctctgagagtctgttttaatgacagggtaaagctgtcctatagagatactggtttagatgatgagatttcaaaatcaaaacacacacacatactcacacgcacagataactgaaaccactgatagacctgctgtgtttagtgctatacaatgctatatttcctatctgtcatttttttaaatacacatttactggacattgagttgtttttcccctaaccggtgggacttttgttatatccatagctataacatcattctttcatctccaatgtggaatttatacttttatttgatttcatgttttctgtttgggacctcattattttctttttcagatgtgcatttaaggaaacttcaggcactctcatagtattatagtttttaatattattggattggcttaaaaatgaccaaaaaaaaacctagagatacaattagatagttcatgaaatcatatgtttcatgaacaaaactatagagccggtctattcagccaccctctagcatttgctagaagtttctctccctgtggccttcaatagaaacaaatatatgtctttgtaacatccacaagagtgaaattaggcaaatttaaagtttttcttccttgtttacaaaacctaaaacttgccaagttttttcaaaattaaattaaactctttgaggttgtagaagccaaaataaggtaaagctaatctgaagaaaactctttgaacaggcttcaggaatgtggaccaccactagtttctctgcttttggaaagacatgtgttgaaataattgagtgcttaataaatgagagtctcgtcattgtttaacaatcctgtgccataggtgctgtagtgtctccatttcgcagataaggcagccagcttaatgaggtcatgtagttctccaaaggttgctgtggactcaagtccactcacacatacagtctggggtcagcattagaacagtaaactgtaacggcaacagcagtttccctccctaagagaactcaaaatcctattttgacataatatcaaaatcctctaataatttcagaattgatgaaaaataagtaaaagtacacaggactagcaacatgagtcattcaagtagcagttaatgcaaaaatcattcctgcaacaaactagaatagtgcatgagccacttcccagtggctccccacccccttaacacaggtaagaggtttaccttcctacgtcacttaactcattctgtgtatgtgatttgggcagccaggggtaagtgggaagcttgaaaatgaacatttatcttactgtattttgagttgcttaagtaattgggcttgtagttcaaatttagtgaaagataatccacttgaagatttatagtctttcttctgcactgccaattaccaaaaagttatttctagtgtttgaatctattcagtctgcaactctgaagtacaactataagtgtttgaaaattatttctcacactgagggttgttagacactagaatgaggctgtggaatcttatagaacagacattcttgagtctcttgccaataatataaaataccaccacttcagaaacagttcagtttccttttataaattatagtcggtttaaccaagtgttatagtttctggatatgtcatctggggtgggaaaagattagggagctttgtggtagaaggggccctgtttgtcggggtgattactgctgattaaccactttgggcagtaacttctaatcctacgtgcctataacttcttgtctccacatgtactcccaagagtgtcagtatattagacaacagcatgaagaatggaaaactggcatatgcttgagtagttcatgcagtgttttaagcatgttacttaccaaagcacagtttgcattttcattcattcagaaaactgtcagaaactgccaggtacttttgtgtgatttacaaattaaatttgtggacagagacaaaatggttatagttaaaatctccctgagccacatggactaatgaaatgagttgaatgttaagcctgtctgagttactaaatctggagctatgtgctgtggtgcaagcacgggcacgcgtgcatgtgtgtttatgtgtgtctatgtacaggatatgacctattgtcagtttgaaatcaagtttgttagtcaagaccaacattcttaaaaaatgaaatcagacagaataaaaaatactagcatacacagaacatagtaataggttacaatgtcaaatgttcatactctgtgcttatggtcagtacaacttgaaagctgtaacattgtctatataattccttctccacaaacaggagggtgaatcaagcacatgtaaaatattagatgtagcctaaagagaaagttctaagaaacacaaatggtatctgtgagggtattatactaagccatggagagtaaatagtaataatattactaataattatgcctttaatgatatattaatagacgggtcactctatgctggtcacatatgttttcataatttcagttgttattgtcctggattatgtatggaaaggtgctcatctggctgtgtagcagaggagtcaaaggcctctggcatgtatgtagatgaatttcgtaagttctaatcccagcctggcccgttacaaactgactgtgggggatgggagagtacttacatgcttgcctgtttcctattctatgaggtgggaataataataataaaaagataccaagaaaaactgtctgaggtaatacttgtgaagtatgtatgtttagcacagggctctcaaaaaatggtggccattattattatttgctcatggaccagtatttcaatgatggaaatactttagtgcctctaaaaatcagctctagtgttaacacacttaaggaaacccagtcaggtcacctctgactctgtaaagcattataaagaaaataatgaactcataagtgagttcttgtgagtcattcaggttttaagaagccactgctttgattttgaaaacagacaaaaaaatctcagaatctacttggactagggttcatttattctgcctgtttcaagtcagagcaaatactcctggaatgaccctctcctgtttcctgagtttgagccgatcctatttggcactgcagacagggagaagtggatgtttgaggacagatgggaggtgcaaagtggagacaagtattggtcccaccttccactatgagactagcagggcccagttctcttagctattgtctctattttgtagattaggaaatttcaagtttagagaagttgagttaactcaccgaaggtctcggggcttggtgggaagagggacggaaaattaaattcaggtctgtgtgtctccaccaccatgttccttctctttataccttgattgccacccttagaattctaagcaccacggccccaaatatataaactatgtcgagctctcagcttttgttaaaagcatcttattaggccatggtgtatgtaccttgagtcggcatttgtgcccagagccattttcagcattccagcttcattatttcactagtccagacagaatccgcacctttcagaagagaagcaatctttatattaattatgccactccttttaatctccaaaaatatatacaaaaataattaaaaggggtagttataatttaccaagcgtgtgaagctcaattaaggtggaggaattaacactgcctttgacgggatttccagaatcacacttgcccctacaatccatttgaagaaagctcagcctacagaagtctgaatttaaaaacctattaacaggccagtgattatatgcaaaagataaaaaataaaaaaataacaaaaggattcaccataacaattcaaatagaattggatcctataatttctgtgccaaatatagcttgccagaaacacaaacacaaagcattgcactttcacacatcctcagcagccctttgcagaagcactgcaacgtttatcatcatttccccaacactgacacctcttgttttcttagaaaggctaactttggaatttttctttcgatcttcacagtgcttgcagtatgtggagatattttcttgtttgtctcctctctactgaagcaccccaaccttgtccttcttgtcaaggaatttgcaatgatcccaaaatgtccagtctctttgcctcatcaagcttacattccttcagtgcttcccaagaaactagtagccattgtaggacatactatgatcccaatatctgctgacaatgtgttgttgaatttgcaagacaaatatgggcagtggttaaaagtgtggctttttgcatcaagcagacccggattcaaatcacaggttggcttgttaccagctatgtgattttccacaaacagctgaacttcgctgtgggaggaagatgctgattcctgcttcatagagtggttgccaggattagcagaggtgataaaggcttcacataggcttggcatgagcttgtaagttctctgtttgtggcagttattatcctaagggcatttgcattttaatgccaggagatgacaatgtctttatccaaaggatagagtgtttcaggatgagcttccaggcataagaataagtagacatcctggagcaggtggtgcttgaatcttactgtgcaggtaactgcctgtcctcccatattggtatttagtcctcctaagaagggaaatctgagaaacgaaggggaactgtcacatggacttcattgacagttgacgtaggaccttaatgacaggtacagcactttctttctttcttttcttttttttttttttttttttttgagacagagtcttgctctgtcgcccaggctggagtgcaatggcacaatctcggctcactgcaacctccgcctcccgggttcaagcaattctcctgcctcagcctcctgcatagctgggattacaggtgcccacaaccacgcccggctaatttttgtattttcagtagagatggggtttcaccacgttggtcaggctggtctcaaagtcctgacctcgtgatccacctgccttggcctcccaagttgctgggattacaggcacgagccaccatgcccggccagatatagcactttctaatactgtgtggagtgaaccaaaggcaccaaaataatccaataatgaagttgttccttttaattattttggcatttccatttgccatcgaacaatattaagtgtggtccccagaccagccacatcagctctacctgagaccttgctagaaatgcaaattcttggccacattctagacctatggaatcggaatctctgagagtggacagagaatctgcattttaccaaagccctccaggtgattctggtgcactgcaacattcgagaagcaccgttatagaatccctcaagcctgtaagccatgggaatttggaaacacttgttctgctttgggaggatcctagcagaccccagagaatttccatgtgttcccatacacttcactctgagattccaaggacacacacagacttagagaggaccttgaacattttggctatatctctggcagcacatgacattaacaatgagattaagttcattcttatttcgttagaaagactcccattttttctacccatggttttattctttttgttgttgttgttgttgagatggagtctctgtcacccaagctggagtgcaatggtgtgatctcggctcactgcaacctgtgcctcccgagttccagtgattctcctgcctcagccttcagagtagctgggattacagacacttgccaccacgcctggctaatttttgtattttagtggagatggggtttccccatgttggccaggctggtcttgaactcctgacctcagatgatccacctgtctcggcctcccaaagtgttaggattacaggcgtgagccaccacgcctggttggcataatttttttaaacctgtttcagccaataataatattgttgcatcatgcctgttttgggaaatattaagccattttcctatttgttcactcatcctcgccaggtagatgttagtattgtgtttacaaactagtatttaaaatatgtagtttttatgttgccttgtcactttttttaggggaaaaaagtccatttgaaattcaatatgttcacaaagatgtattttataattgtgttttataattcgtttaaagcggggtgattatttttcagctatggtaactatcattgcaaaaagaagccattcactcagatcacatgagttctaatcacaggaaggaatcccagacgtaggaggttgagtgggaccctcaaaaatgatatgtcctcgtcctaactcccagaacctgtaaatatgaccttatttcagaaaaagatctttgcagattgtgattaaggatctcaagataagatcatcctggattaaggtgggccctacatccaatgacaaatccttaaaagagaagggggaacaggctgggcatggtggctcacacctgtaatcccagcactttgggagaccgaggcaggtggatcacctgaggtcaggagtccaagaccagcctggccaacatggtgaaaccccatgtctactaaaaatatcaaaaaaattagccaggcatggtggcaggtgcctgtaatcccagctactcgggaggctgaggcagaggaatcgcttgaactcaggaggcagagattgcagtgagccaagattgcaccatcgcactccagcctggacaataagagtgagagtctgtatcaaaaaaaaaaaaaaaaaaaaaaaaaaaaagagagagatagtgaagggggaacagatgcagagacacaaaagggaaggccatgtgaagacagaagcggagatcggagatcggagtcacacaccgctggcatggcacagcttgatttcaaactcctggcctctggaactgtgagcaaaaatattcctgttgttcaaagccaccatgtttatggtaattagttatgacagctcaaggaaattggcacagcagctcattactatgccttttcctgactacagctgtcaacatttacaacattcgggtttgagaaactttcttgaggaaataagttgaggaaggctcaacaccaggttactgagtttccattcctaccgtgggccgtaaactcttaagcatacaacactcacccaaggacattcacccagctttcagaaaccagaggcacatctgttaccattttatttgtcggacaactatgcatgtggaagaagccacattggtgtgcatcagctgtttagtcccttggaagactttgagagtcgtgaagtgggagcagagctattgtaccacctgtggagactgaacacaaagggtagagatgagcagacatttcttgtatggtataaggctagagaggagtgcatgacattagtctcttagttatctttcttgtttagaatgcctaaggatccatccattcattcactcaacaaacttatggagcacatcctatgagtatgatattaagaactgagaaagcagcagtatttaagataagttccttgccctcatataacatatataactaatgagaaatgttggtgataaatagtaaacgaataaataaaatacttgtacatgccatgaaggacatatacaaggtaatggaaccacccaataaaaagtagtcttactatccttttgttttgggcatacaaaagcagattaaggataatcgtcttgttcatttatttatctatatacttatttatattctgtctctaggactgaaaaagccaaaagatcagggacctagttttgtttcttgctctttctcaagcatgaggacactgcctggcacatagagggctcacagtaaatatttcctcaatacatttgttgattaagtgaaggtgatagaaactgacagggaccttgaacaagattagagtattttatctgtatctatattgcatttgtttttgaaattctttccttatttgagctaatacaattttaacagaagacattttttatgtggagaagctataggaaataaaacctcataatgttgtaactcatgagagctaggatacatgtttgaacaaattttcttggtttgtctttatttctagatatgacatttgctttcttttttacaattcacctaaaggctgcttatttttaaatgtgtatttaaaacttcaaagttgcgagactatcttttagaataattagctataaagaatcaaggacttcagttgatctaaattcaacagtcttcttttctcttcaaaattttaagagtttggctggcctgctggaagcacaggtttatatttaaaatcatcccaagtatagtcgtataaccttattctaaatttgaaagatataaaattgtttttctttgttttttgttttctcttttagctttaactatttatttcaaaatcagtaaggaaactgaataccctaagaaaaaaaaaatgggcaaaggacagaacaggaagtgtttcaataaataaatgcatttttaaaacaaagaaaagggctgggtgccgtggctcacacctgtaatctcagcactttgggaggccgaggcgggtggatcacgaggtcaggagatcgagaccatcctggctaacacagtgaaaccccgtctctactaaaaatacaaaaaattagcctggtgtggtggcaggcacctgtagtcccagctactcaggaggctgaggcaggagaatcacttgaacctgggaggcagagcttgcagtgagctgagattgcaccactgcactccagccttggtgacagagcaggactccgtctcaaaaaataaaaataaaaaaaataaaataaataaataaaacagagaaaaaagtgaagaaatacaaagagtcaaaaacaaaatgaaagatggttcaacctctttcacaatcaataaattacaaattaaaataatgagtcaccatgttttgcatatcaatttggaaggaaacatttggaggaaacgagaacacatgcatatgcgctgttactgtgaacgtcaattgtttcaactttagcaggaacactttgacaaaatgaattaaaagccttaaaaattttttttcctttgacctgctactttcacttctaagaatatatattaacgaaatataattaagcatatatgaatttttagctgtatagataattaaaacattatttgaaatagaaaactattggacatcatctggccaagacaagcaaaataaagtcctggcacataattcaatttagtagtatttggccattaaaagtaattttacaccagtttattgacatgggaagatgctgatgatgcattaggcaaaaataaataaagaaataattgttacagtattgtataaaatatttacatatttttgagaaaggtaggcagagagaaagataggaaggatgaagtgtaccacagatctgtttatagttggttatttgtgggtgagaaaattgtgattgcttttaaatatttttcatatttgttcatggtctctgactttcctgtggtggccacacacgcttttatattgaagtacgtgctttatttaaaatgtaaacatgtagtttggctttaaaatttccatagggggaaaccatagaaacacagcaaaggacattagtaagcagtttccataaggagacacctagttggctatcctgtgtgagaagagatgtttgaacttaaaagcggtagaagaagtgcaaatatgttgtcagtggaatgctgccttgtgctcatcagattagcaagaaagtagagagaaaaagggaaatagagttctggtgggaggctgcactggctgatccatcctggagagtgaatctggagggctgttctggagagcacatttagtaactttttatgtgatcagtcatcagttcagctcccaggagtatgaatttttatcacagagatgtctgtaccagagagcagagaccactgaagggtccatctctgggatgggagataagtaaactgtggcgacagtccctggagccacagttagaaataggcatgcaactatgctgctataaagacacatgcacacgtatgtttattgcggcactattcacaatagcaaagacttggaaccaacccaaatgtccaacaatgatagattggattaagaaaatgtggcacatatacaccatggaatactatgcagccataaaaaatgatgagttcatgtcctttgtagggacatggatgaagctggaaaccatcattctcagcaaactatcccaaggacaaaaaacagaacaccgcatgttctcactcataggtgggaattgaacaatgagaacacatggactcaggaaggggaacatcacacatccgggtctgttgtggggtggagggaggggggagggagaacattaggagatatacctaatgctaaatgacaagttaatgggtgcagcacaccagcatggcacatgtatacatatgtaacaaacctgcacattgtgcacatgtaccttaaaacttaaagtataatttaaaaaaaaaaagaaaaaaagaaataggcatgcaacgagcagtgaggttagatccgaaaaggtctgtagtctggattgccagatgaaatacagagtgccagttaaatttgaatttctgataaataatgaatacattttgaagataagtatatcccaaatatttgcccaatctggcaactttagtcatggaacaacagaatttatgaaaattaaagctatatacacaggcaattcaaaccaatatattccgtaagaatatatataaacacatttatagctattgcatttgtgggaaggataataggaagaaaaagaaatacatagtaaccaaataaagtcataaaataagagaaggccttgaatagaccaactatgattaactcaactctccatacctaagtccaaaaagatttttttttttttttttgagatggagtctcactctgtcacccaggctggagtacagtggcatgatctcagctcactgcagcctctgcctcccagttcaagggattctcatgcctcagccacctaagtagctaggattacaggcatgtgccaccatgcccggctaatttttatatttttagtagagacagggtttcaccatgttagccaggctggtctcaagctcctgacctcaggtaatcctcctacctcggcctcccaaagttctgggattacaggcatgagccaccacacccggccccaaaaggaaattttaaaaaagctttactgtggtctcctgaatttttttttttttttttttttttttttttactaaagtactgatgacactgcctggctgataaacagaatattctgttctacaaaaaattccatatgaagtaccctggtacttctagcaaaattaagtggcagaaaagtgagcaggagggagagtgggtaggtgacgtagggcttgggagaaaaaagaaaaccttaataatcttataaaactagtaaaaaatgaaactaatgaacaaattagctaagaacattggtttgcttagttttactcttttaatagaggaacacgcttacattcttatagagtaagtattagtaaaagaacatcagtgagcaccagtccttaactgttagcatggagatagcctgaaaaataaacgaagtttaaatttacccattggaaaatgatggttcagtacatgtcactgagtcactcttactcctttaaaagcttgttctttttttaatgttacagccgattacaaggagagctttaatacgattggaaacattgaagagattgcatataatgctgtttcctttacctgggacgtgaatgaagaggcgaaggtgagtgacattgattcattgtttatacctcttaatatgtgcccatcctcagcagtttattcttttttaaaagcctgtatcagtagcctcctattaaaaagaaatgaacctttcatcttttgcctttgtggagggtaagggagaaaagggagtgtgctcctctgtggcttcctgtagaatgtaatgagccaagctgcgtgtcccacccaaatccttcaggccccaagcttcattttagcacttggagctgggaagatggggcctgaaaaccttttccctctgcagtgcagattcccccaaaggcgtctctgtgcagcctcctctagacacagagagaggagctcagagctgatgtcttcgtaggtaagctactgggtagacccctgaccccatagccccttccaggcttaagctggttgaaggatggaatacaggaagcaggctgcaggtccctgagctctactgatggaggtgtggtcaccactgtgaccttcagccacttgtttaatgttggctgcttaactaacctttttctgttttttggagtgcccacatggttaagaagtacaaaggtaaaatctgtggcgaagtgagccctgagaagagacgtccaccattgcaacggtttggataaaagaaggcagagtcattgatacctagatttgctttccagccacgagtctctttgattttatgaaaaccccaaaccgttctgctatgcccactctcctttctgtgttccttagcttctgatccttgattcttattttgcactcatgggaaggtgccagatgaaacctaagcttgttttttgctttggttctggaccatctaggagggtgttagaagagtttgtcttcaaactaatgaaaaggtcaatgtacactgctctggtcgatgctttattgtctgcgagcagggggaaggctgggtgagaaaggaaacgggttgggagtttgcaggcacggccacagaagaagaattgcccagtgtctcatttcactcaagtataaaacaatgtagaacaggcctgagaaaggcggcccaaatgggcaagtggtgatagagtgcccgtacagcctggagaagtttccgtggctcagtgcctcccagaaaggaagcaggccttgccatggggtgtgaggttggtcccacacagaactgtaggcaaatgtgtctctaaggtccactcctccttcatttaaagtttcctgcccaagccatgtgctttcggcactttgttaacctcctcggctacccgagccccgttctccctgcccctgccctctcctgagaacatcgtgctcctgtgcttagggctgtctgcacctttcccacatccctgcctagtgcctccttattccagccaattcctttctcatcgttccctgttctctcagaggctagattgctgaacctgatcggtaagaggcagtctgtgtgacggcacaggactaggatggccactgagtcatcctgagcaagttatctgacctctctgggcctcggttctggcatgcagacaaacacacagatttccaaatgtctctgctgcagccagcatcatgctgagggcataaagcatgatgatccaatgctctggggagggaggcctggaaccagtaactgagcaacagtgtgaccagggagaggcagggcctatgtcagagtccttgggaagaaaatgggatcgtgtaactggaagtgtcttatcaatgttaaaggaccaggcatggtggccgatgcctgtaaccccagcactttgagaggccaaggtgggaggatccttgaggccagaagttcaaaagtaacctgggtaaagtagggagaccccatgtctacaaaataaaaaataaacattagctgggcagggtggcatgcatctgaagtcctagctactcaagaggcagaggtgggaggattgctcaagcccaggaggcagaggctgcaatgagccatgatcatgccactgtactctagcctgggtaacagtatgagactgtcttaaacacacacacacacacacacacacacacaccccaccaccaccaccaccaccaccaccaacaacaacaacaaaacaaatgttaaggcaagctataactatgagctgtaatcattaccataattttaattatcatgcaatctgtgataatgagtgctagtgggtgaatgctttaactgttctgcttcaatagggaccttttatagaaaatgcctaacctggaaggtacagtttaatgatggaagcttcagactctgcagtaaaccaatgagatagttaatgtggagttgagttgatcttccagcccagttcattccataccactcattcaccataagcaggagcttactttccttgtctaaatgtgtgtgcctgtgcttgtgggtgtacatgtgagtgtgcatgtgtatgaacatgcatgttgctcagagcagtcaagtttaagctcacatacgctttgaaaaatggcagtggaggatattttatattgcattgttttatattgcaaaatttttttaacttcattaataatattttaagtgattattacttggtcgcagcaattgtttgaggtttgggttaatcaataagtaatgaaaaaagttccaaatatttttctccagactactgaagagcatttaatgttttattttactttaagttcctggatacaagtgcagaacgtgtaggtttgttgcataggtatatgtgtgccatgatggtttgctgcccctatcaacccatcatctaggttttcaacaaagcaagaagtaaaagccttgcatgcattaggtatttgtcctaaggctctccctcccctaggcccccacccctcgacaggccctggtgcgtaatgttcctcctctgtgtccatgtgttctcattgttcagctcccacttatgagtgagaacatgaggtgtttggtttcctgttcctgtgttagttactgaagagcttttaaagagaaatcataaaagttaaatctacttcattagaaaggctgagaggattttttttgtctgcggagcctaaggcatttctctaaaatatcattgattttataataagcagactacaaaaggcaaaattgcatgattgttgacagaaaggttttcaacaaagcaagaagtaaaaggcatccctctcacagtggaagtgtttgtgatgttcatgttgtggacttatctatcaggagcagttgcatttgcattcaaattcccgttggtaacgtctgcacagaaactttcacaggcttcagggcagcaggccctttcagtatcacatgatattttggtttgtgtggccagaggacacaaacctgtggcctacagccttttgatggtccacagaatgcatatatgtatgtgtgtattatgcatttttgtacttctgtttagaattttaacttttttttgcccacattagataatcagaagattattatttttaaaaatccaggtttttaagtctcttggataattaaagattctggcaaccattaggcctgagtgtttgcaaggctctaatgaggtactgggctctttctttattgctttctctagcattctgcattctggaactttccctacctagctttggcgaacatttgagttttcatgcccaactatgtcccccaggcaactgatatgcagtttagctcttcactgcctttcagcattcaggagggtaggctgaagctgtaggtaggttcagtctttctgccccggagctcagaggaatggggcgagtaaggccaccagcattccctggctccctggctcctttggcctggtcctcatggggctgcagtggcagcaggccagacactgatttgtgtccccactgttgaaaacagaatgtgtgacattcttctgaatgctcacaatagtggtaaatcttgatctttcaagatgtttaaaaaaaaaacaccagaaaccaccttgatccaaatgtgaatacatatcaacaagctggataataccacttgaggattaagaatgaggttttttttgcaccaagttttatatatcatctttgaagctggccatatcagaggagaccttctaaatatgctttaaagccatggcagcatcattggagaaacctgtatgtcttcccaagatgattatgttaaaggatagcttttatttggatatttaagttttgatgcatttatttaaaaaacaaaaaacaaaaaaccaatccggtatttggtattcttgccacagatctgtaatcaagacctgataataaggtttatggatttctccaaagcatacattttctttcattgctgacttacattttatttctacctctcatttagcatgaacagaaaaaaaggaaagacatgaaactctaatcatttaatttaattaaattataggaaaacgtttggccagggaaggtgttaaagctattagttaaaatgaggtttggggattaattccagatttgcagtgtccattgcaggcggattctggcagaactattgcagagttcttcaacccaaaacccgttttgctggttgtgagacagagtctttctgcacaatgacacatgcagcaggaatagtctccaacaggatcagcttttgccctcagggtctctgcaggctggaagcctgtgtaatgtgaacaggcgtccctgggcttctgatatctaggaggacaaggttctgagtgtccacactgtcactgcttggaaattgatggcgggcagggcccagtgtgtggcagcagaaagagcactgaaatggagttcagacctgaactccagattctagctagattctaggccagattctagccctggcactcgggtagccagctttttacttcccctgttgagttttttttttgcaaaaaaaaaaaaaaaagccataaaacaatgggaagtgtgtttgtgtgtatgtgtgtgcatatgtgtatgtgtgtgtgtagattaagatcccatccatatgatcccaatgggaggacttctgtgtcatattctttcacatgactcccatttacaagaattttttaattttctttctctccttacccaaacaccgatacctaagaagtagatttgttggtcactaatccctaagatgaggaattcccacgcaagaccctagtgagttattaaagggctgtgagctcagattcctggcaccgagcactgcctttctctaagtgatgacatcacccccagagcagagtgcagcaaaccctaattacaggcttcctttcctcctagatttctaaggagagtcttgaaactgggccccttatttttgtccagggctgttttctctgttcgcagtgattttaagattaaaccaatcttggtgtgctacaacgacctctgtcatgtgaccacagagaagaattacttgagcattaaagatgctgcttagtgctttgtgctgactttcaggaacacttttcctttttggatcttttcactggaacaccgtaacaatttgtccatgtctctatgcttcacccttccttggtttattatacataagattaaaaaaagccttctttccatgaagctttttttaaattgctctgcctccaagccttttagaatgaccttagttcaggattcagtgaaaatgttcactaccatcacactaatcatgctgacagataagtctactactggccatctccgatctttatgatttttagaaaagtctattataattcaataatatgaaactctgatctcccagggttgttctttgctgcattctagcccagtgcctctgctttcagaagcagactgattactttcctgagtgatgtctatcctgctcctccttcccgctgtgtgttgagttgcaggagaggacttaggggtattggtttgtctagccttctgctttgccagagcatcagcaaatgttcttcctgcattttgggattagggaggaccttccagacaggaagttgttgcagttttagaaagggccaaggacacaagtaaggcatctgtttttatctctgttaacaaattttcctaatgagattggaggtgggcagggctgagacccaatggaggtggggaagggagcaaagagcctaagagacatcatggataatcttcttgggccttttagattctgattccactaaatattacctctcaacatatcaggccctgcaagattgggcaaatggaaaaagttaatttagaacccagggccctatgagtccagagcccatgctgttgactctcccaatagagagaaatctgatttttgttttaagccaaagcaagctatgattttccttctttaagcaatctatagggtacaacctgtttgtatccagaaagaaagaaaatgaatggctgactccatttccttgagcaaagccgttcaatcaggccaccctgcttttgccacctgccctgtcctcacgccacactttctccttccccacaaagatgggcctgctggtgcagcacttccagcacatagggctctctctatccacgtcttctgttgccctggtacatcacctgtccatatcgtgcatatcattgaccggaactgatgtgggagtgaaaactccttgcactcttcaacggagcatttgcatgctgattagcctaacactagtgagctcctctgcataattcttacctcgctccaaagatcagtgcatgctttcaattacagtgctgagacatatcagtgttttcttctccatgcctttacacatctattcttcatttcccccatctctctctagctcctttccctggcatcctgaatttcatttttattcatttacatgatctctgcacacctttctttagtatattttttctgttatgaatagtggaggcaattccttgttctttttttgaaaaaccatgcaagaagcacagcactgagaaatttccaaagcaagaatgaggattatgatcagagaagatgaagcttgcaggaggcatacagtgaccctccgctctacatgtgcaacttaagaaattcaacaaacaaatcctcacatttaccagggtggtaattggaagtgactacttacacataagccaatgttccttttatagagagattcctctaatcttgggtctctttggaatgcttcaaatgcattggatttacaaaagagatgtgcatgtaatttttgaaactgtgggaaaatgcaaagtgaggagacatgttgatatttcctctgggccctatttgcattaatagttttgccccattgccttcctgttggattttgctttaatactgacaaggaggtatcatctaagaactgagagccagtctcagggaggtaaacagggatgtgctaagatgagttggctggtgagaagaaactaaaagtgcaagttgaaagtaaaatgttctcatctatatttgtaaatccactttaaagggagaaaatgaagttgatttaatgtcccagcactgcctgacagctgccctggacttaagagtgcatttgatgtggcctgggtcatggtgactgcagtgactggcttcatgttgtgagatgtgactagagccatcatataggctgacttactatttctatagaaaacccagctctcttccttctctcacttcctccactcacctcctctctcagtgttgtcttttcaaggtgagcaagccaagcctagctttctgctccagcagctgctactagagaggaaaaataactctatgtcctcattatctcaattttagtagcttaaaagataagatggtgagaactgcagggctttggccatagcttatgaaaaaggagtaaattggagaaaacataggtgttctcacttctcatacgctgcaaattattcagtctctttgggtgaaaaatgttatgctaattgaaaggctggcttgtattcggtaccaaatcatggcaaatccatcaacttgtctcaaatgtgttcttttttctcctttcccccttccctctatctctcttccggttctttttggtctaaactgcttaaccagtttttattgagcctccattgtgtgccaagcacagttcttttgaaaattaaagttttgatagtcttaacggatcatgctttccaaagggctgttcctaaatggatggcgttcttaatctgctgacctccactgctggataccaaaggagaagggaagatgtgtaaacactgtttttcaggatgcaaatggaaaccaaaggactgtctgaaggagactacactcctgagtgccctgtgggttcatgaccttgcttattccacagcctgcacccctcagcggcccagtgcttttgtctggggagttctctttctgcttacaagacagtctaggatgatatggggttgatagatattcatgattaagaaaaagttatactccaattttttgcctaaattaatgtattggctgattttaaacaggcgatcttgtggaaaattacagaatattacagaacatatctcatggtctgaaaagtaaaaatagggctggggggcactcctgggaggggtcttgaaagattgaattgcacactgcaaagcagggcaaatggcatttttttatgtgtttgctgaggtgtggtgtgagtaaaggaagccttaaaggagaaaagtaaacatttgctggagtctttggtattgaacttaaacaaagccatgcctttgttccagttttataaggtaatggatgttaggaaaagctataaagctggagttaattcatatataaaaggaataatctttggaaggcatctcaccaaaggtatcaatggctagatctttgttagaatgtgaagtatccatggtttctggactgaattttgcttaggactctgtaattaacatgtacaaactattgtattgtgcagagaattagattgcatacttggatttcataaaatgattgtgtgtgcgtgtgtacacaatgactaatatttgttcagtgattaccatataccaggcactctgccaggcaatctatatgcattatgcaatattcatatttttaagtaaatagcagtttccatttaactaatgaggaatttgaagcccagaaaagttaactagcttacctgaggttgcacagctggcgcctggtagagctggaattctaaccttaggctgtctggttctgaagcatgtgctctttccatggcacctttttgttttggaaagacctagtagtaatatctcctttattatctctgacaagggaataaccattcctgtgaagctgcgcacccactgcatatcaggcactgggccaggcggtggagggtcctgaacaaacaagccaggcagaatccctgcgctcagagaatgtttggactaggctagcaactgagacacagatgtaaataattgtaatacaaggtaggtaagtgacagtgggtctatgggagataaagtgctagaagaggtctgaagagagaggcagctccattttttatttttctacattttattttttaaaatttcaagtgaaaagttgaaagactaatacatttgataccacttaccctttacctagattgactcattgttaatattttgccagatttgctttgtctctgctcactctctcacacacacacacacacacacacacacacacacacacacacacctacacctcatttctaagtacttcagcatgtagagaggtcctctttctgtgggatcaggaagacacaaggaaggacgtggcatgtagggtgtgtcttcagggtcaggtggacttagacataaggaagttggaagaagagtgtatggtagggaacaagggggtgtccaaaggtgcagaacctggaaagcacaaggagagagggcactgtgccactcaggagagtgtgacactcaggagagaagttagtgttaattgtaaagaggggatgattgaagtcatgagaaaggacgagattgctggggagagaattggagggtgggcaaaacagggtgaagtataggacttatacattctccatttagaaaatgtagagggaggggagctggagaaggaaggggtggtgagtaagagcagagaagaagaacagggaaggaaggaaggggaaggagaacgaagaggacaaggagagggccaccaaagtccaatggtttaggcagtggttgctcaaactgtggtcctcaacaagcagcatcagtgctgacttcgtagattgttagaaacacaaatacttgtctcccaacccaggtccactgaattagaaactctgggggtgaggccctttaacctgtgtttcagccaggcctcctggcgattctgatgcacgctaaattaggaaacgcctgatataaagatgctgctaagaaggctgcccttgatttaaagaaagcaatttcagaagtaaatttatacacgcacatgtgaacaaaagccacgtagaaagacattcattgcagcattatttatgacaggaaaacactggaaacaacctaatgttgaagaaattgtcattccatatttcatacttttttaaagggagagagaaagcgatcttcggactttattgttaagtgaaaaaaagcaagatgcagacctgtgtgcattttatgctaccatttgtgtaaaataggaaatgaggtgtatttgtatttgcataacatgtttctagaaggatactcaagaaattgttggttggctgggaaacaaggaagggaggtcattttcacagtttacccttctgtgccttttggattttgcaccatattcaggtgttaaaaactcaaaacaagttttaagtattaaacatgaacagaaaaagcttcacataacaaatgccgaaaaagtcgagtgaatgaatctttcagtctgtacttaaattcttcttctgcctgggagctcgttatttcaccaagcagcccaatctctcattatgcacatccctcatcctgatgtgctgcttcgcaagatctgctcgagtgacagagcagagcaggagaaactgttgtagtttgaagagcagtgaaggtttctgcctgagagacttccccatgctctccccagcaatacctgggattcaacccctcccaaagtgctgtggggagagagatttaatgttttcaaatcaattctccttaattaaatgtttgttccattaatgcaaatcataactaatctacctttggatcatttgaagttagcttcacaaaatccccagggagagaatccagctggaaggtagcaatagaaggaggaagtagtaatcctacaggaaggagggcttgaactgggggaccctgggaatgctaaggaggccacccaggcaggagcattagggaggtaaaatggagagggctttgttgattctgtcatgggggtgagagcttggagttcaagaacaggaccagctgagagactaggtgtctgaaaggagagagataatgttgacgatagtaaaattctttcgattttcatgacactctaccgtttaaaagtattatttcatataagtgtcacagtaccaacgtaggggctgttatacctatttaaaagaagaaagtgagtcccagaaaggttagacaatgagtccaaggctgtagtgctagggtttgcaccaggcacaccattttgagcctcttggcagatgtttttttctgtctttgctttactctcgttataatcgaacccaggtttgacttctcaccacttgaaagccagactcaagagacaagggttggtggaaggaaaagcaagtttattcagaaagccaacataaccgagaagatggtgaactaatgttctaaggtaccatcttaagtcagtacaaactttaggctctttcgatattaagggcagaaggataagaagaggattgagatcaagaggtaaccagcgactgcagacatctggacagcagtgagtgtccgaggaggctgggaacttccttgtccttggtcaggtcacaatgctcctaaaaatctttaacaaaacatagttagttgtttacatacttccccattcatcccgggattagttttaaaagctacatgactgctgttttcacatattatgtcagtgctctgaagtcgtccttgcctatgtgcacgaatgggtaaagactccttaaacaaaaatggagttagttatgttagttcttttgctttcttatgttacatcttctcacccaccaccttcagagaaagctctttcttcctctcacaaaacttcacttgtgagttgatctcctttatcccctgattctgaggctcttgactcccacagccactcctctctggagcctcttacatacctcatctcttgtcatgtggacacctccttcatctcagaagtgccccgctgcttggacagctgcccactcccagtactcccatccctcccttagctgaggtgcttcttctccatctccttgacctgtctcacttgcccagcaatcaccttcctctcctcccttccattggtctggcctctggaagtagcatggatgctctctactactgaacacaatggccttttctcagtcctcatgcccctgtcctctctatagcttggatgtcggaggctgtggccacagctctatctgccttggcctcagagatgcacacttggcctcattcagtgcttattactggatcacagtgataaaagcagattgatttgcctttttcctcaccactccctgcctttcaggttctttcttcaccttccagatataaaccctccttttccattagggtgatctctccattttttcagaggcagcatgcgctttctttctcttccatctctctttctcctgtctcaagactcctacaggaaatcttccctggctgcattgttgagctctcttcttcttctttctcttttttgagatggagtctcgctcgctctgtcacctaggctggatggagtgcaatggcgggatctcagctcactaaaacctctgcctcccaggttcaagcaattctcctgcctcagcctccccagtagctgggattacaggcatgtaccaccatgcccggcttatttttgtatttttaatagagatgtggtttcaccatgttggccaggttagtctcgaactcctgacctcaggtgatccacctgcctcggcctcccaaagtgctgggattataggcgtgagccaccatgcctggccttctctcttacttcttaaagcaagcagagtctggagtattcaatttaatatctaattacgtaccttctacaacagtgaatactgttggacccccaccatttccttgagggcagggccctgccatagatagacttctgtatttcccatggcctctatatatagcatcttcagagtgtggatggatggatggattagatagatagatagatagatagatagatagatagatagatacatacatacatacatacatacatacatacatagatattgatgaagatattcatgctgaatatatagttgatgctcaatttatgattgttgattgatagataacatccagtcagagcagttaactccactatattaaattgacttcagctactcatattaatctctgctcttaggaggtattgtttatgaaagcaagagcatagataaagttgtatttagaaaaataatttatcttctcttaagtagttggacaaatatttgttgactgtctaccatgggcctagtactgggaatagagtgagcttgaggaaggcaagtaccctcctcttaagggcttttcagaatcatggagcaaacagacaattaaacactaaacaaataaataataagataaattcaaataattgtatgggcgatgaagagaggagaaaagagaaatttgacagactgtgccactggtcaggggccaagggtttgagaggaggaggaagaggaggtaaaaggcagctctccatgggatggtcaaggcaggtatttccgaagagttgacattggactgaatctgaatgagaaggagctggcagtgtggtgatctgcagggacagcacagaaggcagagcacacagcaggcagcgaagcctctgaaaggagaacaaacaaaaagtgagcactggaagaatatggggaactacagtagagtatgtgagtccaccaagcatgcatctgcgtgtatacatacataaccgcagaattgagaggaaaacataaatattttatcaggaagaaaggaagaaatgaaataaaaaaatttgaagagtactttctaaaagtgctatataattgtacgttttatgaaatctaggcatttcttatgtcctcaacaaaacatcaagatccctgggggcgggtagtctgtcttgcatcccgtattcccatctcccagcacaatgccaagcacagagagaagatattaaatcactatttgatgaatacatgcataaaaaaatagatggttacccaaagctgagatttcacattttaatattgtctacttttagtctatcttccgtctcaatttggcattgcatctgcacacaaatacaatcctatcaaagtggaagaagaaaggtaaaatgtgagaaagctgtctgtagaagttctaaaaccgagaaaggaacagagtggagaaactggcaagagcacatttatatagttatatattgtttgtgaaaggaaaatgtgttctagtgttaaaatgattatttcttatgtataccttgtacctgtaatttagaggcttctcctgtgcaatttcttggaaaagaatttttttttcagtctcgattatcaggatataagtagctttcttagtctttaaaaagaaacatcttaaaagtgcaaaatacagttgcttaaagaggaaaataaatacattgtaccaaatcacagacgttacaattttttgaatcccaaattgctttctgaatcaaaggtaggcccatttattttaatggaaagctctcagaaaaagctttaggagttaataatcaagttaatgtagcaattctaaagctcattgatttgtgcttattttaataaatcttactgtatgcataatgtacaactgaggggtattataatttcagcaaagtcacttgtcttgggtagaaaccacaaaatgggaattgtaattcatatgtaacaaatgattttgtaaaaaaatgccaatgttatgagactgcttctatttctgggaaagatcttggtacatttagaaacaatctttatctgaatcaatctttgaactgatgacaaaattaaaattgtatttattatctgcctaaatacacctgatctaatgaattctttcttaaaaaataaattgtgtgctattagcattataggaaaacaagtaagagaggttttaaaaatattatatgagcatttgtaactttcttaacgcttgggagacagatagattgttcacggcatttatacatcctttacataatcaaggcttccaccgaagtgaaaaataactttctgtgcttgacatttggatgaacatttggtagaggaaattataccttttccttaagcccctctaatacatatttacaaacaagtgctttgtagatacacttccaagtaatttgctttcacatttgcctgctgtgcatggagctgagacatggttgggtttgcaagatgaaacaaatgaatgcttatcactttccaagctaaggctttagttaatgtctttccatgatttcccaaactcctgcccacccccaatttcagttaaagttcaaccatttgggttttgagtgcagcacagcgagactatgattgataccatcaaggtactgaaactgtgctttgccagtgggtcaggcagctaggcaagaggaaacaatgccaaccctattataaattccttcccttataggttcactgggagctgacaacacaatgtagcagaaaaggcagattcttgtgttgtttacttttaatggaattagagagcccattagagcttctactaaggacctctctctattgagagaacctagcctaagtgtctcccggtgaagtctgatgtgtggtagctcatttgacctttaaagaccatctctactgggtggttggtttttataactcctccagggaaaatttagactatgtattatagcatattgccagtaagcagttatttcagtggatctggtgggtctgtcccacttaaatggcccttgtaaatattcacaatccatcacgtcggctcttagttgagacttgagctgataaggccacatttaatattgcttcctgcctgtctgagtgtatgtatgtccactgtgattgacatgtggttaaatcactgagccaaccatgaatctcaatagcttaggaaatattcatcagaacacttttctcctctggctcctgtagttctaggcaggctttatgagggagtggaaaataaccagtctgcgttaagactcctgtgattatggccaccagcaggaagatctctatgaagcacatggccaaaacgatgaacaactgcatagctcaccagagtgatcatttgctttgctgacatacaactgcattttatacactctggccaagatgtttttcaggtgttccctgaaaattatactttttttttaacctaaagtttagtgtttgatgaagctgttgttatctttagagcaccatcgtatattctctctcaatcttccctctgacttctgtgattgcaggaaccataaccagtgcatctatgctagtgcctagcacagcttcaggaacttggtaggcgcttcaaaaatatttgttgcataaatgactgttaaataaaaattctctgccattagggcttctccagggacagcagacagcattttctgtctctgtgattgtagtgggcaaaatacttacaccatggaaaatcagtaggagaatcggacatagcattttttctttctttctttctatcttttctttctttctttctctttctcccctcccctcccctcctcctccctccctccctttctctttctttcttctttctttctttcttcctctttctttctttttctttctttctttctctctctcttcttccttcctttctctctctctctctttctttttgacagagtttcactcttgttgcccaggctggagtgcaatggcatgatctcggctcactgcaaactccacctcccaggttcaagagattctcctgcttcagcctcctgagtagctgggattacaggtgcccaccaccatacccagctaatttttgtatttttagtagagatggggtttcaccatgttggccgggctggtctcgaactcctgacctctggtgatccacccgcctaagcctctcaaaatgctgggattacaggtgtgagccaccacgcccagcctgtgtgttctttctcagtagtctttgtcactcagttcctgtgaatcacctgacatttgcatctttagtcattctctttttctttactgttcctcagtccttgtcagacccctgctctaagcccagtgaatgtgtgggtttgtatttcactagtgttctccatgcccagggctctgttttgtcttcctggggcctctgtgcacacctgcctctctgtacacacaacacagaggaccaccctgtgttggtcactgctggatcactcgtccatctccctcttggactgtcagctccatgaagcaggggtttgagtttcttttctatcccctatatctaatgttgtgtttgacccattgtgggcttgtgtggatgtttacagactgaatgaatgaatacatgaattaaagaaatgaatgaaggaaatgaatgtattggcagttagatcatctttttttaaaagcaacttttaatggtatatatttaagacacacatcatgatgttatggaatacatgtagatactttatccatcatctcacatccaatgtctcacacaattacccatttctttttgtttttggtaaaagcagctaaaatctactcatttagcattgattccatatacagtaccttttttttctttttcccctgacttcccatctacagtacaatttcattactgatggtcctcgtgttgtaccttagtttgctagatgtgttggcataattagatcgttgttgggcacttgttttcaggcagtggctggcagcgtgagagcccaggggttagggcatagggtttctgtaatcagcctgtcactaagccctgtcatctggcctgattggtgtggatgtggtaccccactaagacattcctcagtgccagttgaggagctcaaaaataaaataaaaatgaggtttatagagatgtagcactacaaatgagatgcctggattgccaaaagcctacaggctttgggtttgaaatgaactagatcaggtctagtagttaaatcaaaaattcaaaaggcttttattttatttatttattttgagataggatctctctctgtcacccaggttgggagtgtagtggcgcagtctcagctcactgcagcttcaacctcctgggctcaagcaatcctcccatctcagcctcccaagtagctgggactacagggatgcaccaccacactcggctaatttttaaactttttgtagagatgggatctcactatgttgcccaggctgatctcaaactcctaagctcaggtgatccctctgcctcagccttccaaagtgctgggattacaggcatgagccaccacgcccggctgaaaagcctttaacatgcagtccgtttctcatggttttgcttccttgagggctgctctccatagtgtcgctgtggtgtgagggacttcaggtccaaggcttaaaggtgaatggaaaacccagggaatcaaataagataagcattaaatagtacatctaatgaaatagttttcagaatacataattttacaattttaaagcaatgaatagtttaacattttattttaaataaaaagaatacatgtggcatcaaatgaaaatagtaccaagagtataatatagtgtgcctggatctccccagaaaccacctcttaatcatcagtgtagttaccatgtaaacctgggtgctacactgatacctcaattccgtgataaatcactcttaaatggtatcaatggactgccatccactatttaaaatgaggagaaatttagctcatttacactcctccctctcttcttaccaatattttataataaaataattatttttagttcttttgttggtcagcactgtaatcttagtaatttcctggagtttccatttttttgaattcatgtgatttctcttatatctcttgatgcgctgtgctgtaaggtgaggatgttgatgccttcactaattcactatattttctctcctgtttcagatcttacatttaacaatcttttactttttcactaacctggaagtatatttgtatctacattttgtcctgcagggagggatcctaaagggaaaattgaaatctgaaattaagtgacttgtgtaaggtttcttagctggttaatgttacagctggagctaaaacctggggcatttgactcccaatctcgtaggctttctgcagataaactcagtgattcgctcatctaatgtttattgagtgcttattttcctccaggcactaggtaccagtaatacaaaaataataagtggtctcaaattgcatgcttcataatcatggaacaaagacagatatgtaaacaaataactagtttcaatgcaataatgtgcaaaggaaggtgttatctgatttttttttttattccacaggccagagattagaataactggtataactattagaagtggcaactttgatatgttgaggaaacagtgttttacccaggccacttatgcaggtttaaaaaataagtaagacttggccaggcacggtggctcacgcctgtcatcccagcactttaggaggctgaggcaggcggatcacgaggtcaggagactgagaccatcctggctaacacagtgaaaccctgtctctactaaaaatacaaaaaattagccagacgtggtggcaggctcctgtagtcccagctactcgggaggcttaggcaggagaatggcgtgaacctgggagggggaggttgcagtgagctgagatcacgccactgcactccagcctgggcgacagagtgaggctctgtctcaaaaaaataaaataaaataaaataagactttgctgatatacttccaggaaagcagtttaaatggtctgtttcaagattaaatatgaaagcagattttaaaaataatgtataattataaattatatgttttatgctcagcatgtttttatgtgaaaagaatatcaaaatattcttcagttgtctttatggggttgtttagtattttgacttaaagtctaaagtttatgcgtttattgtacattctttttatgttgacttgtgaactttttctttctctttccctcagattttcatcaccgtgaattgcttgagcacagatttctcctcccaaaaaggggtgaaaggacttcctttgatgattcagattgacacatacagttataacaatcgtagcaataaacccattcatagagcttattgccagatcaaggtcttctgtgacaaagtgagtaaagatgacagttttttataaaggtatcttttttattagatattacttttaatggcatttcttccttgtcacctttgcttgtctagtggtgtcaaaatattcactttactcatcacagtgggagtggtaatcttctattctcagttcctgttagatatctaggaagtcttcagtcaactattttttttttttttttttagtttatcatttttatcactaatttaatgactgactgtttcttagtcagctcaggctgctataacaaaaaaccatagactggatggcttaaacaactgaaatgtattcctcaaagttctagaggctggaaagtccaaggtcaaggtgtcagctaatttggatcttagtgagggctcgctttctggcttgcagacagctgccttctcactgtgtcctcacatggcatagagagagagcacgtgcacaagctctctggtgtctctttttctaaggacacaaattctatcataaagactctaccctcatgacctcatctaaacccaattacctccccaaaatttcatctacaaataccatcacattgggaattgggagtccaacatatgaattttgggggtacacaaactttagtccgtaatacattgtgctataagtttgatccaattagatagctcaaataacagattaatattctttactgggcatagaccctgtcccagagcatatcagggcatccgttattattttgtgggttaaatgggacctcatctaggactttttggaatggaaatagcacttataaaataagttcattagtacatatgcacttagtaaacatgtactttgaatctccctgaatcccaccccaaaagagttgaaaaatgtgaacagcaaaacttaaaaccctatgattaggtgacagaagatcctcacaaatcccaaatatgaatgggaccaagcatcaacaatttcaaaacctgtgtgatatcagcatttgtgagggaaagtaatggggccacctgatagccaaagaacaggaaacctacaaagttttccaaagtactcactggaaagtgaagtgggctgtctcaggagagcatgtgagactcgggtgggagggtacagatctagtggattctaatttgccagtgagtgcaagaggactgagcattgaaatgttttaggctctatgaattctgagaagtcagaaactaaagttcccttctaagacaaaatcctgctttggagaaaaaaaaaaattatcggagtaaagtctaagctgagttgaaaaaaaaaggtgaaaaggaaagaggtcaaaataaaaatgaagaggaagatgggacgggatacagagtaggcagatctcagaaaatctgactatatttgtatcactctgtgaacacaccagatgggcatcctgggagccatgaagctagaagaaatcctggctcactcatttcacttgaaaatgaccaacagaaaagaaaaagcagttgaatcccatacaatgtttcatgaaaaaagagattaagatcagactgacttccccatgaataatgaatgcctatcaaaaaggcccacaaaacaggtgaaaactgtagcctaacatttcaaaataagctaaatgaaattaaggaaataatggaagttatgaagatcaatgtaaatcacaatttgaaaaaatcaacttgagatgtgtagaaaatagaatgacttgaaaagagatgagatggaactcaaggaatttagaaataaaagattaaaatagattagaattaaaaactatgctagaagcaacacaagagtaaataaatataaaagataatgctctaagaaaacaagctggaaaacaataaaatttttaaaatcagagaaaatgaaagaggtgtgagagaaaatacagatacagaagaaagataaagatgtaatataggccaggtgcgtggctcacacctgtaattccagcactttgggaggccaaggtggaaggatcacatgagtccaggagttcgagaccagcttaggcaacaaagcgagacccctgtctctacaaaaaaatgtaaaaattagccaggttcagtgatgcatgtctgtagttctaggtactcaggaggctgaagcaggaggatttcttgagtccaggagtttgaggttacggtgacctatgctccagcctgggtgacacagcaagaccctatctaaaaaaaataaaatccaatatacatataataggaatctttgaggaaaaaaaagtagggggatggaatactaaaaatacattgctttaaatatgcatttaaatacatatgctctaaggaaaactttaaacagaaagcatatgtatttaaacagcccaccacccacttgggaaaattgatccagtataaccaatacaaaatagttaagctattggactttttgaaaaaagaaaataatattctttgggcatctaagtaaataaaataaatattaaatcacttataaggaaaatttgattatcaaacttttcaacagcaacaccttgtcagaagacaatgatatttaaggtaatcaagtaaagaaaatgtgagccaaggattttatatgtagccaaattgactttgaagtataaagactgcaggcagaaacaaaataaacaaacccccaaaatccagagaatatttcttctcggggactctagtagtcaacaaactttagacaagcaatattactgtaaagacattgataaaacgatgggtggtgagcattcaggatctatttacctgtagatctaattctaaatgatggtggagacagtgtgacagtatattctgacaaggtatagacatcgtacaattattttaaaattgggaaggataggaggggtatatgagaaataagttgactaactgcttacagagattaactgtaagtgaaaggatagtacttcatattagatgctgggaagagagaggaacagggagcagatattagtagccagttcactattgcccaacactcttttttaaaattatttttccgtaagttattgggatacaggtagtatttggttacatgagtaagctctttagtggtgatttgtgagattttggtgtgcccatcacccgagcagtacacactgcatgatatttgtagtcttttatccctcaaccccctcccacttttccccagaagtccccaaagtccattgtatcattcttatgcctttgggtcatcatagcttacctcccacatatcagtgagaacatatgatgtttgattttccattcctgagttacatcacttagagtaatagtctccaatcttatccaggtcactgcaaatgctgttaattcagcccatcactcttaaaggtgctgcagtcagttgtattaaaggtgtatgtactgttaacatgtccgagagttctggtttagcagtggcaggagaaagcagagatggtaaggaaaacagaaagaaaacgcattaacaagaactgcacaggggttagggacatgtggcatagcagtaaatatccctaaagtctcaacggcctttcaggccatgatgatttcagttaatgccaatcttccagccatcacagcagcacagcaatcaataggacagtttccatgacactggtaggacagtaggacagtacacagtagaacagtttaggacagttcagagtacacagtaggacagttcacagtaagacagttcacggtacccagtaggacagtacacagtagaacagttcacagtgcacagtaggacagtacacagtagggcagtttacagtacacagtaggacagttcacagtaagacagttcacagtacacagtaggacagtacacaataggacagttcacagtaagacagttcacggtacccagtaggacagtacacagtagaacagttcacagtgcacagtaggatagtacacagtagggcagtttacagtacacagtaggacagttcacagtaagacagttcacagtacacagtaggacagtttacagtacacagtaggacagaacacagtaggacagtttacagtacacagtaaaacagttcacagtacacagtatgacagtacacagtagaacagttcacagtacacagtatgacagtacacagtaggacagtttacagtacacagtaggacagtacacagtaggacagtttacaatacacagtaggacagtacacagtaggacagttcacagtacacagtacacagtaggacagtacacagtagaacaggtcacagtacacagtaggacagtacgcagtaggacagtacacagtacacaggacagttcacagtaggacagtacacagtaggacagtacacagtaggacagttcacagtacacagtacacagtacacagtagaacagttcacagtacacagtaggacagtacacagtaggacagtttacagtacacagtaggacagtacacagtaggacagttcacagtaggacagtgcacagtaggacagttcacagtacacagtacacagtaggacagtacacagtagaacagttcacagtatacagtaggacagtacgcagtaggacagtacacagtacacagtaggacagtacatagtaggacagtttccatgacacagcaatcagtaggacagtttccatgacactggtaggacagtaggacagtacacagtagaacagtgtagggcagttcagagtacacagtaggacagttcacagtaagacagttcacattacacagtaggacagtacacagtaggacagtttacagtacacagtaggacagtacacagtagaacagtgtaggacagttcagagtacacagtaggacagttcacagtaagacagttcagagtacacagtaggacagtacacagtaggacagtacacagtagaacagttcacagtacacagtaggacagtacacaggacagtttacagtacacagtaggacagtacacagtaggacagttcacagtaggacagtacatagtaggacagtttccatgacacagcaattagtaggacagtttccaagacagtagagaagtttccatgacagtttccagaggcctgttaactcaatagacacagttgaatagaaatggtgaaatattgaaggtacagacagcataagcaatttgcccagagacacacagtgggaatgcagagtagttagatggaaatctaggcctgatttcaaactcattctcctggaattgataaataactttatacataaaataccgaaatgacaactggccattcaaaacctcaacaaagagccaaggtaggctttagaaacaaaaccgaaccaaaaaaatcagcttatgtctttaattcagcatattaaatattaagaaaacattttcaaatgatgtataacagataattttttaaagcacaaataaggaagcatttaaataatttgaattcccttactttatttcagatattccaggggagattgtagaatccccctccatgaatccccttcttggaaataaagaataaagttagagatgaagagaaagagggggaagaattgaatagaggaacctggcaatccattcatattcactttggtagttggaaatgaaagtgagagacagggattaaggattctcctaaaattattttacgttatagtgttaatataataaataataagaaaaacaaagaataaaagcatgcagaatatacagaggatgttatattgttgttcacccatgtcctagaatgagagggactttaagacactaagagggcagagacaattattgattgattataccttttgtttgaaaatatttttatacattttcattcagttattttaaattataaaagggagagggcgaaaaagaggattatatggatttttccaaagcagttgtttcctgaagtcatgttaagagggtaatctgtggcaaggagataaatggttgggagaaccacttatttgtgtgaacatgtttgtaaatatgcataaaaactgggaaggactatgtcaacaaataccttgccaatcagaaagtaggtggcatttccaatagctcctattttacgtatcggtcagtaaatatcagtgctaagtaaaagaaaatggttggagaatgttgggtaaatgataagcatttattccaagtgagtagtgatgtcaagaggttctagcaggtagttacacatcctgatattaagggttggagtcggggatgtcaggaaaatcataaggaagaaatctcacgagtcctgcagggtgtattcatcgtaattactgtcaatttctttaacaaagtagacctgaaatcttttgctgtaatttgtcatcatttttgaagctctaatttcaaaatccaggtaaaactaattcctgggagattaaaaagagatattaaagtttaatttttatacttttcaaatgggtgtgtaaatacaaatgcccactttgacttatcctgtcaggcaaaagagttgagggctattccattttaaaaccatacattttctcatcacagtctatagttttcaagagatggaattctgcactatttacagttctccagcttgatttctaattaatcaatcaattaatcaattctaattaatctcacacctgtgagactgcagctgaaaataaagggcttccctaatcattcttggtattaagatacttctattgaaatgcatgtgttaatacattttaaaaattcaggatctgtttatatagctacatacatagatacctatgtgtgtatctttatgctaacattaaattctttcacaatctttcgtgaaggttttgtattactgcaaacaatagctacatattgtggaaatacggagaaataaagccacattcttaaaatacatgtagaggagcaacttaagtgttaaataaaaaacaaagacagccatcacctctcaagtggtggcaaaaatgatcacaatattggcaggaattttccagatatattttccaaatttaacactctatagtgaacatttagatggagggaattattttcaaatgacaaatttagtatctgtagcaaattattctcctctggaagaactagacttttgcactttaataacagtagaaagaatattttctaaaagtctgaggtcacaaagaatcataggaagaggtggaatactcggaaggtcttgctcaaggaatgttttctttactttaatggaatgtatcgaagcttcccggggtcactgtgaagtcaaaaactttattctagaaataagaattgtggttctcttgagtggatactatcaaaactgttttgtcatgctgatagctgggcattctgggcaggaaatttcttttgtagaagggccaccatctgctgtatagatactctatgttttatgttaattctttgggtttggcatatgaaagaatgcctgaaaaataagcaagtgattttgctaaaattctacattgaacatacaggcttacctcgttttattgtgctttgctttattatgtttcacagaaaacaaatttttacaaatggaaggtttgtgacaaccctgtattgatcaagtctgtcagctccattttgccaacagcatgtgttcttgtctccgtgtcacattttggtgattctctcaacatttcaaacattttcattattattatatctgtcatgttaatttgtgatcaatgatcattggtgttactattgtaattgttttggggcacctccaactgcacccatataagatggtgaacttaattgatcagtgttgtgtatgttctgattgctccaccaaccagctgttccctagtctctctccctctcttcctttggtcttcctattgcctgagaaacaaccatatgaaaccaagccaatgaataaacctacaacggcccctgagtgttcaagtgaaaggaacaattgcatctctttcactttaatcagaagctagaaataattaagcttagggaggaaggcatatcaaaagctgacacaggccaagagctgggcctcttttatcggttagccaacgtgcgaatgcaaaggaaagttcttgaaggaaattaaaagtgctactccagtgaacacacaaatgataagaaagtgaaactgccctactgctgttgtggagaaagttttagtggtctggatagaagattaaaccagccacaacattcccttaggccaaagcctaatccagagcaaggccctaactcttttcaactctatgaaggctgagagagatgaggaagctgcagaagaaaagtttgaagctagcagagatgacttcgtaacattcaagcaaagaaaccatctccataacataaatgtgcaagattaaactgcaagtgctgatgtagaagctgcagcaagttatgcagaagatgtaactaagatcattgatgaaggtggctatactaaacaacagattttcattgtagaacaaacagccttctattgggagatgtcacctaggactttcatagctagagagaagtcaatgcctggctttgaagcctcaaaggagaggctgactttctcgttaggggctaatgcagctgctctcttaaagttgaagtcagtgctcatgtaccataccaaaaatcctagggtccctaagaatcttgctatatctagtctgcttgtgctctgtaaacaaaactacaaagcctggatgacagcttatgtgtttttggtgggcttcattttaagcccactgttgagacccactgctcaggaaaaaaagatcccttttaattgacaatgttcccagtcacccaagagctctgatggggatgtacaaaaagattaatattgttttcatgcctgctaacacaacaacatccattctgcagcccatggatcgaggaataattctgattttccagtctttttatttaagaaatatgttttgtaaggctgttgctggtgtagatagggattccactgatggttctgggcaaagtaagttgaaggccttttggaaagaattcaccattttagatgccattaaaaacattcatgattcatgggaggaggtcaaaatattaaaattaacaggagtttggaagaagttgattccagccctcacggatgactttgaggtgttcagtacttcagtagaggaagtaactgcagatgtgatggaaacagcaagactagaactagaagtggagcctaaagatgtgattgaattgctgcaatctcataagaaaacttgaacatatgaggagttgcatcttatggatgtgcaaagaaagtgagatagaatctactactggtgaagaggctgtgaacattgttggaatgacaaaaaagaatttagaatattacataaacttagttgataaaacagcagcagtgcttgggaggattgattccgattttgaaagaagtcctactgtgggtaaagtgctatcaaacagcatcacgtgttacagagaaatctttcctgaaaggaagagttaattcatgcatcaaacttcatttttgccttattgtaagaaattgttacagccaccccaaccttcagcaaccctcaccctgatcagtcagcagctattaacatcaaggtaagaccatctattagcaaaaagaatacaacttgctaaagcctcagtgtgtatttttttttttttagcaatgaagtatttttaagttaaggtatgtacattttttagacataacgctattgcacacttgatatagtatagtgcaaacataacctctctatgcactggggaacaaaaaaagtgcggctctttttatttcaatatttgtttttttatgggggtctggaactgaacccacagtacctctgaggtatgcttgtatataaatcttgaaacagattaattcttgtccctttcctcataaatagtacaaaataaaacattaactcagaaatcaaattccttgacccaacttggggtgtttctgggggcagctataatttatacaggttaacaaatatctaaattttatttatattaaatgttatattgtacagagtccctagcacatagaaaaatgccttacatggacccaagaaaaaaatatttcctatcacagactttagtattttgaagaacccctttgcttatgtttcacatccaattgaagatcgtatctgcgcatttaacacttcattttttgaaaatatgttttctagcacaaaactgtataaaacctttatatatcatgaagagacttcccaagcagatagttttatattttatgcctcttttgctgtgaatttccatgatctgcaagtgtcaatgacaattcaaaacttcatatgaagcactataaaatccccccctttggtaataagtaagataattattccatttggtagtttttaaaatataaaaatgcataattaaatgatctggttaaaatattcagctatttcaattctattatgtaaagctcttagaaattccctggcacagagttagctattattactcattctccaaaaattagtttaaaagccataaggcatctcttttgtgaagccttcattgaccataaattctcactgtgtcatggcgtcatgctggccagaattgggaatctgcttttctacaaaagccaatttgataaacaaaaaatatatctcattgttttgtaataattcaaaccatttgtgcgtctttttctgtgaattgcctatttcatgactcttgtccatttttctatcagtatgttagctgtttttaaaatttgaaccattatttatatattaaggatttgatattttatgtgatattttattgcaagtattttcgccaacttgtcctttgtcttttgattgatttgtttgcatacagaaggattacatttttgtattgttaaatctatctgttttgtatgtgatgatttggggacaatttcggaagggtgaaaggttgctggccattctgtgcattactgctccctaaatatgccaccacaatgggcaagaactgtaaatgtgaatctgaaacttagggaaggagtttaggttggagatgttgatcagagtgtcacctgcctagtgccttgtgaaaacaaagacacaggttaattcttccacagcaagagtagagatagagcaaggaaaaggaacccacgttggaatgtctatatttgggggataaggagaagaaaatgagttctcaaagctcatatagagaaataaccaaagagaaaagatagggcatcattataggccaggaagtaaagagatataaggtggtggtcaattggttaagtagggtgcgatttggcaatttggcaagaggtgcccatgaaaaagccaaattgcaaaaacagaggagcaaaaaggagtttaatagactaaacatttttctatttggttgaatgagcaccatctctaagaacatatggaaatattaaaacaaaaacaaaaaccatgcttacatgtacaaagtggtcctacatcttgtgtggtttccttatggcttctttcatttccaccactgtaataattttttaaagcttaaaaggaaagcaaaggaaacattttatagggaattcacactttaaagccctctccatgcctaggaataaatttaatgggtcaatgattcatcttctgacattttattataatcactaaagtcacttaatggatttcactggtttagggaactgggttgattctttccatatggattcaaaactgaatttctttaaataggaaagataccaaaaaaggagagaaaatctgggagaggtgggatccctcacaggtcacaaatgtggtatagacttatgagtggtcttggctttcagagccaaacccaaccttgccagaggaatggaaatggggctgcttggttacctcctcccctgtattgtttcatatcctcatgacttatgtgtgacatgacttttgcatgctctgctaatatgcctggcattttctgtatttgtttttttcctatcagggagcagaaagaaaaatccgagatgaagagcggaagcagaacaggaagaaagggaaaggccaggcctcccaaactcaatgcaacagctgtgagtttcactgagactaatgttgctttctaaagactccaggtgggctgtgtccactgggggaacaggtggaagaagtgggttgcaggtaaaactgcatacatgcaaggcatggtttgctttcccctggcagtggagacagggtgattgattatccctgtgaaaagcaaatagaatcacatgagcacagtgtgtttgagctaggaaggactttgtaataatgtggagaccagcatcctccttctgcagacaaggaatcttgggtgcatgaaaggacaggagggtgtgaggggcctcgagcttcacctcagcagtgctcacttgaagtctacgctcctgtttgttttgctgggatgaggtggtgggaggtgttgaagtgtgttcacatctatggtattcagaaagcttcatatgagaaaatcgtggactttaggacttacagttgagagttcttagtcatatatgactctctcatttatgagtttgtgtgatcccatccagcctctgatgggaagttggctgccatacctttacagaagaagagtgacatcacctacttcaaaaccatgcctgatctccactcacagccagttctcttcatacctgatgttcactttgcaaacctgcagaggaccggacaggtatgacctaccagctaacgcccacctcccatccatccacagggcaagtagggctttaagatagaagcatttcagacagtgttgacctcaaaaataacttaccttccattcactagagaaaaagtcaatgtcattccctatagtaaatgcatttttatagaaaggaatgtctcaggagaggaaactaagtcgaagaggagagtaagctgatattagtgaagccttgacaaagcgtggaagaggaagaaagtgagaaggctgataacctgtaagaagttttgttctgtcaactttgtcatggccaggattatcctgaaacacaatagagctccacctaatggtgagaagttgaactgcacctgtaactgcataaagttgcacaagagggaagtctccgcttaaataaaactcattcaacaaattttcgcttagtaaataaaaagttcccatttaataggtaaatcatttcacatcaaaagaaaaatgaggttgtaggcaagcccccttaaaaaaattcctgtcttctagttatatctacaagtgaaacgaaagatctcaaactaacataaatgtccaataattaactcattatggtagctcaagttgatggaatattatgcagtcactaaaattttaattatggaaactacatagcaacatgggacctagttatgacaatgttcagtggaaaaaaatgtagaatagtaatttgtgttcatattatgatcccaaatatataactgaatttgaagggagcaagaaaaattgcaacactttttacagggttatgagatatggctgattttttctttttatttttagtattatttctgttatgtgataaacaaaaaattgtgtgaaaaaagaaaaaataattatttccttagcattaaccagaattgtttttcaccaaatcaattgggttttaatgaatttttgtatcaattagttttcttttaaacccaaagtcctttgaggaaacatctgttttgagaaacaggagcatactgacacatttaagtttttcttgcattctaagcatgcaaacactcaatggaattgaccttggtgtagaaagagaaatccctactggctttactttctcttttggatgtattttgtcccctagtattctgtgttcttttattagattcatgagacagagcaactctacaaccacggcttttttgttgttattcatgacccaacatggtaataaaatgcctatagctgtttcttaaaacacatcaacactaaaaacccatttaacattttcatccagtcttacttgttggataagaacaaggacacaaagtagggaggaagaattttataatttatcaagataagcatgccagtacctattttttttttaattcccaagaccatggtgatgatttgtgtctgcactgtctgtgccccatgggattttatggggctaggtttccacaccttccagaagaagggatagttgagttaaattgttcttattgtttagtttactgtcataactctggcctcagttccatgtcaaagctggcaacctgacctgttctgttggcaagatttctccaaaatatacaaagtgtaaattaatctgaagaggaaaagtggccttacctagctgctcctgactgtcagtccgctgacctctcctgcccccgggtgtcataagcccggctgtcagcctgaggtggaatcagaaggaaaagtgcagacttttcagtctgttggtttcagcatttgccaggcagtccaatcagcacccccctgtatatcctgcctatatatccccctgtatatctggaggccttcctcagagctctcaggcttctcccatggccttggatttggagatgagggggtcaatgaagaagcctgccctgagcttctggcaaaaaaggaacacactcagctgtccctagaacaacctgtgactatcctgtggttgatcagctggcttagctgaaggaaaggagcttggacagtggctagggactttcagactgccttttctcaaaaaagttagatgcctgggagatccttccaaagacaggagggaagaggcagtgccatggccttagatttggggatggagcagagattggctaactttgacctgcagaacaagagccagcagtggcaggtcaatggatatggctggtttcccttaagtgggtagaaagagaaaggggagcaagagagacgcaaggattggtgtccatctcagaaaccgccgcagtcctgagacttgctaaaattagctgcaatgcagttgtgcacaactgcggggccagcagccctgtggttctcatggccagtgaggcaccctcaagctatgctgaagctatggggcagcagtccttgttcactcaaggacatgacttggggagtgggtatttcactctcaggccacctgccccccaccccactgatgatctcattgattcacttgtggattgaaatattcttcagacacttatcaaaactagtatgaaggaataaatccaatgtgcaggtgctatggagcccttcagtctcactcgcctgatactgaagccctgatattcaggctgtttatgtctggacgcctttaaaggtcatgagattaggcgagattgggaaaaatggtgggatgcagcggcatcatctttttagataatgtctactttgcaggcattagccttccccaaagtacttgaacccaaggaggactcctctctcacacactcaaaaaccatctcttgcactgttgtttgtaaaaaaacttttcccacatcacaggagttcttgataaggattcggattcctgagttccatccttcatcttttgagttaaaattccccaagtaagttccaggaatttttatttatgataaagtctccagatatttctatgcactctaaagtttgaaaaacatgctctaaaaattaagttagtgcaatgggcccaacagctgacatggaagaaatagtgggtctttatgggcaaggaggagaaatgacaaagaagggacagtgataggacagtgatgtagaggccattcaggagggtgggaaaacacctaacagaaggctgcttccatcttttagtcaccaaccaactttgtagaggccagcagtcaggccagatagatacactatgccatgtttaaagaaagcagcaaaacacaagccaacatggggaactttatcaaaataatccagttgcatggccagtggaatgccccagcctccttcacttaggtgggttactctatattcattaaattaggcagtcctattcctagtacatcccaatgacagttgctctgaatgccacactgagacttgttgtggggagaaaaaacttacctccactgttttctgtttaagaagaaactaaataaacaatacaacaacagccattaaaaaattaagaggaaaaattcctgtagaaatctgagctaatgactagaatgactcattcccagagagttccaggtaaccagtcttgttttgtaactaggtctaggcttggcagcatcccaggaactgccaagagcctttgagagagtttgcagggaggttgtctatctagacacagctgtttctcacccaggcaggggcagggacagtgactaatatactaggatcagaggctacttttgagttaatatgtaaatgtctgatactaactcaggtattattcttcactcaaaggcaacagtcctgacacacacagataaagatgacaaaagacccacaattagtgtttacagataattgggtcaagaggacatatatgcacagcagatgccctctgggtttctcccatggttctataaaataataaggatgcttcataatttctttaatctgattctgccttctgccatgccaactacctaaagtctgtctttggagatcttccttctggccaggaacaccttccagagctaaatgacctttcctggcctgaagactgttgactcccaaatttctgtggttgcgggatgccaggataccccgggcccctttggggagtaagtagacaggcctagttactgtcacactgccctcttaccccactctccatcccgcatttggtccacagacaagctgactccagacactgtgctacacagggggcaggaaaggacccaccctgcaaagccagagcctttgtaaacaatggattttagatcccgccaaaatgtctccttaatgtcaaaaggaagatttggcttaatgccatagttaatctaatcagactgactttagctagaaataatcagatttccaattttattttattaaaatctaggaattaaccccatggagattataaggaacttaaatatgcatttccttagaaatacacacacacacacacacacacacacacacacacacacacactgttattaaacagattagtcttttgcctttttaagagacagtttatgccttaggaaagtctgtacatcacgtaatattttttccatttcttgtctctgacctacagtaagcctattgttttgttccacaggtgtattacaacacggatgatgaacgagaagggtaagacactcagttctttcatttcaacactccaagtcagctcatgtcagtggtaatggctcttccagcacttggtaaccctaggcaggaagtgaaaccctcctctcacctcaggactcagagctgagagacgcttgattctggggaccatctgggagggaggctgggggctggaggaatgaatagctttctacttccaggattctttccccacccgcttcctccctaagacccacccctttgaataactagctgtttttctaagggaccgatcccttccattccatcctttcatcaataatccagttggtgaaatcttctcagtagtccttcttacctattgtttggccccaacacaagatcaagatgagcttgaggcaagagtcaaagatgacagcctacccttcttccagtactgcctgggatgcacacacaactctcaaagccctgtccctgagaagttagcctggcaggccagtagtgaggctggtttgaataccagttggactgagagccttttcaatcgtaggtaagagacagtcacagagactcccaatgtctccacatcctgaatgtggtcctgcaggcttttaggagcagccagatcttcaaagtgctttctatccattaattcagtttgtagactcagaattttagggccaaaaagaaaccttaaggtcatttagctgacctcctctcgtagatcatggtaatagctataccacctctttgacaagcagtcagccattttctacatgaaaattcccagtgatggagagttcatgtgtgtgagatagctcatcacactattggacgattccagctcgtagggagttcttttgtctgttgagctgatgtctaccttcttttgacttctacccgttggccttagttctgctctctggataagtctcatcttccctcgtcattcaaacacccctttcctccctgcaactgttcttggtaaaatacagttttacttctcaacatcttaatttccctccaaggtatagtactaaatttgttagtagtctccttaaaattggctgggtcagaataaatatatgttctgaaccacataagttgcagattatattgggagatttcttcttaggacctggatgctattttatactcaaagcaatctagaactacatgcattttcaatagctactttatgttcttggttgcgttacctgtgtgtcactaaaatctttagatgttttttcttcaaactacagtcaaaccagggcttccctattcttatataattaatatatttacttgcaaaacatttcacagttggcaaattggagcagatattgctgagtttattcctagagcagaggttggcaaactatagccagaggaccaaatcaggcccaccgcctattttagtatagtctgcaaactacaaatggtttttacattttttcaatggttgaaaagaattcaaaagaagaagaatattgcatgacatgtgaaaattaaataaaatccaagtgtccttaagtaacgtgctactggaaacagctgtgtcaatttgtttatgtattgtctgtggcttctttgctgctacagcagcagagttgactagttacaacagagaccatatggcctgcaaagtctaaatatttactgcctgcccctttacagaaaaagtttgccaccttctatcctaaaagatagaaaatctcaaaggagtcaaatgattccctagctaatgaggagcagaacctcatccagcacttaacctctaaattctgagttctaaattttctaaatgcctaattagactgttctttttatcttggcacatagataatacattcccagcggttagaatgaacataaatgactagcactgtcaattctaatcagtaattcccatgtttaatgaggcacaatgtggcgtcacagaaacaacattgactctgagctcaggaagcccaagttccactcctggactgccgcctaccagtgtgaagccttgggccagctccttgatctctgggctttggtttccttaatttgacattgagcatcttgcgtaagatctcgaagattccatccaacactaacatgctattgttctcatgggaaaacttagtattatgagtgagaagggcctgagatcctgaatgctccttgatgtgcaggcctcagttgtaaatctgtctcacctcaaactgtccttccttgcaagctgactgcagttagatggccatcgacctacttgtaactccattggtttgacttctctgtgttggctcaccctgtgttattgtacaaacttgaggcccaaggtctgcatcttttgctcttacacatctcactagagtttgaatgagtgacatgaacagcattggaaccagagttaagacatggtaggtgtgtagctattgtgatgtgtaaaagtaataattaacattactggataccttggctaggcaccgtgctaagtgctttatgcatgaactcattgaattcccccagatttcccatgactcccattttataatgaggacactgaggcttcaagagattaggagacttgttcaaagacacacagctggtaagtgatggaggcaggatttaaacctgggtttcactgcatttcccatcactggcttttagccatgatgctctactgtgtaaccctcttaattcttgacctgtggctataaagtatgtattgagagacaggccctccctgagataactttccagccttgacaaaggcacacccttggttcattccttggagtgtaggacctagattgtgacaagcccagatgagtgtgtctggcagaggggagcagatctgaggccaccatatgtgttcacctagccctaaggagtgccagcttcgctggtatttgtacagcttccatcaggactgctcattggccacgttctttcctctccctgccacgttgattaatactcacataaattaatgctcacattagtgttcaagtatgcaaatgagtgcttaaaatcatcactcacacaatgaccagactgaggatataacacacaagagcccctctcctggtaaccccacaatcatgcagatgtgttgacttctctgcattaccagtctggtaggcaggggatatgacagttagaaacagtctttcagacagcagttctcaacaccaggtcccttgctgcacaatcgaatcacctgggggtttaaaaaatatcatgccagtcagccacaatttgaatctggttttgatcttagaagttcttaacttaaaataacaatcttttagagtctcagttttctcatctaaaaatagcaggataataatagccacctgctagcgttattataagcattaatgtatagaatgtcctgacacacagaatttgatttttttttaaatcatagctattgttattgttaagattcctattcagaccatgaaaaaaatgatacttaattgagaaatggaagagagggagatagagatgaaaagaaagaacaagccaaacaaataattttctgtagagaatggtcctttaatgtggaatttatggatgtctcttatggagaaagaggggcaggctttaaactcccctgaaataatatgcaagttgatatgcaaatagcatgcatgatgataaattctatttccattatttctggagatctggtcttcatctacatctgacctctggtttcttggaaacccctcttgccctgatcctctgtccccagtgggccccgctgaggtcctctttttccagcttgcagcaaggtcccttcaagtcaagcagctctgtggcttctacactgcatttggggcagtagtatccttggtagggttgggtgatcatgtgttcagaggtcagtggtttctcttcaagatcttaccatttccaggctgcttgggatgctcagacctcaactctctccaagactttattttctcccatgcttcttaaaggcacaccacataccatgatctcccttggaaccaccatgtataatctcttcaatggtttttcaagtcttcttggctggaacattggtctgccacaagctataacattttagcaggaaacagaaatatctgtattacctttgaaaatgattcctctggggcctactgacctagtcatgacttgcaattttgagctcataattcagtaacagttactaaatctatgttgtgtgttttttgtttttggttttttactgattctctcaaatgatttatattaaacatcttaaactagcattgattaaaatcattttgggctaagttcttccccaaagagtaattcattgaaaataaatggattcagaccctactttataatgtgaaagactttgtgcagatttgaatataagatgacctgttttctgaggataacatgggcaagggacttccatttaggtagggcattcatggtaaccgcatacataggccacaagcagaattgagaaataggcaaactacatctccgtggtgcctgcaaccccattctttcctcttcttgagcacctcctcagtaggcaaacaatgcctagtgaagttgaccctggaaggtaggctgcaacattgccttttacaggtatggccagagatccatggttcagacctgacaccttcccactgtttttccaatgaaacttagcactacctttatacctcagggacttgatttccctgagttgatcctacaaggtaatggctgaatgtgctgccgggcctagaatcattctacataataaccaccacattgtgccagggagatggaaattgatgtcagagaaagcacccttttcttgctctccagtccttttgtggtacatttatccctcagtatctgtggaagattggcctcaggaccgcccacggataccaaaatttacagactgaagagtctcttttataaaatggcatagtatttgtctataactgacacacatcctcccttaaatcatctctagattatttataatacctaatcctatgcaaattctgtgtaagtaattgatatactgtattgttttgggactaatgataaggaaaagtctgtacatgtccagtacagatgcaaattttttctgaatttttttattgtggttggttgaagctatggttgtgaaacccacagctacagagggtgggctgcagttggactgggcatcaggagacctgaaatttgctttctacatctgtcaaatggggcagtcatatctgcccttcttttcttgccttgctttgaaaacaaatgaaacagttgaatttgagccacataaacttattcactcctactgagtttatagatttgaaagtgtgaaaaagtatttttgaactcccaaaataaatgtggtttatccaagatgttattttaatggcagagtttgtcatggttcagaacagggtgctatcaaaagtcagcagaactggaaaaatataaataaatcttgcttggtgaaaaagaaagtcactagcttaggaaccctcacacagcatgatggagtgtctggtggtatttcaggctatttacctatgattaacctactagtcactgactgctgtgaatgggttttttaatcttctagccctgaggccatggtcactttagttccaagacgttacacagtaacgtgacctgcttttacgacaaggtagtaagaggaaggcagagggaacactgccctaaaaacttcaataagttaccaccttcagctgggatctgggttttaagttttttctctagttgtttccatagtttgacttactaggaaataaattcagaggatgctgacactgaagagcatttctcacacccttcctcattatctcagggttattgaatagctttatcatgaggttgctccctcaaaggtgcttctctgaatagcctgtttcacatattagttgcattgccctgcatttgacacttaactcgttgtaccttttgtcatcaatgaaatgggatacaattttcttaacagcctccttttaaatataaggagactgaggcccaagacagttgaggaactggtccgggctcctacagcaaattgtaaggcagggatttaaaccaaggtaatgtggtctcagaattcctgtcttaacagttctgctgagctacccatctggcatttcttcacgtgcctggtccctggaggcttggcccttaatcctgaatattgaaatctcaaaagatcaaaagccctgaagtctaaaatccctcatgtcatatttttgggatttcaacattcaggatcatggcatctgggattgtgtctttcgggattgtgatcagcaccgggtcccaggacttcagagacactaaaaatttctaaaaacctgcatctgttcccttgaaggtttgaaaaacagtaagattccattcggggacattttctcagtatcaatgacttctatcctcttagtttctgtttctctcaaaaaaaaaaaaaaaaaaaaaaaaaaatcctccccttgcttagggcacccgggagactaaggaaggacagtgactgtgggaggaaatgcagaaacatcagaaccagccgagctggggacatgcaaggcctcagcaccgcaggcttctgggaaaggggactgcaaacctctcccgagaaggagcaaaggcctgggcagccaaggtctgagtgtgtaaggaacttccaccactgcagtctcatctgctgcggccagagggagaggtggaatggcaggaaagccacatcacagaactcatgtcaggctcacagcatttccagatttctctgctgttcccccaagggggctggcaaaagggggcaggccacccaggcctcagctggttgggaggggacgatgtgacttggacaccatgtggacaccagggatttacttccccccagccccgatcttgagcagaaagaagggataggtgtaggacggagtgggtaaaatccacttttgaagtctcacctttgtggatccatattccgcagtgggaagcacgtgttaagtccatgccctaaagatagtggtgtgtgtgctgcttcagacagggattgcttgggacctgcaaggggaagaaggaggttggtgagtagatccagttacggagcatagggacggtataagcaaagggaaagacagaaacggacacacatgtgaacgtgtgttttgacaccttgctggttttacttaaggatttctgcttatcttttctagtggcagtgtccttgttaaacggatgttccggcccatggaagaggagtttggtccagtgccttcaaagcagatgaaagaagaagggacaaagcgaggtatctctcctgctggggcatgccctctcagaagggatgcggggtgtctctcccaagaagagcttgcagccctcttgcccaggcccccatggctctgtgccagcctggtgactttctcttcacacaggaagtccacagtcttcttctttgctttaaactctgtcctttcaacaccttaagaaaacatttgtcattcctgggtgctggttctttcctttgccttgggagaacgtaatgaataaacagactcatccagcagcaaggtacaaggttaagaacgaaactcttgctgcgtgtgtggacagtcatacctcataagaactagtgattgagcctcatttgatacatgcaaactattcatctcacccaaataaatgagcctcaggtttctgtggcatcaccacttactcattttctcccagtcaaaggtcttattctgcttcaccaagagggtaagaaacaaagcttgactgtgcccatgtcttgcccagcatgtcaatgccatacaggattccatgcccttcctcggagtaagaggaaagtgtgtgggtgcacattcccctcagtatcctgctgcagccaacactgaggcttctatagacccaagacctagccagtactggattttttttttttttttgagacagggtcttgctctgtcacccaggaggtagtgcagtagcacgatcatggctcactacagcgtctacctgatgactttcagctatcctcccacctcagcctcctgagcagctgggactacaggcatgcaccaccatgtctggctaatctgtctaatgttttatagagacgaggtctcaatatgttgcccaggtctcaaactcctgagctcaagctatcctcttgcctcagtctgccagcagtacagaatttttttttttttttttttttttttttttttttttttgacaaagtcttgctctgttgccaggctaaagtgcagtggcgtgatctcagctcactgcaacctccacctcctgggttcaagtgattctcctgcctcagcctcccaagtagctgggactataggtgtgtgccaccacgcccagctaatttttgtatttttagtagagacggggtttcacaatgttggccaggatggtctcgatctcttgaccttgtgatccggccgccttggcctcccgaagtgctgcatggacttttaatgagtcagttcaccatgttaaatatgcccgccatctgcataggcttgagtactttgttattgagaaattttatttttttcctgtttgttgtaatgggatttgcactgtggtcaagagaacccgtctgtagcctgccacagccacctgcagttttgtgaccttggagaggttcctcacacttctgctcctcggcgtcctcatctgtaaaaaggagatggcaggagtgcctacctcatagagctgtgtgaggactgaggagttaatacctgggagacgcttcaggcaggcacctcccacataggcagcactccgtgttcgctgttgtaactgttagttttattattagtaactagttaagtgatattatcataactgtggataagtaattagtgcttcagaatggaaacagcataaatgcataaatgctacgttagaaacatttaaaggtttacaaaaatttctttaaaaaaaatttttttttgagacagagtctcattgtcactcaggctggagtgcagtggcgtgatttcagctcactgcagcctctgccttccatgctcaggcgatcctcccacctcagcctcctgagtagctgggaccacaggcacatgccaccatgcctggctaattttttggtagagatggggtttcactatgttgtccaggctggtctcgaactcctgagctcaagcaatctgcccgccacagccttccaaagtgctgggattacaggtattagccaccatgcctagccaaacctttaaaaaattttctgatttcacaaactcaccatcaaatattccagtacatttgaacctcattcttggatggcttttctatagagtcagggcagtaacatggaaatcaagaatcacggaatcacacaggcgaaactaattatggctagccttcatacagagtgcttggaggttaatccaaagactgtttttcagattattttgagattgtgaaaccagcacaaaaattgcctctagaaattgtactgggctgtggcctttgaaacatctgaatcatagacacatgagggcgctgtaaccttccagcaataacgggcactttcctcgggagtgatttttctttggaaaaggtcagtggggttactgggccccttgcttggagcatccactgagctggtctttgacaaataggggaataaggctcaattactttgcctatttgtttatttgttagaagttctccaagagagagaatgaacataattattaccaatgccacgattattggtttttgcctttgtggcagggtgtctgtgtgggagtcccttgggggctgcccatgtggccacctgcctttggctgcacaatgcctgggatgcatgatggttgttcttgcgactatcagcagagtgattacttcagttgctctgccacagacacagagtaatgaaagctggctccctgggaaagctgtgggggtggactgtgagcccagcacaccttgtgagttgctgtcaacaggcccagcaggggaacggtggagctgccctgcctggtgccactccaaggcccatcaacgcggctccctttaacactttccagccacacctgaagcaagaagagcagccatatcatttcaaagaccacgatttcaaaagaggagatttgtaaatccagtggaagcagtactcataatagaaaatggtttgggggaccaggcgtggtggctcatgcctataatcccagcactttaggaggctgaggcgggtggatcacttgaagccaggagttcgagaaaccccctctctactaaaaatacaaaaacttagtcgggtgtgatggcacatgcctgtaatctcagccactcaggaggctgaggcatgagactcacttgaacctgggaggcagaggttgcagtgagctgagatcacgccactgcactccagtctgggtgacagcgagactctgtctcaaagaaaaagaatatagtttgggggtcagcctgctggaaattcctttttttttcctgttgggggctgcagagagaattgtagactatttatctgcagcagcaatcaatggcttttttccttgactttaattttccttatctggatgtaactaaggtcctgtattctaattatttttccttgtaccgctaacattgagtcctcttataatagccattaggtcattagattattttagctgaaatgaaggctataaaatattccttccaaagaactaaatttggaaatctttggagacacattctatttatttaattggtgttttacttttatatttggtaaaaagaagagactcggcaatacctgttcattattttctttttctttttctttttttttcatacactaactgaacatccactggctgcagaaaggaaatgcaggcagaagccacatgcacccgtgtagacttggcctttgtgaagcaaccagctttaatgaagtccccccaggattgggaggagggggaggaggggtgggagtttggatgagagctgatttcattttctagtttcaactttgttcttctggttgatggctctgttggtgtctgagtgtcgctggtacccagagttggcagggttttttgccttgtgcattttccctagatggccatggagcttcagccttaaccttcttccttccctctgaaggaagaatcagaggccacatcactgggaggagggagaccactcagtggggatgagggtggcctctgaatgacagttccaagtttattctgggagctgagctgcaacacaactgctgtaaggatggggacaggcagaaagggcaatggtggcagaaggaacatcagccagcagctgtcacgtctgtgggaccctgggggagtgtctcagcctctctgagcctcagtgtgcacatcttaaaagatagccaagacttccctatcatctctcatactctctacgttctgaaattcagaatgttattttgcagagaaataaatagaaaagctgtactccacttcactgagggcactagaaccatgacaactgcttcccccactgatcgaggacgggtgcttgctgtgtgcaggccctgggctaagcgtgccacatggcttttatttcatttaaccctcacagtagctctgcgaggcagatgttattatccatgtttcgcagagaagaccaaggctcggagagtttaaatgaacaaggcccacagcaggggttgcactctggggtcaaacccagccccgtgggactccacatcctaagcctgctcctccccttgtctcggacagtgccccgtctccctcccaggcctgtgcaagtttgttatctgcctggagtttgctctccctcttctccctttctccccactgcccccatctcatcacttgcctgcattcacgcacacacaattcacaacttggatctctccttcaagggacccttccaggaacttcccccaacccctccaggtcacggccaggcccctataagcactgtttcctgacattttcctccataaccctgtgtctagttgtctgcttatttgaggaaagcctgcttctctaaatggactgcaaaatccttaaggacaggggctgtgatttaactaacactgccacaaccccaactcctagcacacatagcctatgggcccaggtgggcattcagtaatatttgtcaaaggaacaaataacacagaggaaaagaggttgcaaaaagagatgcgatgtacccctcaggagaaattccaatgggaacatttgtgtcaaagcatcctacggccgggttgtcggtttatctcatctaatcactccttcacagtccctagccacaggttgtttatggagatgtctcagtcacccttgttgaatgttagttatctggaccagggttctgaggcttcgcaggaggtgccactctccaacacctgtgtgacaggaaacagtcccctggagcagctgtggaattgtgcagcccctcggtcacgtggctctcttgcccatctcttccagtgctcttgtacgtgaggaaggagactgacgatgtgttcgatgcattgatgttgaagtctcccacagtgaagggcctgatggaagcggtaagccatatactcctttcagcctccaggaaacctgctgtgttctctctcctctggaatccatgtactaacgtgcagccaccgagatggcttcagaatgagctttatacagaacaagaaaaacctaagatttgtggaggcattgatctcgctactgtcaaggcttattagcatcttgaggagaaggaaactgaaaaactgccaattccctgtcagtttaaggctaatcacagttagatgctatggaggaaggtgaaactgagttctcacttgtctctcggtatgaaaccgaattagatatgattaactcccaaatatatacaaaacaaaaacaattaacaagtgtttcactggccgtgatggtgtagtccaaaagaaatatgatctcttggttaagaaaaaaaaataatgcagaattatagtgatttgcagtaagacttttcccttcctacccatggtcttgtctagtattacccaacttgggctcacaagaagctattttacattttgtttgtatgttattcacctgaatataacctcactagaactctactttgaatacactcccttactcccttcactcccaactgctcccccactggaccactgccccatacaactatattgtagaagatttgtttttttatagtgatagagacaacaggactgccaggaacacagttcaaaattgttggttggtttggaaaactgctacattggagcagcatcttgggttatgaagctaaatgttaaactatatgggatagttcctgtaagtggaatcataccatttctttcatttgggatactcttttttgagcttcctttgtgttgtagtaatcgggacttcactctttttatgattaaatagtattccgttgtgtaaatataccacattttgtatttccacttatcagttgatggacattggaatttttctaccttttggctattgtgaatactgctactatgaacattcatggacaagttttgtttgaatacttgtttccagttcttttgggtatgttccaaggtgtggaattgctcagccagattcaaaaagccacatgtggtatgattcaatttataggacatattgagaataagcaaatccatagagacgaaaggcaagttagtggttgccaggggatgggggtaggaggtggaacaactgcttaatgggttttctttgggggggatgaaaatgtttcggaattagatagaggtgatggttgtacagtattgtgaatctactaaacagcactgaattatacactttaagatggttaaaatggtgaattgtgatatctatctatctatctatctatctagtattcattgttcaccagaaatttttaaaaactgtaccaatgtcatcacgctgccctctgtgatctgttattaacaagtccccaggcaattccgagtggagcatcaaggacctccgtctaagaaacacactgatggaggattaggtcatcttttttcttctataggatttttccatagtatggagtttgttgttactggatctgcctcacattaaggaaaaacaaaaacagaaatcaatgccacaaaaatatgatctatatatattgaaataaaccaagattttcaaaatgagtctaagattgctaggggatagactaagctggaagctcataagctggaaaagctcataaaatattcagacctctctggacaactttggataatttcatactccaatctggcctttaagactatattaccaaaactgacttaatggggacagtgatatttgaaaaccacagaagcagttgcttaaatgcatattctctgacttcaactctagagattctgatacttctgaattgcaggtagatcagggaagggaggaagtggggatcaggaacttatatttttaacgagctcctgaggatattctgagatgagctaggtgtgagaacctctgatctagaccatttctgaatggattcattacactccgagtcttcctttttccttggtgtcttttctttaccttccatggcatctgaccagttctataagtgttctgtggatgcagttggaatggaccacagtggaactcaatgtcaccttcgatcccacctaaacagcagctcagcaacctctgcctaccctccccgcctcagcagcatctggctgttgatcccttttagtgggagctcattacacctgcctcactttggttagctgaaggtacagtgtgaggggtggggatgtatcctttgaccctgtaagccacagagaggtcaggttccctaggctggctctggtcagatgtcttatggcaattctgatttcatctcccctttatgtctaaaaagaaaaggtttcattgaagcaccaacacaggctatctccttgcttcctaagttatgcaaatgggaaagctgtgcaagagaagttcctccaggatcctcgggtgatgcagtctggaatgacaaagcagccccggcaacttgggggcagccatgaaggacagcaggctccgtgtaagcaagggcataagcatgctgtgaaatgaagcggtagaattgtcaagaacagtggctcctgctcactgtagttgtaccctaagtttatttgggatctgggtggggtaagaaagggtttcctttcagggtgtgggttctctttagaccagggccttactagtgcacgacactttaccatagtgacaccagtgcaccctcgtatattggtaatatgcatgtgtataatataaatatacacaatatgacatattatatatctatattggtatatacaaatgtatattggtagtgtgtgtgcgtgtgtgtgtggtgtgtgtgtatgtgtgtggtgtgtgtggtgtgtgtgtgtctgatgtgtgtgtggtgtgtgtgtgtgtctggtgtgtgtgtggtgtgtgtgtgtggtgtgtgtgtctggtgtgtgtggtgtgtgtctggtgtgtgtggtgtgtgtgtggtatgtgtgtatgtgtgtggtgtgtgtgtgtggtgtgtgtgtggtgtgtgtgtggtgtgtgtgtgtgtggtgtgtatgtgtggtggtgtgtgtgtggtgtgtgtggtgtctgtgtgtgtgtggtgtgtgtgtgtggtgtgtgtgtgtgtgtactatacagacagtatagcttaggggtcggcatatgggcttggcctcagaaaacctgtgttcaaattctggctgtgcctcttgctagctggacaagtttcttaacctcttcttcattgttaaaatggaaataataatactacctagctcgtgggattgttgtgagacaacaacaaatgagacaacagagatctgaaactctgcctggcccctggtatataccaagtccacagttaaattagcctttgttactaaatcattgtttgggtagaaatcctcagattttggatttctcaagtgctccttttctactgtccaaaaggcagaatgttatttttgctcgattccattatgtaatatcctatgaatttgaaatttcggaggaggcacagcatggggctgtggaaatggtgcaggtatctgcatccgaaactccgaagttgtgtggggaggtcctctctcctgagcccagaggcaaaaagctgctcccaagaaatgatctttatgccccacagtccaaagccccacattaaacaaagtctcaagacaagaaggcaatgtgaccctggcccccatgttttgttttgacttttaatttcaaaataatatcattgtgggggggcttatagtttttaacagctgaaagttatatagacagaaaaaatgctcagtgagtagaaaagggaaaaaccttaacttttaagaaaacgtgattaatcaagagatattatgcttgacctcaggccatcactttgaactctgtcactggttgaaaatggcttcccataaacacaaacatagtcccctactcattactgtggacctagggcattgcttatctaactgggcccgtcagaatcacctggggtacctttcaaagatgccatcccacagatggatcacttgaggtcaggagctcaagaccagcctggccaacgtggtgaaaccctgtctctaccagaaaattagctgagtgtgctggcatgcgctgtagtcccagccacttaagaggctggggcaagagaatcacttgaacacaggaggcggagttcgcagtgagctgagattgtgccaccacactccagactgggagagagtgactctgtctcaaaaaaaaaacaaaaacaaaaacaaagatgccatcccagaaccccacccatgatcttcagaatcagattctataggggtaggcccgggaatcagcactgataacaagcttcctggttgaattgaagcccattaatgtgagagccactagctggtgtgtaccttggcggggaactggtattagagtctgattctgccctaaggtcctacatgcattattcacttaggatggtaataagtcaccttatgacactcttttggttgcacattctgcgaaggtagttttaaaccaagacgtggccctacagactattatttcataaccgcatcgcagcggattttaggaattggcctgggtctaggctaccaccttcatcaagggcttgggaagactaaatgctctctgttgagaaaggaactcatagtcttccagggccagcagaattcacaactccaaatgtaaaagtatgccttgtgtgagtcttgcaattgttttggaaatagaaacacctgcttcatatcaatattcacattgttttgctctcatcctggactaattattgaaaggttgattgtgcctcaacttccttatctataaaatgaagtcatcaacagcattaaatgagcttaacacatatagtcagtagatcttagctgagcagatgatggcaatgatgttgatgatgcagctatttccacattagggatatttggattgcttcccattggagaacctgctgttattgcccctactgaacacccaactccctatcctcagccaggtgttatttaggtgtaaaagaaagtctgaactggagaataaggagccaaaaaacgaacaaagagttttctttaaaaaaaataatttttggcaattggtggtgaaatgtggatttgtcatcttgatagaatagtgttgccacccttccttccgagcaacttaggattgagtcagaaggtgtcacatcaggcagatttgttgaacagtttggcaatggtgacagtgttcctacagcctacaagggtttcctggagtctgtaatttaagccacttgataggttggagttctgttgtttaaaaattgggctgttcttatactcagcagacattatattcttccttgagatagtatttttgagtttgtcttcattaaagaagtctccaggccaggggtagtggctcacacctgtaatcccaacactttgggaggttgaggcgggcagatcacctgaggtcgggagttcgagaacagcctggccaatatggagaaaccccgtctctactgaaaatacaaaattagccaggtgtggtggtgcatgcctgtaatgccagctactcgggaggctgaagcaggagaatcccttgaacctgggaggcggaggttgcggtgagccaagattgcgccattgcactccagcctgggcaacaagagcgaaactccaatcctaaaaaaaaaaaaaagaagaaggaagtctccctgtaagagtgaggtcaggacactgccataaatgcaagtgcagcagcatgagaggagagggtagactggggaacttgactgacttggttcaaatcataactgtgtagtcttgagtacgtccatttttgaatgtttggtttccttccttgcaacatgtgaaaaatgcctaccatgaagaatagttttgtttgtactacccttgacctcttactgttttggaaagaactcttgaccacaacaaagaggaatgtaattatggcttaatctatgccaagctgagtcacttttctggattattcttcttattcagtagtcctaaaccccccagaccttcatttcacctgccagaaaatcattatctctacagatctatacacccagctagaacaagaaaaaaagttctctatcatcagccagatgttactaaatattcccatacttggtatcatttggagaatatagactatttttcttttcatttgcatatttagtattacatcaatcaagccatccacataactttgatgattcaatttggcttctttattgttataattaggttttaaactgccttaaagacaaggaatttggtggtggtgatggtggtagtgagatgagtttccaattctttttatctgcatttctagtgatttttacctagtaatcttgcaaataaagcatctctggccactgtagcttctggctaatccccaaggccagcagggccactcatacctcagggcctttgcacttgctgttccctctgcctgaaatgtccttcctccatatggacaaggctcacttcttccaggccgctgctcacatgttgctttatcagatgggccttcccagcccacccacgtaaatagcatcttcatcgctctctgtcattcacagcacttatcaccacttgacgtagttatatttgttccatgtttattgtttctctcttccccagttgaatgtcaagttcatgagatcaggggctgtgtttcttttccgtggtgtattcccagagccttcagcataagttttgttgactgaattgggcatctgctgtatgtatacccctagactgagtgctgtgggtggtgtgatcttcacatgccctgctacattggatttttataatatccccatgaacatggcaggtaaatagcatcatcactactttacagatgtagaaactgaggtccagagggggtggtttccaaagggctgacagctccacaaattgatagagccaacttaagtcctcaagcaacttaagcccaattagggagacatttacatctgaaaagttatcacaagaaggataaacattcccattcacagctcaccacatctaaagagatcaggcaatactaagccatcaggcaagaagtagtctgtgtggtgttgatcccatgtagtcagacagctgagctgggcgagttactcaacctctctacactccagtgtcatcacttctgaaatgagaataataatatgagataatattatgaggataataaaatgggatataggattgttgtgaggataaatgagtgtgtatacatggtgcttaaagtaacacacagaaattataaattaatatatactgggtgtgtgttcatgtgtctgtctgtgtgtctgttagtgtattttatgtgtctaacagacacacacacacacacacacacacacacacacaggcaatgaccgtgagtgctatgaggtggagaggcagactgtgtttcccctaaggtgaagaggctagagaaagggatagggatgttctctctcaatgaagctagctgatgtctacaaagaaaaaggtcgctcatggccttagtagcacccagtttttgtccaactgtgtcattcatgtgtggaggcgattcatggatcatacctggttctcctgaaatgtcaaacacggccacctaggcagcatttacaagcaagagtccactgcttttttgatgtatatcttaagcgcccccagtgaatgaacagcatataactccacataaaaatcattaaacgtaattgacttccagagcaggcagttctgttgtatgcctctggagaaggctggctgaattggaattggtctgtaccttctgcctatcatgtacatgaggtttttgggcaaagagaactttccacaaaataagtccaaaaattatagatcatcagacaaccaataacatattgatgagatatctccaagatctagaatcatcctgggtgtcaaggaagtctttggggtttttacaaatattgataatgcactttttataaaatgcactttttataaaaatgcatgctcagttgagacaacttgaaaaacacaaagaaaaggccgggcgtagtggctcacgcctgtaatcccagcactctgggaggccgagacgggtggatcacgaggtcaggagattgagaccatcctggctaacatggtgaaaccccgtctctactaaaaatacaaaaaattagcagggtgtggtggcgggcgcctatagtcccagctactcaggaggctgaggcaggagaatggtgtgaacccaggagacggagcttgcagtgagcggagatcccgccactgcactctagcctgggcgacagagcgaaacaaaaaaaaaaaagacagaaaaagaaaaaaagaaaaacacaaagaaaaaaacccaagcactccaaatcaccctgttccgacagaacgatcatgtgccacacgttttccattcatagaaggaaggattgttgtgtgggtgatctcatccagcccctgggcagaaggaattttctgccacccctgacagacagccagcttcctctgaatgatgatatcctgcctggtctcactttccagggttctgaatttggcaaagcgcatctccctgacgtgcatgcaggcagggaacactgtcccagggtggcacatttgcaagctgcctttgatgctgagagttgcactgagagcaggactttgccctcctggaggcagaggtttctgccagttgcttctttgtacagttgcttctttgtactggatggggtctgtgagtcttgcccccaaaccatctcaacatatgcccattttctctagcagttgagaatctaaagccatctgccaggttgttccctttcaaattctgtctctgccacttactagctgagggatcctgggtgagttacttactgactggaagcctcagttctctaatctgagagacagcgctcacaaaagcacttattccattgtcatgatgtgaggactaagcaagtgaatagatgcaaagctccacatgcctgtgtgctggggacccagtgactcaataaatgctagctatggctggtgccgctgctaccctagattttatgcccttacccagttctgacttacatcagttgatttgtgagccgaggtgttccctttcatgctttggggagctgggaatcaaacccccaaaaagagaaaacccaagcatcagattcacttttctttaggaacagggggaactaacagatataagctgcttgatgttgagtggaaaaaagtccctattttatttttccattttattttaaaaagaagttccaagtaaccctaaccaaagttcaaaaaaaaccaactcttgaagggcaaggaagtcagaatggtagttaggtacaaataatgtaatctataggacttccgagtatgcaacaagctcttatacacagaaaaatgtttatcggggtgcttacctttttgtgccatggatacctttggcagtctggtgaaatatatggaccctttacagaataatgtttttagatgtataaaataaaatacataggattataaaggaaactggttatattgatatttatcatcaaaataataaaaaaccatgcttatgatataggaaacatgtgctccttattcatgcattaaatatgatctatgggtgagactaataacaactgtaatttcaaagtatgatgaatgaatgtcatcagcattttggaacatctgcaggattctaatatgacatgaaatatctgtgatttccgttgttaaaaaagacacaggtattgctaatgttactttgtgttcatacttgaagaaaatgctacattccagtttgaggttagtgaaaataaagatgaatgttttccccatccaagttcatatatatactgtttgggcatctgtagacccccaggttaagatcaaccatgctgaggaaatggcagctctagaaatgatgtggaagcaggttgtccttcaaggattttttccagtcaccagctctgttaactgggtcattctagaatcccagggaatggggaaggtagtgagctgactcctgagaattggctatgtctggggttctttttccttcatcccttcagcaaatcttcgctcagagccctctggatgcagaaccagctccccttggcaattcccttttaatttgcatgtgcaagtatggccaccaggagacatgacaaacagtgcagatgccaggcatgggaggaagagagaaagaaagcataaattcttcaaaacggcgttttgggggaggagtgatgaaagctatgtcaactgtacattattgagtgtctcgccagatttggaaacagcattaacagcattaagatgttcaaggaaactttctagtgttcatttagacagatacaatatcttctcaaggagtcgctaaaggaatttgatattctaaagagatggtgagctgctatacagccagggttacgtagaagtatttcaaagaggttaaacatttctggaaacttttttttttacctaaccatctactagatttgttcaattcttaaaaaggtctattgaaatctctcactataattgcattgtttcaaggttttcaagtgaatctcccacaataattgcattttcattttgcaatagcaaagcacttaagcaaaagttattacatctgtaacaattacctataataatttttgcttaagtgccatgttatcagatgcataaagttttatgattgctgtagcttctccgtcaatagtgctttttatcattatatcatatatccattcatatccatatatcatatcattatatcatatccattcttaacctcatcaaccttaaattataccttgtcactcctcttttgccttgtttgcatttgattggtatggtcacccatcagtcatccttcactcaccacattgtcttcagtgcttttcttttaaacaccatatagctgggcttctttctttatctttctctttatttatttattttcttttatactcactgagacactctggcttttgctggaagaatgaagtttattctcatttggtgtaataactgatacacttgattgtatttcttccatctttttgtttattatttcattttgtggcttcttactttctctttagttttgcagtcagattctaagttgttgtatttcaacttttaaatttgaaaattattatttacgtttcctaaattttccaaattcctgaagtaattcttcactactatttgaaaataaacttccaactattttctccaccagtgccttccagctccgctcctccctctgtgagatgagacttcagagctgtattttctcccttgccttccctcctctcactaaaattagccagttgaaatgcctaccctctccccatcaacttccaacttccagattttgcaaaaatagtttaatgctttatttctagaaaacaattagatttttctttgtcctttttacttcaagaatatttagcacatacatttcacatttgcagtccacataaccctatgtgccgagcttgtccaacccacggcctgcaagctgcatgtgggccaagatagctttgaatatggcccaacacaaattcgtaaactttcttaaaacattatgaatatttttttgcaatttttttaaaaagtccatcagctatcattagtgttagtgtgttttatgtgtggcccaagacaattcttctttcaatgtggcccagagaagccaaaagattggacacctctgctatatatactcaagtttacagcatgccactggtggctttttttccttccccttttctctagtttggtgtctccatttggatgcatttgctatttggatggagctcttttgtgaatctagtggtcccttgaggtcctggggaggactagttccaggacacctcccccaaactcaaatccacagatgctcaagtccctcatgtaaaatggcatagatatttgcctgtaacacacacacatcctcccatgtactttaaataatctctagattacttataatacgtaatacattgtaaaggccatgcaaataattgttatactgtattgttttgattcatattactttttgccattgtacttttatttttcattttttctaatattttcaatccatggctgattgaatccaagaatgcagaacctggagatactgagggccgactgtattttttcaaatgagatatttgggtgaaatacactgctctttcaccctgataagtgagagatagcttgttggtgtatgggatttatggagtgaaatacttttttcctgtagtctgtaagagttcctgtccactgtcatttggtttctagtgttgagatgagaagactgaagccaggcttatcttttttggaggtaacttgctatttctgtccaggaagttccaggatgttttcaagtctttcttcttttccgtcatgatttccatctatgctctatccttttgctttgcgctttgaaattgtttttgacttgatattttctgacactattgagattgctaaattgaccacctatcctttcatttgctcaacttcaaaaaatgtttagatcaataatcatatttgtatatcagaattttgcatgcgtgtgctccacaagtcttctgtttttcttaagtgctcttttatgttctgttcgaattgatgcctccaacagaagttctgccaattttctttgcagttcaaaggcccccactggatgtgttgtttttcatccttggctcgtttggctcaggtgtgactgtgaggtaatctcatcagtgatggattagtgatgtctgtcaggcccgctacttggtcccagtctccttctgctcgcccagctctctgctcacctgttccatgcctttgggccttattaggggatggggagttcttcccgtggggtgagatagatggaagggtgggaatctgtgagtctctgtagagtgaactcttcttaggatccaaagctcctccagctctgctctagacctcttcagcctctctttccagcctctgctagactttccaataatccacatttcaaacttcacctttctcagctgcctgtgagccccaccagctgctgggctcagaaggggcagacagagttgatttgggagtagagagggtatgaaagacatttagggcagggctttcccgaatccatctgtaaactgttactactttatatttataaaagtgaaacacaatgattgtaaaaataaatagaacagaatttttcaaaataaaaagtaaaaggatctccttgtttctgtccattcttcagtggtagtccctgctaatatgttggtgggtccttcaaatattctctatgtacttacatatatatacatatatatatttaaaaatacaagtgggatcacaccataaacacagttttgcaacttggtattttctcctcaatatgttaagaatatttttgttaatgtgaattcatgtaggctttccacatttcttttgatgactgcatgatttttaagtgtgaattatcaaaatgtgtttaacggatgtttgttatacgcagttttctctatcctaaacagtgatgctttgaaaatctttgtgtgcatctgaaggtatttctgtagacctgattactagatatggaatatgtgggtcaaaggatatatgcattaaaaattttaatagcttctgccaaatttctttccaagaggttgagcatgttattcttgcatctgagagtaacaatatggaatatgagaactgctgtttctcatactctggctgatgctgtattatcaagttttagttttttgttagtttgaaaaataggccgggtgtggtggctcacgtctgtaatcccaggactttgggaggccgagctgggtggatcacgaggtcaggagttcgagaccagcctggccaacatgatgaaaccccatctctactaaaaatacaaaaattagccaggtgtggtggcactcacctgtagtcccagctactcaggaggctgaggcaggagaatcacttgaacctgggaggcagaggttgcagtgagccgagatcatgccactgcactccagcctgggaaccagagcaagattccatctcaaaaaataaataaataaataaataaataaataaaaataaaagtagtatcctactttgctttaatttgaaaattttaaattatgactgtgtggtgcatttttttatatgctcattgtccaattatttttcttccgtgaattgcttcttcaggatttttcttcctttgcccattgaattgctgatctttttcttgatttgcaggagttctttttaacttaaggaagttagttccatgtctgtcatttctgttgcaaaaatgtttcccagtgtatttttttgtctttagcattttagtttttttttttctgtactgcgtttttaaagttgtgttgtttttattaacctttcgacctttttctttaggtttcatgtcttgcttagaaagatcttccttactttaagatgacagctgtccaaaaaattaactcatggtttcttcctctacttttatggtttcatctttcacatgtaaatctttgatctgtatcaaatgtattttggtgtaaggagtggagaaggaatccaatataacttgttaaatttttttctagatggctactatttcatccaacatcatagttacagtccatctttttctgactgacctggaacgctacttttatcatagattgaattcccatgaggctgggttttttgttgaatgatttaaagtctatccaaagggagaggctcataaatgagtgttttgagagttcgactcatgagtgaagagcactctatccctgggaaaatgtccaagggagtgaaactggaactttcccccttgcctccagttgggcgtccttctgtgctcatctgccttcttgttattggtattacagatatctgagaaatatgggctgcccgtggagaagatagcaaagctttacaagaaaagcaaaaaagggtaagaaagaaactgaacttaaattgactttcaaatcagataaatccacatgatgccttaaaaataaaatgatgcctgtcttttgttaggtctgttgcccacttttcataaaaattgtgtccttcttccagagaattgcagaggagattgcatttggaagatctttaggagagagggagggagggaggcagtgcactggcactatgtcaactgagatgcctatttcaatgacaagacaagcaggaagaccacagaggtctggaggtgctgtggacactggggagaatggcaaaatcacctttctgcagggagtggagtttatagggaatcacgtatggcccttggggttggtttctgggtggcatactaggaacaaaaaatggtttggaacataggggattcctctaaggtaattatcaagaaaatgttctcaaatgatcattggacctgtgtgttctcattgttaagaacaacaggtcatatttactgggtgttcagtaggtttggggtcccttcctaagtactttacatgtattcctctatttagttctcaccactttatgaggtggaatctcttatcgctgatttattgatgaagaaagcaagccagagggggcttaagcatgtcgcccaagtctcatgttcagtaggtagaggacagatttgaacccatctgtgtcctcaaagctcaagtgcttagcttccacgttctgccgtctgactttctgtgtgggcttcctatgtgtgacggtctaagagtaggggccacaggagctagtggaagtgccaggagagggtatctgttgactcagcttctggggtattttcctacaaaaggcagaagatgagtcaactcttctccggatcactttcataaaggaaattggattatctgggaagctcaggctttctgagtgatgagtcctgttggttgattggaggatctgacaggaaaccctttccacctgagctcttgttggaagattcactaaaatgcacgttatacttcttgccgaggtcaatgtagtaggctgggtgtattactgacagtgagatttcagtcgtgtctcacagtcttattgccgagcagaaatcctcagtgcagaggtacatgctgatgataacattttgctttcatcaagctctgtatcaggtgttgtgctaaatgtttttatcataaaaacaatccgttaaagctaagtgactgttcttatttttacaggaggataaactgaggctctgaaaggctaaacagcttgcctgctgacacataactgtaaaatgatagagtcagtcagtggttcattctcaaaccagcatctgtctgacttcaaatcatgaaattggcttaaggaaattatggaagtctctggaagctgttggctttcttaaaactctatcagggatagttagccacaggagtaggtcacaggtggtaaagtacaagtgtcagaatgaggtaaagctaatttcaaaatcaagctcagccatgtgctaactgaatgaacttggggaaacaatttaaccttgttgaggtcagttttctcatttgcaaaatggcaatgacacctaccttcacagttgctgtgagaactaaacacaaggtcatattacatgctcaaaaaagggtagctgcaattcttgcttgttttcctcttcctcctaagagcagaggcaatgcatttttaaaaatgcattttcaagggcaacatggtttactgaaaagagttagagagagagcctaatgatttaggttctggccctggtaatcagtaactgtgattctgggcttcctaacttccctgggcctcagtttactcatctataatgcaagcggtttgggttgaatgttagttctgagaaattgaggctttgctttcctcaaactagtttttgggcaaagaaaacagaatgagggtctttccctgccttgtgtcctctctcctccactcctcccagcctccaccacaaaagaatggctacgagaacccccagcctggagctccccttgccctgggcacattgttcacggcgtctttgtttttcacacccctcccccctccatggcagcatcttggtgaacatggatgacaacatcatcgagcactactcgaacgaggacaccttcatcctcaacatggagagcatggtggagggcttcaaggtcacgctcatggaaatctagccctgggtttggcatccgctttggctggagctctcagtgcgttcctccctgagagagacagaagccccagccccagaacctggagacccatctcccccatctcacaactgctgttacaagaccgtgctggggagtggggcaagggacaggccccactgtcggtgtgcttggcccatccactggcacctaccacggagctgaagcctgagcccctcaggaaggtgccttaggcctgttggattcctatttattgcccaccttttcctggagcccaggtccaggcccgccaggactctgcaggtcactgctagctccagatgagaccgtccagcgttcccccttcaagagaaacactcatcccgaacagcctaaaaaattcccatcccttctctctcacccctccatatctatctcccgagtggctggacaaaatgagctacgtctgggtgcagtagttataggtggggcaagaggtggatgcccactttctggtcagacacctttaggttgctctggggaaggctgtcttgctaaatacctccagggttcccagcaagtggccaccaggccttgtacaggaagacattcagtcaccgtgtaattagtaacacagaaagtctgcctgtctgcattgtacatagtgtttataatattgtaataatatattttacctgtggtatgtgggcatgtttactgccactggcctagaggagacacagacctggagaccgttttaatgggggtttttgcctctgtgcctgttcaagagacttgcagggctaggtagagggcctttgggatgttaaggtgactgcagctgatgccaagatggactctgcaatgggcatacctgggggctcgttccctgtccccagaggaagccccctctccttctccatgggcatgactctccttcgaggccaccacgtttatctcacaatgatgtgttttgcttgactttccctttgcgctgtctcgtgggaaaggtcattctgtctgagaccccagctccttctccagctttggctgcgggcatggcctgagctttctggagagcctctgcagggggtttgccatcagggccctgtggctgggtctgctgcagagctccttggctatcaggagaatcctggacactgtactgtgcctcccagtttacaaacacgcccttcatctcaagtggccctttaaaaggcctgctgccatgtgagagctgtgaacagctcagctctgagtcggcaggctggggcttcctcctgggccaccagatggaaagggggtattgtttgcctcactcctggatgctgcgttttaaggaagtgagtgagaaagaatgtgccaagatacctggctcctgtgaaaccagcctcaggagggaaactgggagagagaagctgtggtctcctgctacatgccctgggagctggaagagaaaaacactcccctaaacaatcgcaaaatgatgaaccatcatgggccactgttctctttgaggggacaggtttaggggtttgcgttcgcccttgtgggctgaagcactagctttttggtagctagacacatcctgcacccaaaggttctctacaaaggcccagatttgtttgtaaagcactttgactcttacctggaggcccgctctctaagggcttcctgcgctcccacctcatctgtccctgagatgcagagcaggatggagggtctgcttctagctcagctgtttctccttgaggttgcggaggaattgaattgaatgggacagagggcaggtgctgtggccaagaagatctccgagcagcagtgacggggcaccttgctgtgtgtcctctgggcatgttaacccttctgtggggccaaaggtttgcatcgtggatccagctgtgctccagtctgtcccctcctcctccactctgactgccacgccccggaccagcagcttggggaccctccagggtactaatggggctctgttctgagatggacaaattcagtgttggaaatacatgttgtactatgcacttcccatgctcctagggttaggaatagtttcaaacatgattggcagacataacaacggcaaatactcggactggggcataggactccagagtaggaaaaagacaaaagatttggcagcctgacacaggcaacctacccctctctctccagcctctttatgaaactgtttgtttgccagtcctgccctaaggcagaagatgaattgaagatgctgtgcatgtttcctaagtccttgagcaatcatggtggtgacaattgccacaagggatatgaggccagtgccaccagagggtggtgccaagtgccacatcccttccgatccattcccctctgcatcctcggagcaccccagtttgcctttgatgtgtccgctgtgtatgttagctgaactttgatgagcaaaatttcctgagcgaaacactccaaagagataggaaaacttgccgcctcttcttttttgtcccttaatcaaactcaaataagcttaaaaaaaatccatggaagatcatggacatgtgaaatgagcatttttttcttttttttttttaacaaagtctgaactgaacagaacaagactttttcctcatacatctccaaattgtttaaacttactttatgagtgtttgtttagaagttcggaccaacagaaaaatgcagtcagatgtcatcttggaattggtttctaaaagagtaaggcatgtccctgcccagaaacttaggaagcatgaaataaatcaaatgtttattttccttcttatttaaaatcatgcaaatgcaacagaaatagagggtttgtgccaaatgctatgaacggccctttcttaaagacaagcaagggagattgatatatgtacaatttgctctcatgttttaaaaaaaaaaaggtaaatgtaacttaatagttttgtaaatgggagagggggaatctataaactataaatacagttattttattttttgtacatttttaaggagaaaaaataaatattcataacataagagtaaaacaacagtgtctggtgctttctgtgcagccagtgttggggatttttaccttgttggagagaggtttccatgtgacgtgggaaaattctagctgcccaccctgccttcaggtcctgggcttcaacagagcagggatttcctggtaaagttactttgctgtgcttcaccccagtgttaaatgtgaagagggctgaagaacttccagggcttgtgtgtgaccacggcaggctccccagggtggttattcttggccagtccctttgggcagggagttggttctgttcacttgcttctgcccatcctcactcccaggcccactcgcccgcccttgaattcccacaaaagctttctgcttccttagttcacctgcaccaacctctgcatggaggctgaaaccatgtggctctaactccagttttctcacaatctcttgccctggaacccacaggctccctaagatctgttggctcgaatgtgaacacctggatgcactatcccagtatctgctggggtttccttggtgggtaccactctgtggagccacccacactcctttaactgctgtccatgattatctcccaagagcagctctgttccaaacaagtagcatttctacattcttctacatcttcccatctctctgtctatacatgtccacagctttcaaatcttggctaaacatcatttgccttcaggaagcctcccttgaccaacttcaaccccagcagcatctccagcagcctctgtgcctagaccagggactgggaagtgagggcatggaggaagcgctcattgcagagtcttctggagagatcctgggattagaaatgggctccaaggcttgttgtcatgactgtgttccacagcctcattaggaggtcttggtgctctccccagctgtccaagtaggtccagctgaggatacgagctggtctccacatctcctgaggcagcctcccccttggcctgtggcagccacggtcctgctgttaggtgctcgccatgtgtgccaaccagttccctggaatgagacgctggttggataggcgatgacggttgtcagtgtcgtgaagttcagtaccagctcttgtctcccactctctacactgattcagttcgattactctggacctgatgttttgccgtgtgctggagagagaggcaagttagacacagtctgccctcataggaggtggggtgcaaaaggatagtgatctggaaactttggggactcaggaattctatagtggggcctctgatcagccagaagcagcaagaaagaggaagaggatggtgaaaaggcaccaaggggggtggagccaagatggctacataggaacagctccggtctacagctcccagcatgagcaatgcagacgacggttgatttctgtatttccatctgaggtaccgggttcatctcactagggagtgccagacagtgggtgcaggacagtaggtgcagtgcaccctgcgcaagctgaagcagggcgaggcatt

SEQ ID NO: 238 - DNA, 769938 bp, Homo sapiens
  source 1..769938: mol_type = genomic DNA
aatgttacattaggaacagaaatgctgcctcttttattgtgtccacagcaaggaaaggtcagttaaaattgtctggagcttttatctcatttacttttgccaaggctaggagtacaaaacaaggctctagttaagacacagatgctaattcatgagcagatacttttgggagtgaaagtttcctgaaaacgaagctggaggcactcaattaagtgaccccttcaccttgggagcagaaggtcacatagagacctgagttatccgttagaccttgcccatctctgttatttaataatatttaaaatatgtttaatatttcaattttttatatttctatcatctattattaaatggaatgacttttaaatgaaaacgcacaggccatagactgcgtccctccatgtcctcgtggcctttaggaccactggtcttttcttctttaatgtgtctgcttctcctttagaacttgaaaagacaaacattaggtatggaattagttttaccttggcactattcgggggatttctgatttaggaactaggcagcttcttcttaagaaaacagccctttgtggttccctgcagctgctcctgtccacccatctgctcacagaatccagcggtgtctgttgcccgcccctcagccccagtctgaggagtggccccaacgtggagaagcctgtccttggtgcagggcagaagaactagggctgggcatcctccttttggtttctagaagaagaaattttgatcatgtcagacagcctcctcagatcagctttactgagcttgaggccgacagcggggctgtcccccacaaagtcactgaagccaggggactttttcagaggtcggctgaaaagcacacacatctgggggtggaagatcaggttgatggcttgaggcctgtaggatgactgagggcataagatgttcattggagaaaggtctccacagatcctgtaagggccaaattttgagaagccaagctgggggtccagccaagctgtgctccaccaggaatgacagtcccttagctctgagacctaagcacagggaagcaacttatctgaggtcagggtgagtgcagagatgagagtggcagcacagtcagctgacaattaaaggggtgttcattcctccaggccatgggagcacttctctacgcatgatgatgacccagttctctcctaagacacttccaagaacgtaatattttaaagaacactgttaggttaaccaaaaattagacttgctcctcagcctgtccctcacactgtcccctggttggtttcagggaactctggatatgcactgggtgaggagggcctgcccccacctccaggcatatctgagacccccttgaggagaggagttttcctcatgactgtccctgctgatagcacagaatttacttcatgatctcagcatgcccagaaacaagcagacagtatttcttcaccccagagaataagagcatagggagcaaagacaagatttattattaaacaactttaatccaaatgctgattattatttgcagtgtctgaaggcacaaaatatacctaaaatgtatggaatagtctaaacagagttataaatccaaagagcaaagcatgaaaaaaagatacattctgagctgacacagaaatctgagttgggaagtttttttttttcctagagaacttgcttgaatatcaatcatttcccctcatgccaagggtagaaaattctaaaaaaaaaaaaaaatatatatatatatatataaacatggtgaagaataacaccatgaggtgttaaggattttgtataagcagaatacttctcttgaagatgctggtctctctctctctctctctctctctcacacacacacacacacacaaacacacacacacaggcgcacaaacacatcctccatctccctctctttcctccttgacactcattctaagcagaaccatccaagaagacatccaagctataccccagaagacaggccatctcagggggcaatgaggaaacagagttggtgtgagataaggcagtgagaccagagtttgattaaaaaaatagagagatatatatgtgaaaaattgaccattcagggcagggcccccaacgtgctgatggaaaacaaagcctgctcttcctcggggtcatggtagcccacctaggcttctctgagcatgcctggctccaaggtccacatgctctgattggagaaatgtcaatggattgcctaggtagcacgaatatcagaccattctcagcatccagcaataaataacataattataaacactctcttccccacagtgcttttagctgactgtgtgatttggccgttctttactgctcaatcatgtcactagggactttaggaaagaaatcaatcctgggctagttatcaccctcataaatacatctctctagaaactctacaaggctatagaagaagcaatcaataggactttgtatttctccatgatcacagaaccaggctctcagctccctgattactgctggctgtgggagctccacctccttcagtgacagatgtgggctgtgtattccattctgacgggtctggagatcagactaacctttgtctttaggagaggaactgaagtgacacaactcagattcccccagttccactcctaatggttctttccctgattctgtagtttagttgcctcagaaagggcaactgaaggagggggcgctgttaggtggtcctaggcttagaaaactgggcttccctgcagctgtacctgcacagggataggcctggaaatctcagaggttatcagatgcctgagtggggagggcccctgctctgggttggattgctgcttgaagaggactccaggtctggtctggagagggtcgtaaaggtggaagggagagtttgtgctggagccagccctgtttgttggactgcctgcaggatttatgacccagagataggcctttacttttggggctacaagcaacttccctggtggatgggagttacacttatgcttctcacctaaggcgcaaggcaaggcttcctcctacccaaataaacatggtctcttttctctatttctcagcatgccccatcacctggagtactggtccacccacctgggcacctcccccaactcttactaacagagtccgtttgcctgacaccacaaagcttctactccctgcatctatggcctcacttccttctctcacctgggaccatgggtccaaacccaagggaatattcttcctctacctggccttttgttccaccacctcacctggtccatgcaactaaccccacctcgcaactccctgcccccatggaccttcttccagaccaaccccacctccgcccagtctccctgaggaaacgatggagtctgccctccttcccccaatattctatcactttttgattcttctaattttgaaaagaaaatgaaaaacaaggccaacagtatgatatgagaacagctcagtatcaaagccctcaattacctcactatgggtaattgtcagcttctctcgggcccatggggcagaggcacactgcaacacacacagcggtgactaactcgtcccgcaagatccaagacaggacaggatagccctgagtccagggcacctcctcagccccaggctacccagaacagccgatcaccctacagcacagcaacccagtgggccagcccaatgcgggctccaaactcactctttatcaagctgagggactaaaagggacgaggtgccaggagcaaagaaatggggcagcaagctgtgggacaaggcagcgagtggcatgtggggttcctcgtcttcccttctcccccagcagagaggggctccttatctggtcgcccctcctgccctcagaaaggcccaggaatgggggggctcctttggcacttcagaatgatcacaagtaatttgcctttttattcatatagaacaaaatttacaaagtcattcatacagtttttgtgtttttttactgacttcgaaaattgggaatattcaaaatacacttttaccccactccattctgtcattatttacacatatgtacaagaaaaatgaaagagtctctgtgtatgtgtgtgtgtgcgagtgtgtgtggtttgtgttgttgttttcttgtattaaaaagctctgctggtcgggtgggtgggagggtgggcaggagggcaggcggcgcagtcagatggaggtcccgtgggaggtgtccagagcctctggaaggacgcctccaggcacgggctggaaggacatggggatgggggtcttcaccgggctctgccggaacagccccccgttgggtgacctgtgtttgcactgcatggagggcatggtcgccgagctgctcagcggcagcggcaggttgctgctgggccctgatgagagtgtccggctggtgccatggctgctctgctctggcagaaaggtgctgaccgagagctgggtgttctggtactcccgtgtcggctccaaggtctgggtgggagccaggccccccatctccagggccgagagctcaatcgacgctggggaaatctgcttgtgagcaatgtcttcatccatgaggctgttcatgcgccggtggacctgctccaagttcacttctttgtcctggagggaaggcataggaaggtcaggtggagccctaacagtgagtcaaggctggcttgctacagctctggatgtctgtagtcaccaggcctggtcagcctgttgggctgtgggcgagtatccctttcatgtggctcccacctcccctcaattatatggccaaccctcagttatctggagaagccaggggggagacatgatccctatgtagcaaagaagatgccatcaacaggccttggctgcatcctgccttgcctctgtactcagtttagagtcactgccatacccagaaccaacccttaggacaagatgctttcaagagcaggcagagacaggagaagaagtcccacaggaataaaggaaatagtccttgagcccctaaggtgtcccatgaatttgccacttagagttcaagatgatgaaaagactttgtatgatcatccccaccttgcacaaaaggaggctcaggctcaggaaggttcaatgattcatcagagtcacaggaccatcagtgttagaggcagcttggaggcctggagccagagagaagccctgcctcacccagtgacctgtgtcctccctgtgcaatctcttcaggcagcccaaggagggggacatatccctgtctggaagggcaagggggcgtgggttcctgggtggagattgtgaggaatgggacttccccagggtcagctgaccctcctggtttcatgagggttcaaggctatctaagtgggtgatctcacacctgatactgtctcaccacagtgggtgatatcacaggaaattacttggcttgtttatttgcttaagaaagaaaacaaaacagaacaaatattgttcctttcaaataacttgatgatttccctacaatgtcagaataattaaaggcagacaaactgcctgaaagctcaaggaagacgtcatctccttccttggcttccccgctgtgaggtgggcacaggacctggtgctcagcagaggagccatatgagcttcccggtgaggttgaggctgcagggactttgtaagcagcatgggtgctgatgcgccagggaatgtggtgacctttccctcacctcaaactcctagagaaatacagtcccaaagctcagctcccaggccaccctgcaggtggtctcatgttggcatcttgtattggagaaaggaacccatcccctgtccaccttgcaggggagttagaaatattaagaaatgtagaagccctgaatatgccttcagaaggaaaaagaaggaatcacatgaatctaagagccattccagtgactgctttgagcttctgtggggacagtgggagaggatttccacccccagaagttcaactgaatgataggcatgagccctgaccagatgagtgcatgaatcacagggctaacccccacaaagggtcaactcagtgttcctcaagcaaggaggtgaagtgctctgcagttcactccttgcctcaatgtcccctggcatatagaaggtgggaccactgctctctccgcacctttatgagttcatggttggcacacatggtttggcttctgatgagacacctgctgtcagtcctagaatctttcccaggacaagaaaactgacaacacccataggacaactgacaagtcattccagggcaggaggaaatcaagacagccaactagtttgagaatagaggatgctatgggatgtggctcgctgtcataggtgaaaatgacatcagaaaccattggcacagcctcacaggcacagtcacaacttcagtgatctgaagcccacccacacaagcagagctcagctcattcgtgctgggagaccatctctgagttagggtcacctctgcatggcaagtgtcgtcgggaaattgtgggaactggctggagaatgccaggcttctacttgtcccagctaaattattcatgaaatgtttatgctgactccttcaaaggtttgtaaaatatagagcaaaccaaattcaagttattttcctaattaccttacaccatggtggagccagttctgttcaactttgctactttttgtgtattctattttatttgctttgttttcatttttgcatgtaagactactttaggaatattttataaccgttatacagtgtgttagtggcttagcgccactcagcatcaatgatcttttcccaaggaagtctatggtttattgcttttagggagttactatccccaccggataacagtttgacagactatcaagagacaggttacctaacgaagagacaggaccatgatccaaataaggacagtaagactgaagctgaatccggaacaaagagacagagagacagaaagcagcaggtgcttcatctgctgcagcagtgggactctgccaaactttcttttccacagccatcctcctagtgttctgggcctccagacaagccctgactcttgcccagcatcaagcctgcatctctagcattcttggggctgctatgagctcctgttaaactgtggatacagtgtcatctgtattagccagaatcagtgctacaatcgttttggcgaatatttgtatctataaggcatgttcatttcaaaatgtatgaagggcacaaaacaagtaccagggagtctggaagctgaagtagttgagaaagaaattcaggtacttttagggtttaataagataaccttctctcttctttgcagctagcaaagcttggagaagcctgaacaagctggtcaccctcactgtcaaagactttcatttccacggaagggaaactgatgacctgggaccattggaagaactagttagtaattaatcagttgcataatcttcccttatcctcttttctaatttcccttcaggactttaaggacccctttgaagatgaaaagaaagaaagtttgagtggactcaattaaagtgggaagcaggtgtctaggttccagggctgctcaactctggattctggcagttgatagagggcctggccttttttctcagtcaattgagcactagcccagggtgttcaggagatgctcccattttgttagagtttggagagagggaaagcttaacttcctgtccaagaagaaagccacagggaggtaggaggttggaagtaagggacaaggtgaaagaactctctctatttaatgccagggaaacaaacatgggagcttcggggaagacagaccagccaaaattctctgaaggaagatgtaagtgagggaagtctctgagctggatgacttcaccactgaagtgcaagtgagagaacactggagcatggtggattgtcaagtgccaagctggaatagtaaacgtggtggtggggagtggatccggtaataatggagcatttagaatcaaggccagccctcagactgaatgtggagataactagttctctgccagtctattatttctgaagaaagagcttgactaagtttattttactcacatttttttttgcttgtctcaaatcaagtatggatgaagcagttctaaggactgcaaagctgcgcagcgggaaccaactccctactgcagttatcattcgcctttaaagtctccgtgtcaagacacacagaaagtgtctacaccaaatggacaaacgttccagggggtttccttcccaactgcttattaagaaatccatcctcttcacatcagtgggacttcattctactcaaattccatcaattcccaatagctccaacacgaggacaaaccctaggagatgagggtgccatctcaagtctcttattttggttatttaactgaataagaaaatgtgtataactgcagcaaatgactcctatctttcctggaaaacaaacgcagccatttgctgtgtctcacaatgtgtcctttaagtcgcctgctcctgctgctgtctgtgggagccagagctgaggtgcgcaggacagaccgcctggtttggaaaccttggaagcatggtctgcttgtattacctggggtcatagatttagcactcataaagtcatgtctgtctgttccttctgtgtctccagccaaggaaagaggagacaggagtaatcagcctactcaaggaaagaggcaggagtgatttgaataattatctatcttttagacaaaatactgcattctattatgttatgcaaattcaaataatgggcttttttatgtgaactacatccgtttacatcctcattatcccaaggtttcggtattcggccaggtaatgacagctgtgaaaacagacttggaaacttactgctatcttcattaatttactgtaggtaactgacctagtcaaacatccctgaatatgatataaaattcacagactgtgtttacccgtgaatccggctgaattccagctctgcgtttctcatcccatattaaacatgacgacagatgcaccaacagaggttactggggaacctctcccaggcattgtcttgcagagataaagttctgtaattaagctgctgttcaccaatgtggaaataatacagtgtattggaaaacggtaattaactaaactatcatctttgtaacagcctgttacacatgggactccttagaacagactttgcttggagtccaacagctcttattgtaagttgggcaggaacaaaaatggggatgaggaacttccccctgactgagctggctgttggtggcattatcctattaccactgacaccaatcaggtgctaaatgggacccaagggctgggagaaatgctaccaacacaatcttcagtgttgttcccaagacttacccaaccccaacgggccgggctaggggtctgagagtattggctgggtaaggacaaaggagctcaagtacgtaagtgaaatggtctcaggagatggtgggcagtttttcaaagcatcaggagaaagagttctgatcagttcaatagcagatgttttagggagggcaatgagagcgaaccgacaatgacttcacatcgtgggtggtagcagcaggtgcaccgaggaatgactgaggctaggggtaaggcagcttgctgaagctcaggcaattccacagtaagtggaaggtcaggacgagaactcacatctaccaggttcccaaacctgggctctttccttttccttttttttttttttttgtttgtttgtttgagacagggtctccctctgtcacccaggctagagtgcagtggcccaatctcggctcactgcagccttgaactcctgggctcaagcaatcctcttgcctcagcctcctgagtagctcggactacagtcacataccatctcacctggctaattaaaaaaaaattgtagagactggggtctagctttttttgcccaagctggtctccaactcctggcttcaagcaattctgccttggcttcccaaagtgctgggattataggcatgcgccactacacccagcccaaaacctgggctcttttccatgacaccagtgtgtcaagaaattcatcctccccataccagtgagacttcattctactcaaatttcattacccccgtagctccttaccttggaatgttggcataaatcagtggttttcatccttggctggatatcagaagcacaggtggagattttagaaattatggcagtccagatctccctaatatgaccctttgggaaacagggcccaagcatctgtatttctaaaaagccccagaattaatcacctctgacatgcagccagaattaaaagccattgatccaggtgcaatgattacacaacaatttaacattagtaatgtcttctttacgggagtcttgactagttcattcattcaataaacgtgtttgagctcctactaccagatgagctaatgttcttggtaaagcatctatcttggtccctggcacatagaaagtgctcaatacttgaattatattcatcaccccttaataagagcttccactgttccagagagaaggcacattgatggcaatgcagaggtgaggaggcactggtggatctgaagcagagacaggcaggtaaaccattactggcaatgtggagcatacccagcaaggggggctgctagtggtggcagcaagcaggggaggctttgccaagtgatctggttttgagatacacagcggtgtatggtaaatgttccatggcttctcactggaggccgtgggctgaaacatgcacactcactattcttactctcatgctaagccatttgctcctgagcatagttctcaggccaggctgtttccagcagaagggagagactgaggttcagataatgtaaatgtgtagccagaagccaggatccaggagcctggccctgggtagagcactgagtcacaaccttcactcccaagtcctctggaaaatgctacctcggaacccaatgggctcatgcacatacccagaggaaaggacagtgccctggccttttgacaagcttgcgcctgggaggcagcaggggtacagaggtagacacatcattcacatcccatctctacccttctcacttctgagagggatttcatcagggataaggatgccttcttcaactactgaagagggctaacaagattgctcagcacaggaaaggagccctaaggtgtcacttgtctctcccatattcctcattgcctagcccaggacctttggatagagtagccccttggccaccaacaaccaagcgtgtctctgggccaggcacatctttaattcactttatatgccttcccttgttgaatcctcagtgcaacgctgtgggttggcataaatgaagaagaaaaatgtgcagactggcaaactctttacatgcagttgaagaagacatcaaaggagtggaggcaagaaagggtgtggagttgaagaagtgagggcccctgggatctaatctttcacagtgggttggggcatgcagacagaggctgcccacagccagaacagaggggccatctgcttctctgtcccctgctgcccggccaccctggcctcagccagctcctgtgtgcgatggaaaccgggccaggggagggcaggcaaggcagaaagcaacaagaattccaaactctgagcccagtgatggatgactcatccctcactcctcatgtcgtctcccatttgtgcagttctcatctttatttcatgaatattttattctcagagcaatggctccacatcccccataaatctagcgagtggctctttactgcatccatggagtttggtgcattcacctgcattgggtaactacataatcgtctgattccttagaaaaaatatgagctgaaatctacatgaatattaaggggttgaaagcacattactactcttcttcaagtaagtgtctaaactgtgacgacatcctagagcaagccattaagcacaacttgggctccacccaaagacaggtttctggctcttaagaaatatggccaatgcctcaaaatgaaacattcaaagattaaccagacactctcacctaattgcaaatgctgccccataaaacacaggcaaccagtagcacaaagtagttccggattaaataccatcattattttttgaaggttttaagaatatgcttctaaaagactgtcgttttgagccgtttcctgcctattccctgcatgataaagtcaaaacctctcagtctggcatttaagtccttcggagcaggccccgtatccttccccagcctcccctgccagcatctccttcctcacgttgacacttcagcccttgagctccaggaggtatgatgactttgttcacctccagctgttcaccctgcccaaaatgcaacttcctatctcatctttagtaccagggtttgtatcaatgcttcaaagctcagttctaacagctctgagccccaagtagtcttcaataaccagcacccctaacccctctgaccccaccatgccctggctgggctggatgtcctcggtgcttttgtgatacctgctgatcactgcagtacagcctgctcaatgagtggagactgctgggcccagctctctgccacatctgtgcatgaggaagtaagctccctgaaggcaggggccaggtctctataggcaggcttattaaaggaagaaagggagagagggaagaaggaagggagacattgcatttgaaatttggaaacccataaaaatatgaaaaagatggaacatttccatgcaacccttcttagcaacaccagaaggggttggaggacaggcagctgctgtgcttttccaacctgcctctctccatgtgtcctcattcctatctggaagcaggttggcaacaggggcaggaagtcccacattctggaagcagggctaatgtattcatcatttcataactgagatcctggacttatgcagaagccagaataaaaggtaggatgttttaccggcaagaaaggagctgttcctcacagctaggttatcccttggtctcctggtctctccatttttttctcttttcttttctgtcttcctatctatgtctctttaacaatcaccagtctctctctctctttctctgtctctctcacacacatagaccacaacaattaactgtgggtggtccaggctgaaattgtccaaaccgtcactaaactaggcattgtgaagggacaaagctaaaagcagacaatgacttcccatccaaaggacaagctctccctgcatgtggctcacagatgataggctagaggctggggctgagcctgaacctgtgtctccaggcccccacccttgcccacagctgcccaggaagacaaattcctgacagtgcaattttcatccacctggagaccctcccctgctccgctgacacaaggggcctttgcacagaggaaaccaggttgaagacttagggaaaacaagcaaaatccaaaacaaacaacacggagcgggtgcaacgtgtgccaatttgggggcctggtctttcccatccttctcatccttcttggttctactgggggtggctttggggccaccccatcacagctgcctactgatgcttctgtgcatagagacctgggtggtaacaagcaggtgaagggtgcacactggtcatggcgtggaggggctgacatgatgaggagaggtcagatatgtgtagcccttccttacaactgctagtcagaataattcactgtccctcccactgacttctttatacaaaattttccagtagccaaagaagcttgggacagaaccatcaactattcctttcagggccttttcctcaaaggtctgtcttccttcccttctgagctccaggggtgataggacagccactgaggctgcagctggccccagcttcacattcccttacatggagatacacagaaggccagagaggaagacagatatccccgaacattgcagatgtactgagttaagcagtgtccttccagggaagagacagcataaggacagagagctcactacctggtataatgcagagtcctgtaaggagcgagggacgcccacccctgtcctcacccctgacctgccaggaatgcccttatggaccaatgaatggagggtgcgatgtggccagacacccaggccacacacatggtggacccagccttgctgtccagaggtgccaaatcccttccccaaatcagtctgagaagagcccgccggctcttacctcctcctggctgtttttctttcctgtcccagtttattttttgtgccccttggaccttctacctctgaaaccatttaatgaactgccctgtactatctgagcctccagtaaaaacaaaaacagacaaaaaacaaaacaaaacagaagtgcttttgggtttgatgcaggttgctttaccacttcctgtttgaggtttatatccatctgcacccacagagtctctaagcagagctgtggttctagacatagctgaggtctatgtggcagagagtgacagccccacggatggtgtggctgggcatgtggagtttctgctggcaaagcatcaccaccaaatgacactactttccacccttccgtagggcaaaggtctccgggggaccttggtgaaggctttatttcagaaaaaaaaaaaaatttaaaaaagagcttgcagaacacaaacccagtaagaaggaagtgtggaggggcagaatcagtttgcagttggcacacatggggagaaatgtgtgcccagaacccggagtgtggacagagctagtgtcccccaggctgggtgcacccaggagggacaggggcaaggctgggccctgcaagcaggaggaatatagggagaaaggagtgctgggagggacagggatcccctgatgcgctgggagagcagcgccctgtgtcccttggtgagaagtaaaagagaatcaggaaggaatgggctcctctcttaccctacaggtggtctctccaggtcagggtggaggcacatgggcggggcagggtagggaagggctctctggcgctgcccacgctgtacctgctctatagataaatacaggactttagtggctaaggctggtactgcagcactttgttcaagcatgaaaacatcccctacatttcttctctagttttaaaaacaaaataaaacaataacaaaatcccccaatataaaacactgctgcctccagacaagatgactcaggtaaatactaactagaaacaacctgccctcccaatggcccagtgtgacactcctgcctctaggctgtgaaagggagggcaggccccagggtgctgacctccttgggggtctcctggtggcaccggttgctgttccaccacaactccagggcagccaccaggcaggccaggagcaggccaatggccaggatgcagaagaccccggcgaagctgtgcagcttgagggatttgccgtcggcctgggcgctggcatggctggtgaggtcacagcggcccatgtgcggccaccacttctgcttcagcacatccaggtcccctgtgtcctgcagctccaggatcctgtaagacacaatcaaggtgagctatagccactgacgtcatcaactcagccaccggggccctggcccctgccccaccatgctggccccaccacagacaacattgagccatcctagcagctttctgccttagctcttctcttcccagtctactctccacactgcaggtaaagtgttattcccaaaacgcacattaggttttgtcactcccctccccaacagcccctctgccctctcccaccctattccactgcccaaggataaagtctaacagcaaatcacataaggcccattacatggattctgtggcaagagctcaagataaaactaggaaatagacatgaaagaggcaaacatttaggttgtggatttaggatattcctgatcatgaaaatgctttcttttgagctttcattactatatcctaagtctctcccactgggattcaccaaattattcttacagtcatttgatttgaggatcttctgtgctttgcctagtatgatgttcagcactactaagcttatggtctagagatacaatcactgaccctaaaaaaattagctcaatcaaagtgcaggcagagctgtgatttaaaaaaatgaatcaaagtagaggttccaggaaacaccacatggtgagtgctgtccactggaggactagagaaaccctcactaaggagctaacatgtaaggggaagcttgaaggatgactaattataaaacagctcacatgggtctagcatgttctagtgccaaggagtatcctccatgcttggcaaatagtgttgaatcctcatttgcatgccagtcctttgagatggttattcctattttcccattttacagagaaggaaatcaaggcacagagaggtgaaatgtcttgccaaaagtcattatgaggctgccagggttggctttcaacttgggggaggaagaaacttcctaagactaaaaccccatgtgaaagtcatgtctggggtagcacttagcacatttaagaagcagaaaaatggccagtgagactattgggtgatatgggagcaggcattaggtgaggacagggaagaaggcagagcccagaacacaggctctgagggggcatgagaggcagtttcgatttcatcatgtgtgcaatggtgggacaacccatgctgcttctatactccccattgtggttttctttggttgtggtattttgtctgtaacccagaagtcttaacagagagccagtggtagctggtagtacccagaccccaaacacccaagctttcattggggagtggagctctttaagcctgatccatggtgatattttcgactgatatcatcagtagaggtccctctgagttctctgggtatgtgtcgttagagagcaacagttgtttatagccaggaaaaattcactgcccactggacagttgtgtgatctctaccctggacctgcattccaggtcagctgtgaccacaaacatgaggtcttgctcaattcccacacatgggcttgtgtctggtggagacaagagccacaaccctgagggggtcccaagatgtgtcagcatcatgggtccagtacagcatggcctcctgatggctgggaatggcctggctcagtgcaaagattggctttggaggcaccagacctcacctggaccagggacttgctcctactaaagatcagtgttctcatctttgcaacataaactgttgaccgccacttagatgagcagacccttcaggacaggagctgtgggttactctgttttccctgagcaagcacagtggctggtaccactaaggctgtctgttgtgtcaataaatgtgtgaatgtactaatgagtaatgaaaacttgactaagatggctgtggttagatattgatataatgtcctttaagtgcttagggcactgatcagcatgtaagacacagaatgtggctgtgcattcagtgacttagttgttaagatacatgtgcatttatatggtttggggtcatgcttagattgccccagaacactacagacctctctcatggcacaccacatggtgaactggacagccgcagtgttgcaccacctcatatggatcatgtcgggccaactccgtggctacatgtctgcctgttcactggccttaataagtctctgctggtaggggtgaggaggctgagcctcctggcagttgcaggaacctcagggacagataggcaggacctcagggcctttgaggatgtcagcagttgaaaaactagctagctatggatagacagtagagcttcgtgttcatggatatccattcaaatccaggcttggagcctctcaaatttagctctctcatcactaaagcctgaggttataataaatgtacctacctcacaggatattgcgacaaaatgagaagagggaacacatacagaccgttagctcgagatccagccagtaatcagagctccataaaagctggttagtagttgtcagcctgatggccacattgaccagtagccttatcctgccagcactgacatgagcgaccttttatagagaacacagtaggagctgatcatattacactgtttgaatcctcataacagcctgcaaagtggttcttattatgtctattttacatctcaaagacctaaagctcagaatctagatgacttgcccactgttgtaattagaaagtggtgatgctgctcatcagagctgggtcattctgacccaggaggccatgctctttccagaacagcaggctgttcttccggggccagcttctggcccaggggatggtgaggctctggccagatggtggttgtggggtcagatccccactcctccgctcattaggcagatcctgtgcaatgtcaggcaagttgcttaattttgctgaccttctcttcttcctgctccctataattgtatgcattttttatacccaatcttatcccagaatgatagtaaggcaatttatacgaaagcataacataaaacaaaaaacctaaacaaacaaaggaaatttaagtatggaagggacagaggaaagctaaaacaagtcacgggtacaaaatgactttgaaaatgaggctaaactaatgcacaccataataatccatactctcgcttacgaggaagccagagggataatagccacttcctgaagccagttgttctattttccagacagatataattgcaggtgctttttttcattcaatagctgtggagcctgctacacagtaggtgctcaataaatggctattaagttgctaaacatttattgaatgccccaactgcatgctgtggtctgcaagcctgtttatagcacataagccctaccacacacacacatacatctacatcctgtcctctgccaaagcaaaggagcatatctttattgaaggaaatagtttagttcccaggatgaaggggaagacagttatagcagttccacataaggctgggacctgtcatttatactagaacctgttttctgcaaatggcatcaggcattgctctcaggacctatcccttcattcctctgaagctagaggcagctcacagttctgcatgcaccatacaacaaagcccccccccccttttattttttttgagaacagggtcacgttttgtcacacaggctagagtgcagtgacatgatctcagctcactgcaatctccacctcctgggttcaagcaattttcatgcctcagcctcccaagtagctgggattacaaatgtgtgccaccacatccacctaattttttgcatttttagtagagacagggttttgctatgttggtctggctggtcttgaactcctggcctcacgtgatctgcccgcctcagcctcccaaagtgctgggagccactgcacccagcccaacagaaccttttaaagaaccactggcatcagtaagttggcaacctgaggtctgagtgtccccactcaagggataattccagcccaggaggaactgtaccctacaggaagatgaggaaactgtgggaagccagcacaggccactggtgacatttccttataatcacagagcacatgccttctgatgaaagcaaatagtaatcaatcactacttgccaaaatgacatggaaactggactagccacatttgattatggtgactattggagtcaggagagcaacccatggggtctctgttgggaggtttcacacagggacctcacggtcagtgagtggacaggtagtgggcaggcctgtttcagaaagcctggtctctggaaacacacaccccatgttggccctggccctggtcctctgaagccacacaaaggacatctcactccttctgcccccagcaaggcttacgatattggaggtgggcagccacacccctccccactcatctccaccttctccaggttgagtattctcaggttctgctctgacctaatgggagccccctctgctctgactccattcagcagtccagccaagacccgggttcctggactaatgtctgctgcctcttctctccagtgtgtcagtgttcacttcagcagactctcaggagccatctgagcagtgtgagcacacggggactctaacctttcctcgctggggcccctgtgcttccatgagcgctgccttggggtacatgagcagtcttggtgctgctgctgtgttggccccatgggctctcttaccatctgttctagagagatgctcagaggttgatggtctgtggaatcatcctgagcctcccatttcggaaaaccaactggtgcgaacctcaagaacaccaacgtgttataaatcctggagagaagccattctttcttcatgcatttaatctgagcaattgataaatcactactcctccttccctcttgtcatctctctctgctccagagagcagagggaggaaaagaatgtatacttgattaaatttaagggaaaacccaaaagcctcatttaccttaattagccctactcttttccttagttttgcaaagaagccactgaatggactggttgcaggccctcctcctcagccttcccttggtggggctgaggtccaggtactcatgagcagaagggcacaatctggacatctagagtgtgagagaagggaggtcgtggtgcttggagatccagcagccacatgggcatagcactagggctcaagagacctggattctactcccagctctgccagcagctggctcagcaacccagatatcctagttgccctctgaactgcaggatgttaaagaaatggtttatgaggactctcacgtctccaaatagaagttccttagtactgaaattcatgcattaatcagtcaatgagtgttgcccctgagcctggcacgatgccagcctttccattcagatgcttctgcctcattttggatttgggtggactctggcagagcctgccccagggcttctgcactaggctctgcagattcatcccttcacccagcaaaatgcccttcacagatatgtgcaagaagatggcccaaggcttagacaccttggcgacaggagcccctgtttgcaggctgactactggacaaaggccactgaactacccatgccccacttccacccttcctggctaaggccacatcccttccctgccccagcagacagcatctccttggaccaggaaagttctgccctacaatcagaggccccatacagccacgtgcaaataaatatggagacattctgcttctctgactctacttttttaaagtctccacattgactactgccacattacaggtacatttctctttaaaagtgattagtaggcccttatcagatcctgctaattattcatttttctggctaactcctcctcattcttccagcttcaggggtgtcccctcctctgggaagttctcccagatatcctgggtctggtgagatgccgttttctccctgcctctaccctagcatcctgaagacgtccttgccatgtgctaatatgccctaggctggcattacctgctcctatcagagatcccacagagactctgagccttcctggcagggaccatatacttccacagggtctgagggtaggggaggaggaagcagtgggacatagtatgtgcttgggaaaatatgacgaacaaagatgtttgcattggctcttatcttctaagaggttattctcctacccttgaccactagagtcctgaggcagcggtagttaccttgctgcccaagcctacctctgggagaagaggtccctgtaggggctgccatgctgcagggcaatcccgtaacccttgctgctgatgctgttgccgatgacagtcaccgagcagtcgtcatccgtcagggctgcgtattccaccacggccacatcccacaggaaggcgtagttccccttctttgcctgaaagatcaaaattaccatgaagtcaggcagtcctggccagctgtgtcagctttgattggtgagccatcttgatggtgggatttgagggacccatcctcaatggtcttcctacccaccagacagcacagcaactctgctactgttttctggcctacaaatgccagcattggttgaggccactcactttgactagacataaaaggtgcgcaggccagccacaaaacatctcatggagaggggaagggcagaggagctagaggtgggctctaagacgagcttcctggtcacagtgctatgggcctatgtctcagattagagggctcagccatggaaagtgcagaaaatctagtgccaggtgactgagattctgagatcagaaatgttggggagaataatatttggggatgaggaataggggagaatagaactgtggcatatcttacccactgatatttctacttagaacttgtctgagctctgcttagggtgaatgtggaaaatagccctgaattcagtgctgcggagtaatggtgacttaatatcaagcacaagcacatgtctagagccccctgtgcatgaggaaaaatccattagggacagggcttgactgttatggtgccacgccaggcttctgccacttgtcttttactgcccacatatgaaggtatgcacatgcctgcacacacccctacacatgtacacacatgcctgtacacacatgcctgcacacaaacacacctgtgcacacgcacatacatgtgtaataagcacacatatatgcacccataaatatgtgtgcacatatgcatgcacacactcacatgcatatatgtttgtacacacacataaacatatatatgcacacacaggtgcaggtttctggtgtcactatctccacatcagtgcagtggtggcagattcttccatcaggaacttgcctgcagcgacagctaaagccctactctgtcgcactcatccacagcagaggttctcttctatcctgaacaacaattctaactttgcctggagtttgggcactcggagggaatgcaagctgctttactttctggaaggagatgcaaacctgacactgccacctggccatcttaaaacaaagtagaatgttcttaatgcagcaaagtgcctgcctttaatgctatagtgagcacacagacacccctttgccgcttctttcctttttaccatggcttgcaccagatgatgggggcctcattatgggcttagtgacagcactgaaacatcacagacaataataggtcatgctagcaagctacaggcttcttggcattgttgaggacattgtccctggctcctgcctttgttcagttgagtcttcatgtccactgagactttccaaagagtgtcgtagctacttagatgaagttagtcaagattttatttctttcaagaccccaagtgctcatggcccaagacagcttatttccttgtcagaagttctccattagaaggatttgtgggcagagtgtgacctcctgcagtgggaagagcctgttcccagacattcagacaattttgcccaacgaccttgtaagaaatgacacacacctgtgccactcattgactttcacctcgaggagcaatccaaatattacaccaaggcttcagtcctcagccaatccaatttcagaagtcctaaaggactttgacccaggttgcaaaattacacacatctctctccttccttgtaggaagataacaatcctataaatttttcctgctggcaaacaagttttctcacaaaaagatagacattttcaacctcttagtaaccaagtttctcagcaaaatgttgacttatgacctaatatttggctttagtcagactttggagcatttcacatccatgcttgcaattcaacatgacaatcagacattgttatttctatgatttcaaaagggtatgtcacgttgagggaaaaattaagataaaggtttgtttctacatttcaagtgatgctccaagaatgaaaacaaaatatgctggcttagagagaatggaaagggactccaaggaaagcctgatgtggccactctaatggggcacttggcttccttcaagccatttgggcatttgtgactcagtttgggctcagggacaggtgagcacagctgcatgaaagcacccacatttatagtcctgctggcctaagctgagaaagagggaacatccagaagggatgctggcaatggctcagcctcaaatccctgctaaccaggaaggaagtccggaggagacagtaggagctgccttctggacctactgaacactccatctccccatttgcctatttgtaaacagggactaagttcatcattatatttattttttcttttttttaaaaaaaatatagacagtcttgctatgttgcccaggctgaacttgaactcctgggctcaagcaatagtccttcttcagcatcttgagttgctgggactacaggttcacgccactatgccaggctgccaatatatttcttgtgtctgcttgaggaagcatgtggctggatcctgaatctgtctgaaaatgccaaagcaggagcacctggagagggtgctatcccacattttgtgatgggagctggaggtaggctctaggatgagctttctcatcatggcatgggcttatgtctcagatcgaggggctcacctttggagacggcagaaaatctaatgccaggggattgcaattctatggaaatgtaggggagtataacagtgtggagatgagaaagaggggaggatggactgtggtaaatcttacccatttgatatttctacttagaacttgactgagccctgcttaaggtgaacacaggaaatggccttgacttcagtgcctccaagaactggtaacaatatccagcacaagtacatgcctagagctccctgtgcatggggaagaacactttatggacaggaccctgacagggccaaatcagaagctccaatagtggcaggacaggccagattctagctctgtccttaggaaataccctccattcctaaatgtcgtcttcacttccttggcatcctagagcttcctcagcctttctctttcaactccatgctgagtaaaaggcagtgctgaggctttctttgggtccccaaattcatttatttccagaactttctggacttgcagacatctccccagtttccagtgtgtcacagagcctgtctgagacataaggcttcttaggtctgaccatactgtcaggaacattgcagacaccagctctaagaagttaaaatatcccacccatcatggccctgttgtctttatacagaccctcttcttgtttccttgcagaatgagctccatcctgccccacaaaaactctaagctttgcttcctccttgtagggtcagaatcagttttccacgtggccccaaataatgatgaattcacccccttattctgtgctacttatccacaggtctggcttccccactacggggggctggggggaggacaccaaatatatcaagcatctgcctccaggacagccaagcaactcctctcttccctgcccctcctgttgcaagttcaccctcctccttccttgagtctcagcatttcctccaatcccactcctaggttcagacccctcctctgtgggtgcaacctcttatctagcctctagttctatcaggaaagcatgtctacccctttcttgccttgctccatcccttcatttccatttcagagatctttcacattaggaagcatttgtcatttcctatttatattaactcttttctgttgaggatgtttttcaggctctggaaaggacagagcatcagcaggaatctagcttcctttcaaccttgtgctgtggtctggtgcttgtagagggaggaggatgaacccagccatctccttgcaggtgtcccagagtcccttgaccaagtgtcacaacagatatttagatctgctattttttgccacttcctattcaaaccaactccttcttcctgtatctcccagtactgtcttgtccctacttacaggtggctgtggggagttgaggaggataatgtctgagaacaggcatgataggtggtgagctgtttgcaaatagattattggcatttatctcataatgcctaaaagataaaagggatgccactgatttgagttctgctattaaaataaaacaaaaacaaacactgtatttcacctttcaatgggttaaattacctttatctggcctggctagtccatttataatatgaaatgcattctgaatttccaatcgctgacttaccatggatcaatgccttagcataaggctggtggaaacttaggctggagacaaggctgtggatacagccaagcttactccaagccttgagctgtctgcagagcctaggtgggcatagacacccaacactccaggcccttttgaccccacagagcccttcaggactagatacggagtcctgggactccagcccccacgtttcttccaggagctatgaaacgtatttgcagatcatctaagaaagtagaggtctgaaaactaatatgtgtaagtggccaaattacatttctagcggtttcttaaaaaattgataatatctagtggtaaagaaactgtgaaaaaaatgtgcgtaatccttcatggctaccggcaccacaaaatgatgcaatcctttggagagtaatacaataatacagaacacaaatgtttaaagctgctcatgtctttcacctttgcaagttgggaatttcaccgaaaaagtaacctaaatatatctaaaatgcatgacaaatattctaaattaagagttgactctaaagtaaacataaggtttaaatatttactattagggaaataacaataaattatgattcataaatgtgatagcattttatgtaacagatagtaatataaagactttacaaaaacactatatatttatatatagacatatatatgaatacttaaggaaagtggcagaaataataggatgaacagattattattgatagatacggtattattactgttgtgtgtacatgtgaaatgtaatattctaaaagattgatcatcacctaatagagtgggataagtgataattttctaaacaagtgggtgaaagtgttgtgtttatttaaccttgtttcacagtttgttctatcatgcatgacacagacaactaatccaatctgcataccctgtgtgcccctggctccactggagcagtgccctggcccatcaacaggacacaaaggcctgggagagctctcagacctctccaggacactggctccctgataatacccaagcacttgggaaaatctccttgacatttttggcctacttctaaacattttacttcatttcattctccgcttttcctaaaagaaaagtaaacaaacaaacatggtccagacaaaaaaagaatagatgcaggaactttagtgaaaggaggaagaatatcttggcatgagaaaaagtcaaaggcatgtgagcatccatccctgggatgccaggacaacagcagctagagagaccacccagccttgtcccccagcaaacaccttagcaagcagattcccttctcagtctacctgctccctgggttgttgcaaaaggaaaaaaattgacatggtgagggagtctggctctaacacttacagcatcctccctaacatttagcagaatatgattggcctctatttgctggaggaaggttgggctctataaaagaagccacaagtgagctgattggatgacttgcttgtgttccatgacttcacactggcagtaaaatgagatggcattgccttttgttgctccactgattccaccccttttggaactcacttggagcacaacctttcagagacatcagcctttaaggcaagaacctcattacgctattccattccatcctaactgctttggaaagggacaagcaaccacactgctccccccaaatgagaatgctggtgctgcaaacatcagtcagaaatgctatctgaaaggaagcacagaaggaagacaggtgcctgtagtgccaggtgcagggtaggtgtggggcacccactgggtaccaaggccttcagaaacctgatcccttttttatccatataatacttctcgagggcagaagattccaccccatttacagacaaaaagactgaggctccaaaaaattaaatgacgtgtcccaaacaagcctgaattatgaacagtggagccatgtcaacctgagttacatctggctccaaagaagtctgtgctgtctcctctgccctggttagacttatgaagtatggactggggaaaattcacctactgtctttgctcttggaccacttcctaggggacattgctggtgacagaccacacacaaatggcaatgcctgtctttccctagctttagaaacaaaagtgtttcatggagtcactgaaactctggaagaagggaggacatggggtctgccccttctctgtacatcagggactctttggaaacctgacacattctcatgtacattcaccatccatgcagagtgcattttgcctctgcttgcagccaccatttatcctaacgaagcagagttcagccttttcaagcatcccaagtcttagttcctatagtcacgttcattcaatggcaacacattaccacatgcagcctgaaccctggctacagtgttacctgtattatgtatgtaccatgccaaattgtaagattcaacagtaaaaacccagaccatctgcagagaaaaagacaattttgcaatcggctggtgggagtgtggctggcgtgatatttctggaatggcaatttggtggggagaattgaatgtttttaaaatgtgtacatgcagcgattctacccgtgggatttatcctaaggaattattcaattttcaaaaaatgtttgcatagagattttttcagggctacactgtttaaactagtcagaagttggaagcaacctaaatgctcaataattgggaatcagataggtgaatgatagtattagatggtggaacattatgttaccattaatatggtgctttaaaagagcattgattgttaagggaaatttccatgggaaaaaaaagaggcacccctgagctatgaaccagcctgggttactgagtccaactgtatgagtttaaatgctagctccacgcttgctgcctgtgcagacaagttgtttaacatctctgagtctcagttccactggataaactggtccctacttcacagagtcctgatgaggattaaattcctcaatatgtgtgatgtgctcaggatcttgcttgacatatggtaaacgctaaataaataataatctatcttatattgtttagtggaaaaagaacctgttacactagagtattgacattgtgaccgcctcttaaattattatgtaaaactttatgtttgtgaagaatcaaaaataagtgccaaatacaagccatggtcatctttgggaggtgccatcatgggtggcttttgttggttttgaacatctctgtgttgcctatgtttcctgcagctcagcaagcctcaccttttgtgattacggatatcgaggctcggcctccttccttctgcacagtgcagcagaaaaagcagggtgcccattgtcacagcccagctctccagtgaccctactgtctcaggggctaagaattgtttcctaaaaggaaggttgggagtgggaaattcccgaaggcaaaacactgtacctggtacagcatgagggctcaacgcgagttccgtttcctgctccttccttcagttcccagatggtcaggagatccatctgtcagctgtgattgaagcatttttcctccacctactcccctcctgccagtcactcccccaccttcaccaagtcagcaacacactctgtgtgagtaagcagtgtgtgtgcatgagtgtgtgcatgcagaagagtgtgagcgtgtgtgtgtgtgcatgagaattgtgtatgtgcatatgtgtaagtgtgagggagatgtgtgtgtatagatgtgtccatgtggatgcacgtgagaatgtatgggtgggtgagtgtgtgtgcattcaataatacatgttagtgtctataggtatgtatttatgtgtatgtgtgcatgggaatgtgtgtgtgtatgggtgtgtgagtgtgtgcatgttggaataatatatgtgcaggtatgactgtgtatgtgtgtgaatgtatgtgaggatgtgagaattatgtgagtgtgtacatgtgtaagtgtgagggaatgtgtgtgtgtgaaggtgtgtgtatatgtatgtgagaattgtataaatgtgtgtaggttgatgagtgtgtttatgtgtgagtgtatgagtatgtgtattatcgtgagcaccattgcccccagggaggcagcagagaagaggactcaggtaccaagctgctggagaaccatgaagggttcagaaaaagtggaccttcagctggagataaagagcccatctctaaagagagaacaatggagaaaggtgatgcagaatcaaaatgatgtgaggctgtgaggcagaccattggtgggcccagctaggaggttgtcaggaaacctgctacccaaagaatgaaaggtaaagactttttatccagatcagactctggaccagcaaaaggaggcaaaccaggacaggctcagtcgggggacaagagattgcagctgaactctccacaaatactgaaaaagctgctttcctgagggtccacagggtgcaaagttaatttggctcctggctgcagcccagagtgaatagaatgggagtggacaatgagttgacacaaccaaaggggagcaaggccatctagcagtgggaaggcctctggcttgtgtggcatgcagagcacagacatgagggcagcccttagctttgtcatgaaagtcccagagaggcggcccatgacctgggcaggacaaccgagaagatggaggtgttcccaggctacaacagtaggacatggctcctgatggccaggccccaggatttctgcaaatgattgcctgtctcatcctggtattcctgtgtcctagagtaacatagtcaatagtgaggaggacagcagtggatagagagaatgagagtaattttgcatctcaaaaaggccaccaatccctttttttccatgagttccttttctttgttagaaaatttgtacgaatttaaagggtacaagtgcagttttgttgcatggatgtattgcatagtagtgaagtctgggattttattgtaaccatcacccaaacagcctatattgtacccttcatgtaatttctcatcccttacccccatcccaccctcccacctttccaagtctctaatgtctattattccacactcgatgtccaggtgtacacattatttagctcccacttaaaagtgagaacatgtggtatttgattttctgtttctgaattatttcacttaagagagtgacctccagttccatccacgatactgcaaaagacattattttatttttgttaatggctgaataatattcctttgcataaatatacatatatatcacattttctttatccaatcaacagattgatttcatatctttgctattgtgaatagagctgctataaacatataactacagttatctttttgatataattttctttgaatagatacccagtagtgagattgctgggtagttctatgtttagttttttgggaaatctacatactgttttccatagaagttgtagtaatttacactcccaccagcattgtagaagcattcccttttctctgcatcctcactaacatctgttattttttgtcattttaataatagccattctgactggtgtaagtgatatctcactgtcggtctaattagcatttctctgatgactagtgatgttgtgcatttttttcatatgcttgttggccatttgtatgtctttgtttgaaaaatgtctactcatgtcctttgcccactttttaatggagggacagatagccagaatttgtaagacactcaaacaactcaacaacagcaacaatagcagaaatgccttttctcttatgttatctgccctttgattttttaacttcctttatagagtcttcaatcccacttcacagacagcacggcatggtatgttggcaagaacaagggtttggagacaggtggaccaagtctttctttagcatccttggccagctatctaagccctctgagctgaatgccctcacctagaagacaggaatagcatgcccacctcacacacttgtcacaggaaaagacagtgtggaaagtgcctggtgcattgaagaaacgcagacaacaacacgttattctcatggtcatgacaatcattaccagcattaccttacagcttaaagtttggatcctgataacaacgcgagtgccttggaataaatagcacgtgaaattgtcctcaaccatcagcctagtaaattagaaaaactgttagactaggctgggtcacagtcttggcccaattattcatttcatatcaatttataaaaatggaagaggggcacaggtggtccttcaagtcttctccagatctggtattctcaaagtctatgctatagactagtgattctcaaagtgtgttttctggccaagcagcatcagctcactgaagaacttataagaaatgtaaattatcaggtcccatcccaagacccaccaaataagagactcttggaacgaggtccaaaatgctatgttttaataacctttacaggtgatcctgatgcatgctaaagtcaagatgtaatgacttagacctctgggtcaaataatttctgatcttctcttgaacacaggtttataaagggagatagtattaaagctctagggtgttgaattggagtactgaatggaagaagggaaaccatagagttgagagaccaaggctactaaaaacaaattttaaaggaaagtcacactgaatatcttcctgaaaagaactctactttatgctttaccagctattctcttcccttaccatcaattctgttccctgaatttcttagaaagttcaggataaacttccatagtccaaattgtgtacattttccacccagggaaattgaggctcaaaaagaaccaaggccacagaatttgctattggcagagcttcagttcctcctcagatctccttgactgcaaattgccttcctctctgtcacatcaaaagtttaatatcagtagccccaaacagccacattgagccccctgaccatcctgtcctcatgctggttttttcccctcttctgctgccagattcttgtcaagcttttgttaatgacatctgcctccagcatctgaccctgtggagacattatggctgcattcccttttggggcctccagcactttggggaggaatagttttgtttattgagcaaaaaattgtcctagtaaaataaggtttcttatattttcaagaaaaaaagaagctggtttggtataaaggaaaaagaaaagtcctaagttggaaaaatcaatgcctcttttctcaaaatctgcaattgtacactatcaacaaaactagggactataaacaaccttgtcagtagggcaaagggacacattgattttcaatgatttgtcaaaattttaaattgtccaaagaccatgataaacaataatctaatctgagttattccatgggaaaaattaagaatgacctaaaagaaagagcaaattggtgtgcctggatacaaaatagattacaaagggaaaagaatacagaatgaagaatgccatcccaggaaattgaaacaacttaagaatacatgaattcaggttacacagatgacaagcatacatgtggtcaaatagcccataaagcacaggaagaggactgtgcagatactccctgtgtgccatgtaaacacatatgcacacacacacacacacacacacacacacaagaatgtaagcttgaccatgcatgtcctgtttgctcccctagcatgatgtctggcatagagttggtgctaagtaaatatgtgtaaagtgattgaataaaagatgaaaggatggcaagtagaatctgggaagccaggaaccttggtcttggcttgactgagctgctgaatggggcacatcctgtttgcccctccaggtctgccctccacccttttccaccctgaagtctcttccagaggcttcacagacagcatcaatgggcacccttggcctcagtttctaaaattcaagaataaataaaatactaacaaaacaacaatcatgacaataagcaccatttgttcaagcaaatgttctcaaattcagaagccataaggatcacctggagggcattttaaaacacagactgctaacctccctgttgcccagcttctaattcttagatctggagtagagtccaagaaggtacatttctaacaagttcccacatgatgctggcggtgttggaacaaggcccaccctttgagaactacactgttaacatatactttttaaggtttttttgttgttttgagatggagtcttgctctgctgcccaggctcactgcaacctccacctcccaggaacaagtggttctcgtgcctcagcctcccgagtagctgggactacagacatgtgccaccacaccgggctaattttggtattttttaaaaattattttatttgaaggtgtgggatacatgtgcaagatgtgcaggtttgttacataggtaaacgtgtgccatggtggtttgccacacctatcaacccattacctaggtattaagcctcacatgcattaactatttattctgatgccatccctccatcccccaataggccccagtgtgtgttgttcccttccctgtgtccatgtgttctcattgttcagctcccacttatgagtgagaacatgcagtgtttggttttctgttcctgtgttagtttgctgaagataatggcttccagcttcctccgtgtccctgaaaaggacataatcttgttcctttttatggctgtagagtattccatggtgtattaatttttgcatttttagtagagatgaggtttcaccatgttgtccaggctggtcttgaactcctgacctcaagtgatcctcccgcctcagcctcccaaagtgctgagattacaggtgtgagccaccatggctggctctttcacatcacttctaatctttacaataactctgataagacttggtattattattcttattattcaggagcccattaattttcccaagatctcacagctggtaaaagatggatacgagagccaaatccagttctttcagacccaaatcacattctccattcactatgctatgttgcctttaacggagcgtttgactttactgaaacaaagtttgagacccatgaaactgtaccctgaggccaaggtggctttgctgtctgaagcagcttcctcttaaagtctctttagccataaagggttgctgggaactggcaacacgaactgtgctgtgaggatagagaagcaaaattgcatgctatcccaattaatattaacgaacatcccttcatgtgctgggagactgtctccaggggcttatgtggaagagcctcatcctctaactccatttgtggctaagtattcctttatagcctttgctaaaatgtcagagctcacacaacagccttggagcactttgaggagctacaaaagaggtcacattctgaccaaaaagatacaaatagactctcactcctcacagctgaacaagctgtgggctctacctgttggaatttacagctttgtaaagtcaaaagaaccataaaagtttactggtagagggctgggcgaggtggctcacatctgtaatcccagcactttgggaggctgaggtgggcggatcacctgaggtcaggagttcaagatcagcctgactaacatggagaaaccctgtctctactaaaaacacaaaattagccaggcgtggtggtgcatgcctataatcccagctacttgggaggctgaggcaggagaattgcttgaacccaggaggcggaggtggcggtgagccaagattgcacattgcatggtagcctgggcaacaagagcgaaactccatctgaaaaaaaaaaaaaaagtttaccagtagaggggctttataggggtagtgggggaattcctgcacagccctgatggggcacctctctctctctctctctctctctctctctctctctctctctcacacacacacacacacacacacagactacaatttcaaaatataggacccagagcaaatcttaatatcctcatgttgtagagtgaggagacctatcagctgtttattggaacaccccatcccggtggaaaccactacttctactcaaatatgttttatcttattgatgatgacaagataatgatgacaatgataataacagtagtaataacaaaaagacacaaaaatggtagaaagagacagctaattttcaggaaaataatttagttttttgagttttgcattccttatttgcaaaatggaaacacgccacaaaaggtcctcaatggtgaagataaagtgcataagcacaatgccacacatattaatttctttgtgaatgttattttcttcattttctcttccctcttgctcctgaataaacattatgccaataaagtggaaataaaaataagctaaacaaaaattgccaacaatctggctgacatgataaatcaaaattattttcatcagaaatttcttcttgattttaatgtaatcaaataacaaaacaattcagttcaaaatgtaaaaacttaagtcataaaacccaaagcaataatattcaatggaacaaacagaatggaatcagcccacatttacagccagcactaaggtgaagcgtatcagacctgggtacaaagcaaattacagggcagaggaaatctgaaaaaaaaaaaaaaaaaaaaaaaaaaaaaaaaaaaaatcagatttaagagaagtcaacatcctcccacttcctctaataagaagtttgaaaataatcaaggttagcatggtggcatggatattggtttgattccagagcttactctatcaaattataaaaatcgtaaaagaaagtaattgaagaattcataatgagatttgcttggcaatgctcaaaacccaaagcagaataatttaataagggaggcacagtgggggctttccttgacatttggactgtattatcccaaaccaatcatcaccaaacagaattaaacagcaaggagttataaaggggccaactcagtcaattgtatggcaactggctctagtaagactgactctgccacccaggcccagggcagaggaccccctgccctcccctgccccctccttgcccttactgcaagtggaccccagcaattttgctgctcactcatgtttaagaaagatgcatatgaatgctatttctatccactctcatttcttactcattgaacatttactttgatttttgaaaggttaagagacattgagtaagtgctttatccatgcctacctctgccctcagccagccctgaggacaaataaataaaaggcaggcctcactctagagaagccccaagtctagcagggctgtgacagagcagggcactgagggttggatggcatctggtgaggctgcactctgggatgcactgtgtggtaaggggaaagggaaagcccagggaaggctcaggagacgttaatgcttctgttatggcctgagggataaccaggaaccagcctggcaggcagagaaagagactggtgctccaagcagtgtgggggagctgaagtttcattctgatcacgagttccttccatttctgcagactgtcacggggtaacgacaagggcgctggagtgagaagagttcaatactgactcaagcttgattgtcagcaagtcccttgccctcttggaacttcagtttcctcattaatgaactggttgtgctgaagcacaatagacttgatgcataggagaaacttaacctcacacctgatccatgccaggtttctctcatggtagctgttgtgattaaattaatctcctgattgtccaaacattgacataaggccccagtggaggaaaggaagaccccgggtaaaataagaaaggatacaaaaatcttttacttttgaaataatatactgtcccaagtcggtttttgtcttctcttctaactcagttttaggaggaaaagtgtcatgtccacttttacatattaactgagttcagcactagtaaatgagttgatgaataaatgaatgaataaatggataaaagacaaaatacttcacagagtaaatcactgcagaaatctatatttaaggaagaaatttacatgtccatcacttctgattattgaacaaccacagaccgctaaacattcatgatcttattcaatttccccaattagccacagtttataatggcaacgctcaggaaaaaaagattgaaaagaaaatgattgctgttccactgtagtccccagaattataaagcaaaataaagcaaaaatacatgcatacacaaatacctatgtacaaatataaacagaaaaaggaacaaaaaatcacaatgaaagatatgagaaagtagaaaaatactaatttattttttaaatcttaagataaatcacaaggagttgatgaaaaaaaatccactgacaaataaatattcttttgatcccaaaactaataatgtaattcattcaaagccctgcttttggtgatattcagtaatacttcatcaagggctttaaatgtttatatcctttttggcaccataattctacttttgagaattagacctacagaaataaatgtagtaactgaaaaacattaggcataaagatgttcattacaatgttatttataactgtaaataactggaaatgacccaaatggcaatcaagaagggaatgtttaaataaaatttttacatcaatttacatctatttgataaaatactagtcactaatttttataaagttttaccacattgtcagaaaaatcttttttataaagttttaccacattgtcagaaaaatgcaggatgaaatatttttatagcattataattatataaaacgtttgtagaaattctaaaaagactagacagaaatatacaagaggattcttggaactgcatttaggtggtgaaaaaagaaatattttaaacttttcttaatgggaacttattgcatgtaaatcataaatgtataacctaaagatttcctctcaaaactgcttattattttaaaagttgatatggactgggggagatttgagtggatctgccgttgggtggactgcagagtcaaagcatgtgaaaaaggtttaggcacattttaattggtcaaggcctatagaactcaggaggctgaagcccaagaccatgggaggcatattgaagacagcaactgtgaagcagtgaaaagaccactgccctcattctcctacaaggaagctacacatttagtagaaataaactactgctaaagctacacatttagtagaaataaatgtgggttttgttcacatggagttcaactgctttttcctgcctctctaatttcctttatcttcctgtaccttttatttcttgcttgccattttgctctcacattctcacacttttatcttcaaatcagaaaaggagttgaggcttatagattataaaatatgtgttcctaacatgactatcttggatagcttcttctaacttcactaagcagaatgtatccccgctctgggcatccatattctttcccacattaaatcaattgcagccatttgctgtcctctagaacttaattccttgacaaaaagattaagtctgggacttcatattttgaactaggtgataatgaatacacaacatataaaaattcacagggtggggttaaaacagtgtttagagggaagtttatagctctaatacttatattaggaaagaaaacaagtgtaaaattaatgatataagttttaacattaagaagctagaagaggtaagataaaattataaccaaagtaaaataagaagaaaatattttatgcacaaaaaagttgaaatcaataaaatataaaaacaacagtgaaaatcagtgaagacaaaagttggtatttttgaacagaaaaaccatgctcatagattggaagattcagtattataaaaatataagttttccctgaaatgatccttatattaaatgtaataacgatcaaaatctcaacaggcatttttgaagaaattgacaaaatgattctaaaattcaagtggaaatgtaaagaatctgaaattgcccaatcttgtaaaagaagaacgaagttgaaggacttacaatacctgacttaaggaattattttaaaacttcaataatcaagatttttttattggcataagaatagttatatggatcaatggaacagaatagagagtccagaaatagaccaacacatacatggccagttgactgtcaatcaaggcatgtagtcaattgattaaatacaaattattttaataatggtgataggtcaatagaataaaatgaataggcaagttacagactaagaattatatttatagtacttatatttgatcaaggacttctatccagaatacataaattaatgaatataaatcagcaatgagaagatggaaaactcaataaatattaacaaaagacttaagcacacattttatgaaagaagatacatggatggccaataagcacatgaaaaaatgctcagcatcactagtccccaaagagaagcaaattaaaataataatcagatttctgttcatacccactaaattggctgcaaccaaaaatactggcaacactaatgcaggataggacattcagcaactgagacttacaagtatataaggagtatattaccagaggtgatgcaaagtagcataaccacataggaggtagttagacagtttcataatgacccaggaatttcaccctttcaaatttagcaaagaaaaatggagacatatttcaacaaagtacttgtataatattgttcatattgtcatatttatggtagccctgaattggcaacaactacaatatatgttaattggagaataaataaacaaatcaaggtttattcatacaatagaatatcattcccacacacacaaaaaaagaagtactgatatgcacaactccatgagtaaatctcatatacattttgttgggtgaaagaatgaaacacaaatacatatattctgtatgattccatttatattaactacaagagcaggtaaatttaatgtgtggtgctagaaatctgcaagcggttgtctctgcagatgaggagaagtgtaaaaagtgacaaaagaaaagttttgcaggtaatggaaataggtatcttgttttgggtgattattacagaattgcataaattgtctaaactcatgaaatagacactatatgtgtatttcaattacacttcataaaagactaaaggctgttgcctttttaaaaaatctttttcacggtggctcacgcctgtaatcccagcactttgggaggccgaggcaggcagatcacctgaggtcgggagtttgagaccagcctggccaacatggagaaactccatctctactaaaaatacaaaattagctgggcatggtggcacatgcctgtaatccccgctacttgggaggctgaggcaggagaatcgcttgaacctgggaggcggaggttgcggtgagctgagatcaccattgcactccagcctgagcaacaagagcaaaactccatttcagaaataaataaataaataaaatctttttctaacatatagtagatgctaagatagtttgctgatgcctgctgaacatataccttgtgctacaatcgacactggatgctttagaccctatacattggtatacttgcaactaatctggacagaccttccgcaagtatcacagatggtacagaaaggtgaacacttgttcaaagccacagactagatggagcataacatttaaacacacattttctaactcctaaaaggaagatgctactcaaactacatttcttgaatggatgagtaagttcataaatgaatgaataaagagaagatagcatccaagttgcaaaatagatatagggtcttttgagcaggtacaaaagatatagagatgaatgattatccaatgtgagtggctgagagggaaggaggcttacaaaatccccaatccatactcacgtggaagcagagaaagaacagaatttcttggatcatggctacaagggctcttgctgttatagagagcagtatttttgctttgcactacacagggctatctagtctacatccccttccatatcttggtcaaactctcttgatctttgaatctagcatcccaaaagtgcacagaagtgcccacccatataagcctcgccctacttctcagtaggaatttccagcatgccatggaaccaggagctgccacatatgaggccaacttcctcaccttgccctttccaaatgaagggttatctgggtgccaaagttcctgatcctactgtggaagactgccatccttctagggatcagcttctctgccacaggtgtagtccctgacactaagcagagattgtgtgcaatgagagcaaccctgttacagagcagaaaggaagagaaagcgaataaatgttggtgctaagaggtgatgcccacatgcaatctagtgcaagagcaagcattagaccaggagtggaaataagatttgcgggcccattttcttcctgcatttgcattcacactttatgacttcagctatatttactgacagaaaaacaccaccttttgttaccaccaaatgctggcctaaaaagatacttccctctgaaaaatactatctccagccacagggtctgaaacaagctactcatctatttattcaaaggactgaataagctgtgaagattgacatttaaactattaacgctatattctacttgacagtgttattaaatattaggtctgatttatggaaaggcttaatcaactggtgatccaggtcagccctggcactgggcagaaattgggttatgctggatgttgcttgatgaagttgatcaagctaaagaaaaaaaatcccatcagcaatattaaagtctgacttcatgtgatgaagttattatcatataaatttgaaccatttgccaggccaattctgcatctccaagtttctgtaatggatattttaatagtttgaaaatcaaaagataaagtcacagacttcaataacctttgctatgacacatggaaggagcagtatggctgctaaacatggaagtcaggcatatatcttgccactttggtgtcagagagggaaggaaatagaggcacaagcaaaatgtacacaagggggtggaaacacattgaggtgtagaaaagacgagattaccaccccatgggaagaggcacgagtggaatgaggttttggtgaccatgccactaattactcacatctgtgtgaaccttagccaagtcacttagtttctctgaggctcaggtccagtttctacatcttggagataataatcaagtagtcggtttcagatgaaagtatgaatgcatgtaaatgatctggcccagtgcctgggatgtagagattgctcaatagatttcagagggaggccaggccagaccagcagtaaagctgggtctcagcgcagtgagggagaagtttccaggccaccagagacagacctagaggacaaaaaggggcagagcccggatgctattcaacggtgcagagctggatgatgcactactagaggcacctatgagctgttaaatggtgcagagctgcagcaggagcttcttagcagagatgcctgtgcactatttgattatatagagttagaggatatgctccctactaatggtgcctgtgtgctatgagatgatgcacagctacaggcaatgtccctgggttgcccctgtccagaccaggagtcctcaaactttttctataaagggccagataatagatattttaggctttgtgggccacatatctttatcacaactactcaactctgctgaaatagcaggaaagcagccataaacagcatgtaaataaatgagttgggctgttgtccaataaacctttataaaaacaagctgtaggtcagatttgaccaggagtcagagtttgccaatccttggtctagtctttccttaggcctgataagtgcatgtggctgagagaaacggaagcagcctctctcctctctctttgtgacacatctttcaggaccaggaaaatcttctcccttacagaaggttatcaagagacaagcctgacaggaaccctggagctatttctcttgtcccttccaccatgaaatctaaagggggtaacctgctaactgatgacaggaatcttgtctccgatttatctgcctctgctcagtcagacagcaaacagatgactcattcaggaacaatcctgtatttattgagacttactgggtgccaggcaggtttgttgtgaaaatggtgtgttgtcgtctcttaataaataaaaattccctcctgttccaaattctttcatctttgcctcatcaaagcctgacaaggtctcacttgtccttatcttagtggccactggcatggtaaatcctttatttgcatcttttgctactgattttttaacattattgtattcatgagtaagactctatttccagagggttagtgatttcctaagtgccaccaatggacaaggagtagctagaaaaataaggaagtgtttctctaatgactcatctccaggtttattaccctccagaggctcaatgatgtgtattggcatgaaggagtggatctcagaggcgagccaaccatgacataacccttctccagttctgataccgtggacaagtgatcactctaaacaattccccacctaaattggtttcatgtcattaaaagccttaggactcccaaggagaaaataacagcataccatccataccaacctccttgacttttgcagcaattagacattgctccactaccaaacactccctgaaaatggagctgagtcatcaaggagcaactgaaaatcagaagtgtgattatctgtcaattgctaaagaagtttccaggagaagcccctcggtgggcttctcctcacctttgccaggctgcctacactgcatggcagcagactctgtttgggatttggagaggctgttcctccctgaatactaggcccataataccctacttgctggatttgttctgtagtttctggattcaagtcgtcatcctcacttagggcacagccatctccagactggtctgctctctgggctcagggattcacaaggttactgaagccatagtctgggggcagggagcagaggggccgctccataggagtagggaagaagacagatttcagacaagcatttaagtccagtagtcatccaaacaggcacacgaagaaggaggatttgagagtaaatctgagcttttcttccactaaaaaaaatgcagcacacttcattgtctgacaatactataaactcacttttatgacactagttataaaacccttaacatttgtctagtgctggcagtcagttttttttttcttagagatccaaatgcaagagagagatttgtgatcccaaagccagcttggggttcataaaatgaaggtaccataaaactaatccatcttatgtactaacaaagattaaattctataccatgaagtgataggcattgataagaaatcctttgtttgcatcgtttgctactgattttttaacattgttgtattcatgagtaagactaaatatcaccagacggtgagtggtttcctaagtgccgccaatggacaaggggtagctagaacaatgatgaggtgtttctctaatgactcatctccaggtttatcaccaaccagagggctcagtggtgtgtgttggcctttctgaggcataagcaggcacatgtcgcctgcaaagagggaaggggtgggtacttgtgaggagcccagcactgccttgcttggtctggacttacgcatttggaagagtagggaggtgagcagaatgagattaatgacaacctttgcttcaggatacccatacatttctccaggaatggctcactttttgaattaactcattaactaattttctaaaatctcctgctaatctaaacctaacaccaactctgacttaccaacaatgtccttctctcttctctgctgctctggctctcccacctgtagcaaccactgtggtgaatcttgtattttatcattgctttggatgtgtatgtgtatattttatacatttttaagagggtataatattctgtgttaccttctattagttgacccgtatgaaattgccttaatgttttattttactcaatattattctgctaagattcatccatttcattgtagacaacatctttctttatattgttaatggtcatttggatggtttccagggttttggttctacaggaagtgctactatggcctttcttgtctccaaaagtgcatgtggacatttattttgggtggatacattggagtgtaattgctgggccatacagtatgtaagtgtcccattttataagagaatgctaagctcttctccaaagtgattgtactgagcacacccccatcagcaattaaccaactgttactccacgtcttcttcaccgcctctcattttgtgccaaactaattggtgtaaaatgatataatctttatggtcctgatttgtatttcacagatcactaataattttgaacatctcttcatttgattactggccatttgtgttgcctcttctgtggaaggcctgtgcaagcctcttgccagttttctattaagttgtttgagcttttcttattaatatattcttgacagtaatcttgcattggttatatgtattgtaaacatcccctcccagtgtgtgacctacctttctattttatttaaagtggcttgtaatgaatagaactttaacaaagtcaaaagtagctatcttttttttttctaagcagtgcttttttttttagcattatgcaatgaatcttcttaagaccctgtgtggatgacagtattggctctctctgagagtcaaagaaagccaggaaagggaacgcgaaggccatttggcccaggcctcacatgcacaaaaggccttaaatcaacattgtgttcattatcttcaaatgaggtcacctacagccacaaagattcactgtcaggggtgaaagaagatcctgcagcttaaggctagagcatcatcctttgcagtgcagtgagaactacgaggttttaataaatcttgtaagcatgagaatagcacagttacactgcattctattgttattgtcaaagtatcactttgttaaatctaaacattcaaaatttatcatgatatgtattttcagatcatttaagtctctaaggagaccaccaaatggaaagttgcccaggtctttctcaaatccaagagttcccaaacaaggagaatggtgtgctccatttcacaatgttggtaacttacgaaactggaattcacacctaaatatgtcaagctccagagcctagacatcttctgctgttcaatgtggctaaatggcaatgaaaaatcatcctgagcatgggatcctgtacaagtcatcctgtgcacgaccatcttcccagtgggcctcactctacatggcaccacagctaggtgccccagcctgtcatgggatagaggctgcactctgcctgatgcccatgtgtttccaaagcaaagggggactcaggcctctctcccttgacccctctggggcacatcagggaggggctggcagattgctgaggaccatgaagggcagggcggtgggctttactggccccagagcttgccccaggctgtcctgacatccactgctctctgcaggaaggccaagaagtcactggagtggctgggggggcagcacagggatgagtgtgtgtgtgtgtgtgtgtgtgtgtggcaaggtgttagtgtgcctgtgagggtatgcatgaggagactccacagaggtggcaggatgggtctgggagggaaaggatgggaggagacactgaggcagccagtctgctcagagaggcagcggtcctggccagggggctgtacatgtctctcgccccattctctaatgacctcaggacagtagccattgcatgtggggttcactggacaggaggaccccaccaccagcagcaaaatcataacacctgccttcatcccaccacattcttcttcattgacctccaagggctctacagctgcacgtgttggataaatgccagttccccagcttgtaacccaaggagtcatgagtcagagccacccgatcctcagctgtataagaggataatgctgaattcgagtcattgtgggaaattgactgaaacaaatgagcaacatctaacagtgctgaagagcatcatggcctttctcctcccttcctccctctggcactggtatcttcccatctggcctcctaaggctttgcccggtaaggctctctgcccttatccccatctctgaggtacaactcttctcacagtacggccccagagatgagtccaggccacctggctgacccttaccccctttccccgtatgcagacttcctcaaccagacccccaagctaaccacagtgggcccaccctctccccaacaccctcccttcactcctgcaactctcgcttggcactctgctactgcttttgccaattgttctcacctcgggtggacaggcctctctgtgtcaccctcctatgagcccatgaggagggtgggccaaaagtcaggcttaatctgcctgctcctccccagccagcaccactctacaaagttggaaggtccataagaagcagagcagctgcttctgaaagggcatccacctaaagaacgtgtgcgatggatcgccttgcaggtaacagggctgctcagaggcagatgcccctggaggtgtctcccacctgggggctgaccaccccgtggccctgttacagtgcacgtgcccaagcgccagctcctgcctaccttcctgatgccttctgaaggactggacacgcagttgtcagcccctccgttcttgctgatggtccgccagagttcagcaaacgtgctgtcctgctccagggggttggtgcccttggctcggaagtactcatatacagcagaatcccggacagtgccataagacatttccacttgtttggacaggtcctggaaagtcctgaaatgcagaaaggcagcgaggcatgagtacatgctgtgcattgcacactgcaaggatacaaatgggctgcaaggcccttctgaactccaagcccggcatggcccactatccacattcttcattccccatcccccaaagttcaagtccttcagcccagagtgggacttgcagcgcctcattcaattacaggtgtgttttctcagtgcagattaattcaataagatgactgggcacctaaaaccaggttctttactgaactggagggataaaaggatgagtaagacatgattcctgccttcaaggagtttatagtccagctatagaagcaaacatatagacagagaatcatagtatcaaagagtcagggcaacatgggaggctgtatgctgcggatctccaactcagacgcctgcagaggctgggcaggaaagaggcctatgttggcaagatgaacgataatgatggctggcctgtgacactcagagacagcatgaggaagaaacgcactcagagaccaactgactcagggtaaattaagaggcatcccctccaaagcttgcagctgtgctggggtctagccaagtattgacttcgaatgctcccctccccatgacctcctcaaccaatttggtctttgaaaaaataaaaaaattggatttttatatctctcctgattttaaaatgttgataattatttaaaagatgatgaaaaaaacaaagcacttctgagggccttgggtttgctctccttagaggagtggcaggtggctccagccaggtgcacatttgaggggggatttcacaaggaacggccatcagcagcccaagagcagacttctgagctaggggcagaggaggagactcctctggggaaggacaaatagtcacagcaggaaggaccagtcgctatgaagattttacttgcctcagaagagcgtacttggctcagcgtgttgacagaacgtcatgtaccaaacagaattgcaaaataaaaaaagcccagtggggagccagcctctctctccaggttccaacttgatcactctttacttatttctcttctagaaatctcagtctctcctctttaacaacccacatcatcatccctccctctctctgagtcaccatttccacaggaagagccagtcttctcaactggatctacacaaccctccatcttccggtctcatctctggctgttctccccacctgcacacagaaccatagccaaccttgaaatgagaaatcccacacactccccatccatggcaccaggccacagtgctccctctgcctggaatccctttatctccctcctctaacaacacctctacaagcccgttgaaaatccaacagccaacagctgcctctttccttggggagccatccgcaccccagcctccctgtgccctctccacaccttgtgggcttctatggcagcatgagctcaccgggacttcagagggccatgtgccagagcagagacaagcaagggctctggagtccaattgcctaccttgcctgtctgtcccccacaaccaacactgtggtccagaaaagttagttaacttatccgtgcctcagtttccaaatattttaataatggagatagaagcagagcctgtagcagaggattgctatgaggattaaatgggatttgtgttcagctctcagagcagttcctgatggtaaccagtagtgattattctgggtccccagtagactataagaatttggaggaatggagctgaaggagccccatttttgcatccactgccctggaccaacgctgacagcagcctccccggccagcacacagaaggcccagctgtggatgcctccccttgcttcggagacacatgccacagcactccttaggtccctgctatgtggcccagaaacagagctcagtattcgtttcaatacattacagatgaaaggaaacataaaataacaaattcgatgaagaaatctttctaattattgttcattatttatatctaattgaagcaagatgttcctttgcctgaagggccccaagggttgtaactctgccgtaatttgcctgtaatgaaaggagggggatctttttttttttccacatttttaaaattttttctcatggtaatacaaacaaacacgaggctttgatgaatgagaaacatcaggataaattatacagttgagtctaaatactgagctgctctaaattgctgcagttttcatgagtgtggaatgaatgggtaactgccagggatctccaaacactgtttcatccccacatttgaaatggagattttctctctccacttggtattattcattaaggcgcccacggccagaggctcagggaacgtctctggttaacaagcaggcagcccaaatgtttatggcttcatgttcatttctgttttagtagacctcactgttcccaccccaaaatgccacccccatcttctttgaatcttactgctcagacccacggccacagctttcatccatccatcacctctaatagccacaaatttgtgcagaggaatctctcccatctcagacatgcactcgatctttcaacaaaggtttccaggctcactaatgcccagcacagggggcactaccatcttattccagggtgaataaacttatggaaggctatctggggtgttgaacacaagggcccaactattcatccaccaaagccatcatctccctgaggaagtcatcctcttgtcacagcacccagttttggaggggacacacagggaggaataaaggagaatggggacagccaggcatccagactgccaagccaacagtggtagtcagtggaagacagatgttgaagtcagataggacgcccattctagcaagtgagggaggcttcaccaggaggaggctgtgttatcagcacactcaatttagaacttttctgaagtcagtctcttcagcaacaactgctacaaagtgtccaggtacccccaccacagagagatgaaggagacgtgcctatcacaggtgtggtctctattaacctcacatgcacgatgcaacttgctgatgtcattcaaccagttatttcaccaacagttcctgaatgtctactaggtaaggcacagtgcacaccaagcaaggaatacatggcaggcatcatcaaggggcgagtgatcagagaagtaaagcaacagtgaccaaacaatatgagatatattaaaatacaggtctgtatgggggatcccagaagcacagagaagtagctaacccatgggtaggagctaaagaaatgcttcctagaagagggaacattaagctgagtcagaaagggtgagtagaggcagcgagatggagaaccaaggggtagaatgttcctggaagagaagatattacctgagaaggcatttgggtaatgaaaacacatggcttattctggacacataccagggagcaattcacatcagccaaaaatatgtaggtgatggaatttgacagtcctgggtgtggatgctgctttgaatgccttcactgtttgacatagaccagtagctctcaaagtgtgatcctcagagctgcagtgtcagtagcacctggggccttatgagaaatgcaaatccttgggccccactccagacatactgagtcagaaactctgaaggtggtgctcagcagtctatgtttccacaaccctccaggtgattctgatgcatgcaagctccagaaccatggactggggcaagttctataatctctgaagccttagatttcataactcatacccaactcacagggttgttgaagattaatgatcacagacatatacctggtacacagttaatgtttaataaatgctagcccttctagtagactgcttatcagtagttcaaatggttggaacactgtgctcatgtgaaggagtcatgggtaacaggccagagtagtcacacccagatggaagcaagcatgggcaagccgcatgtctaagcttccaggctcatgtgattggagcctatctcctcaactgcccatctgtctccccagtgagaagcctatggcccatcttgtttccatcttgctgccaaggtacatgcaaatgctcccccatcagcccccagtctactgccttgtcaacaacacactttaggcactcaggatacctaaaaggatgacttgcagaagtctgaacccaggatgagcatagagacaccaaaactcctctggcaggcaatctggacttttgctttgtgggtcgtcatagtaacagcctagcagaggctaccctgggaaagtaatgaactcctaggcaaggaactgctcaggaagaacggcctcaaaagcatcagccccaggctgcctgccagagtctgcactggctcatgaaatgtcatggtgcaagcatgtgtatcacttgagcctcacttctgtttgctgcctatcttcttacttcaacttttgataatattttgtgttggaatcctcccctgacaaagcctaccctctcctccaatcttacgtttaaaccaatatcttctactcaagtgtgtcctaccaaaagtggatttgggaccaatgcaagctgtttctctgtatctcctgacctggattaccgatttttgaaatttccacatgctgaaagcatagctgatacctttgagcacatcagattgtcttgcaaaaggactttgtaagcatcccttgcctctgagaacactgtcctctaattaaacatgcacctctagggaagacccaccatgcatccttcagctgtggccgaggatattctccccagcttggtaccacctcctgtcctccccacacctttctccgtaaatcaatcttactatttcctagatatatgttcattaacaaagagataaatgtgtttgcagtatgagaaaaatcaataatacagaatttataaatacatctttgcatgttacaaaaatatttacattggcaatggagataaacacttgtaacaagagcagaatcaatattcagtatacgtaaaacggatttcaacaacggtggggatgtcataagcatgggcctgatacatgtggatctggaagtcctattattcttccttaaggagaagagaatgtggtggagtggctcaaaagacacgggagggtggggatatccatcctggtgacttgaaactttcatagctacagcctacagatgcctttactatcattccagcagtcttgattttctatctcatgtttggctctacaagagatgatgctgcaatcatcaaagcaatctggagtgcctggatagggctccacaactggcttccagagggcaccatgacccaccctgctgcacactgataagcctctcctgggtttcttccccagcgccccccagcctctctaatctgtcacccatgcaggggaaggcttcctaggtgtcttccttctttcattcactcgtcattcaaaaaaccctatttcctgtgcatctgtctgcattagacagtgctctatgtctggggatagggcaagaatggcacaaagttcctacttttgtggattttacatagttgagatgagacaaagaaacaaacatcaatgacaacagcaacaatacaataactaggtaatgccagggtcagcaaactttctggaaagggacagatagtgcctatgtggtctctgagggccacacaagactcagtcacatattctttgcttttgtttttgttttgttttccaacgctttaaaatgtttttaaaaaggaaaagcagtcttgacttgcaggctgtgacaaagcaggctgcaggccctctgaaggcctgtggggcatcgtcagctgacccctgctgctatgtaacaagtgatgaaaaatgctatgaagattaataaagcagagcaagggtgagccaaaatgatggaggcattgattacataaagtagccagggtggattttgagccattggagttgacatctagggcatgtgtttctctagtatgtcctcgcactggactaagaggagcagagaggaatgaactcgcagaggatggggctgaggcctgctggggctgtcctgccaaggagctgagacagggtggccaaggagccagcttatgagcctctcctaccttgcaacatttacctggggaccttccaggaagcctaggaaaggggatgctggggtgtacacaggagctgtggttagaatactgtctccgccaaaactcatattgaaacttaatacccaatgtggcagtattgagaggtgggacctttaaaaggtgattggatcatgaagactctgtcttgatgaatggattaacccaatcatggactaatcagtcatcatgggaggggagatggtatttttataaggagaagaagagaggctttagctgggatgcgagtaggcttgggcccccgtccgtgtgatgcgctgcaccaccacatgacactgaagggagaaggtgcacaccaaatgcagctgctagaccttggacttctcagcctccagaactgtaagaaataaatgccctttttaaaaaaaataaactacccagtttaaggtattctgttataagcaagaaaaaaaagactaagaaaacagttctcctttgtatccaaagcctagtcggtgtgattctgagtagtgagcagagggactgcagatccaaacactgtatgaggacacttagtgacccacagggtgagggttgcagagcccacagcaggaaaatgcacgcttccataggtcacagagcccttcttcaaacctatgcctgaaagccagcctcggagggccagctgaggtgtcctccctcctcaccttccttccctccatggcgttttctctccaaatcccacttcttcaattgctattgaaattaaaagacacccaaaataaactgctaaaaactcaaagcatttgtatatatttacatacttgtaaaaagtaacaattaataaatgtaaataaatataaaaacaaaagtaaaagggataagcagtgaatgcctgcaagacttccacttcttacaaacacatttttgtaaaatttgcatttttattacgttataaataaaaaatgtgatctgaacgattttaaatatcctgctgctgcccaagcatcagttctgggccttgggaactgagctctgtgctctcttctatcctctatgtccacccttcctcctgggttagcctcccatcagccaagatccattgagaggcaggaggtctctctaccagccctatcaaacaccctgtccaccagccatgaggaggctgtgatagttgtatcttcagtccctacagcaagacaaacatgtgagactaattcaaagtggtccgaggccatcccaggcactcagggcccatcagtactgaggctcccacaccaaggcaggctggagtttcctcacttctgcaccttctgcctggattcaacccaggcctggtgccctggtcccaaatcagactgtgaattcctaaacataggcatatgttatatgtgtttctgatttgccaaactcagcctagatcctgtatgtaagtagagctcagtaataggagctgtgaaaatcatcctgatgaggtcaaataactgtgggccaggtgctaagccaagtcaggagctcaatgtccacactattcactaggttagttctggggcttctatttcccccagcaaaggaggcttagtgtagagccttcagtgcttcagtgctgcctcctccagctcttcttggctaccctgcttttggtgtgccagcctggaagacctcttgcacactcaggcctccaagtcttcactcaggttcattgcctgccttctctgctgtgccctgactaaaacctacccaccctgaaggaatcagctcagctgtcatgtcgtattgaaagagtggatccatgcccactggatccaagtccctgtgtgttctgggcttggtcctatcctaatgttttcccttttaagcttcctgtgctgtctgcccacctcaaccttgagctcccccagggaatggactctgtgtccatctctgaatttctatcaccccacatacagtctgacagacattaggagctgagttcatgttttctggaagaatgaactctgtttcaaaacaattttgtgtttagaactgaatggctgaatatggctgggagaagatccaagctaaacaccagcatggtgattctaactttagaatcatgaccactagcctccaggagacccttaaagctgcttgagatcttctaaatctccctgtgcacttcctcctcccacgctctcagatgactctcagacaatgaggctgcttcttttttcctaagaagggagaagccatcagtggagaactttgcttttctagagaactcccttctcgaaaactagtgaatagttgccttccatccttttaaaatgacagctttgtttttactcctatgcatgtctaactctgtttgtctcctagatcccagacattcttgccttctcaaagtacattgctcttccagttgtcacctctaccttcctcaccatgaaattatttctctctgcagatcatttccattggcttgaaaatacatacatacatcttctctctctcaaaaaaaaaaaaagtcctgtgagatgacatcctcctccaaccacccttccagctcttcttccggagagttatctatgattactgcctccattaccctcttcccgtttctcaggaacctggcttactccagttttcatccctctgctgatctgaaacaactttcatcaaggtcattaatgatctcccaaatacagtggccaattctcagtcttcacatccctccaaccagtagcatttgacaggtagcactctcctagatgcccttccttcatttggcttccagaaatcactcttgctcagtcctcctcccaccttggaggacctccttatccatttcctaattcttctttctgttctcagactctgaattttggaatcttccaggggtcagaccactgatccctgggttgcaggacttttgccacaatctcatcatgtcagttgtctgtagatgcatctatacattgatgactgtagtgggacacaccagccctgacctacctcatccactcctggcaatcacccgtctgaccacttcatttggatggctaatagatcttcacactaaacatgctcaaacttgagctcttaaatcactaacccctaaaccatgcctgctcttcctctagttctcccatgtcaatcaaacactgctctattctttgagatgctgtagccaagagccttgaaatcactactgacccttctctttcttatgtatcgcacatacaaatttcagcatttcctatctcttctatcaagatacatctagaatcagatcacttatcatgaccttcactctgcatcttatctggacattgagatagtctctctaagaatctccttgcttccacctttaacccctacagctattccctaggaaggccaagcagagtgatcctttaaaaatctgtgccagatcatgtcacctcatcattcaaagccctccaatgacttcttgactccaaagtcaaagtgtgcatccaaagtcctcacatggcctgaaaggtcctatgttatctggaccccaatacatctgctctcgccgtaccagcctccctgccctcccaccttggggtttctgtggttgtttcttaaccttatcctggtttactcttccctcagatttgtaattggctcactctttcagtgtctaggtcgaatcaaatgttaccttctccaggacgcctttgctgacaatcttttacaaaacacagcaccccttacattatatgataaaaatacaaaaaaaaatcacaacttgacatatatggctgcttaatgttagttcccctcccagaataggacttggctgtttgtttttttgctgtatcaccagtgcctacaacttgagtgaccaatcaccccagtttgcttgggaactagagatttcctggatgcaggactttcagtactccagataagttctagccaaattgtgataatatgacccctacctacaatagtgaccagctcatggtagacactctaatgaacataggttatatgtatgaatcatatatgaatgagttggcctttaaaaatatctagatttgatattctgttggaaaagtcttcatcttgggttgactagtctcccttcaggacaactgtgagtcaatcatctgcagagaagcaggcctagtaatagtttgaggtgcttgaaccaaagaactgtggccctgagccaggaggcacagcacaaagctacgtgggtccaggctgcccaggaacagattgccaaggagtctgggaatcagatctagttctttgggctccatcctcagggtgctgaaacttcatgatccaggttctttgtgggtgcagtggaaatcagcatccaccaattgggagaattctcctgggatacagccgttttctgctcccctggctcctgtgtgcctgccattccatgggagtcctgccagccagcaggacctgcatgccaagaacatggctagctctcagctctcaacacccgcaaatatttgctgccacaaatcaagacaaaagcaggatgcaccattaacctttaatatatcagtgctggggctcttaatcaattatgaggctgtcacaaatgtgtctgaaatgcaaatcagggcagcagcccttcgggaggctgtgaaggtgccttcttccccttctggcacagcctgtgtcatcctgtgctccagacaaacagcctgagtctcttctctccctgctaatattagttttcaccatctttccttccctcttctccttcctttcaaatgtctgtctgaaccctctagtgtgtcagcttctccagcagtcacttgatataccagaagaaagatacaatgagactaacttccagaccctctgctaacacttgctttatactgcttcattgaaccctggcaatagccccttcataaagttattatttctacccccctcattttacagattaaaaaatcaaggcttcaggagattaaggaatttatggaaggtcacagaagcagcaagtacaagagctgtcttcatactcaggactgcttgatacaaaaacctgtccatattagtatcatcctatggtgatattaagtagctcatagctaagtgaggagggcgaacaggcacatggatcattagaaacatcatgcaaaacacggtgctagaatgaagcacagagtcatgggaacatgaagttgaacctgtcccagcttagcagacaaggaactgggactgtgggcaaagagggagggttcatgggaagggtgaggctgaggctgaggcttaaggagaaacaggaaatggacatatagaagagagaaataaaaaaatgttctgggcaaagataacattgcattgtttaaatcacggatgtgtgtgagaaagagaaatcttctggtagctaataacagtttactaggagacagcagaaatggtatattactaagcactaagaataggattgcaggacaattgtccataaaatacttagaggattgttataactgagtttttgtggaagtgcaaagataatggaaaaatgataagctatcgatgttccctagacaattatggggctggagaatgtgtgagctgagtgggtggagacattctatactgtggacagttaaggaagccactgcagaaagtatgtcacacatattttagaatgcagagctgagaagcagctatgaatccatgtgcttgcacatgtgtgtgcatgcataaatgtgcacacctgttccggcctgggtgtgttcatgtaagagtgtatactcaagggccccagggcaggaagaagagaggaaagatggaggagagtgctgctggagggccaggacaattggatgagggtatgccatttgctatgactaactttaaaatagaggagtggttgtgagttcctcagtggttggatggggaccccaaaggaggtggactcatgtggctgagaacccaaccaaagcagctggtgaaggaatcacagcacacaagacatctgcctgcctgagtttgtttgtggatctgagcagtcagcactcatggtgcaagaaaacagactgaggctcttcccttgtgggacagctggagggaaaatactagcacacatgggccagtgattgaacaatgcaaaaccagctgtaattaaatgtgaagctataagatgctagccgttctgaatcagtttgcagaaaaatcacattagcaaggatatagactctgatgggaagtttaggaaagggaattgggaggagaaggtgtgctctatcattgatgagtcttgtctgagttcagagaatgggaggattcctactctgtgccatgtgctgttacatgggctagcgcatttcatcctcagaaccaccctctgtgataagctattcttcccaccttatggataaggaaattatgaagtttttgaagctggtccatgccagagccaagttgagcttgttgagctgttgatgctaagctgttccaggcctggatctccaagatgcctgagctatcttcccaaaccagctccaattagggatgatgtccatgccatggaatgtttggttacagctgtttttatcttggacaccatttcgcttgtggcaccattagcaatgccaggtgccagccacaccaccccaagagctccacatgccacataactttcacctggcatgctctctggccagtgacagagactatctgctgcaggtgcctgcaatgcctggggggcatcaatgggagcccacctatgccccagttaggaccaggatactggcaggatagagcatggtcctgttttttgttctttgaggtaattattcatcccattgactttttagggttcaggcaagacactcaggataactctgccagtattcaacagtgtttgtccaatgggagcaaaacatcccgctacagaacaccagatacaccaccatggaaaggttgttggaaagtacacagatggacacaaacatctggggatatccaaacatatccagacctggtgccagtccctctttcatgggatccttgtgacagccctgggagaacagtcctaattcttaggactctgggaggtaaggtgaattccccagagaattagagactcataccaatttatgcaggaccctacagtggatcatgagcagagctgatcacgtatgccaggctgttctggctgaagtctggttctaaacatcaaacctcttaagcagaggaaacaagggaagcaacacagtgcagttcagatgctatcacaccaggagtccagggcctggattctggaccctgcccagggaacatggcacttccttgcttttaggagaactcatgctggagtggcagggcagggaaggagttcagaacctaggcaatggagtcagagtgtgctttcaaatatcactctacgtcttgctagctctgtggccgtggataagctacctaacctctctgtgcttcagtgttctcatctacacaacaggaatattcatggattgagtgaattcaagcagagcactaagcataatgccagtctgtgggaagcatccattaagtgttagctatcgttatgagcttcagtttctccaatgattaaatgagagaatgatgctacgtcagtgcttgtaaactgccaacctgcatggccagtcaagaagtggctggtttggctagcctcctgtttgcctgctttgaatctgcatttttttttttttttagcccgggcctgtgatttctgggtcatcacagtctcagcactctggtcttagaccgacatttacattctctgcttagccctgtaaacactgtgacagaaacccgctggacaagatgatccgtcaggccttttcctgctgtgatatttcatgattctatggcctgggctggaactataagacttactttgtttaggattctctcttccagaaaagcagcatcatgcacttttttctctgaaacacagctgttttctctgaaaactagaatctcattttgcagtgtctgttgagactcagagctaccacagggaggatctcacagagaacagacctctaatgattaaaatgtagtgtgctcagacaccaggagctttgcctctgcagagtgctggcagccacctcctcagaagcagggacccagggagcttgtccccaagtcacaccaaggctacagccacaatgcacccagtggggcaaagcaaaacaaccaccttcaaaggcactagctcaggtcactatgggcttttctgactcttaacaacataataatgtccccacagtgcctcgggatgaaaggtaatgcacaaaatttagccacaaacccaaagcaaagccaatgtcttcctccgtgggagaagagagacttccagcaggaaaagccaatgattaattttaggtggaagctgcttgccattcttcaagagaaatgagcattccaagggaaccctcaaaggactgtattattccaagatggtgctctctttgcctgctgtctctctagactactaggtctgccaaaaacaaggttctccctggaatggtttccttctgccatgttcacagggcatccaggccaggtaggaggaacacagccacctgtgtttcctggattcagagccgggcacatcaggaccaggctgtacctgaatctttgcactgaaatcccaagagtcactcagcagatgttgcatcctgatttgtttgagtggatgaatgatgtataagacacacatctcactgcctcatctgtgttttactctcctttctcctattccagagacagtagtcaggtcaacaaacagggatacctacaggtctctgtacaggtatttctgatgttccttcatgggtttggctaaacaggctggaaaagtaaaagcaaaaggaccagagggtgcttggcttgaggagacccccaggtaggagagggctccaacgccaggatagggggcttcagggaccacatgactgcagtgaaaggagccgctgggccagcaacgcggctgtgggtggagccatctcagccgaaccctgcctccctccgccctgcacactggatccccagctccctccgtaatactcctccccacccacaaggccaatgccaaccggagagaggctcccttctccttccaaaccatagggctcctctcccagggaagaagccatgttcccccatgcctgaactgagccttgtatgacatttttcctgatgccagggcctaatgggtaatgtggcctaccagaagagggctgcactgtgtcgtaggaagcaccatatccaccatgccgccatgaaaaggttctctgtgtgaggttgggatgaattctgaccatgaagctgtctggacaagccgttcatgggtccccactctcctcaggatgaagggacccctccagatctgactctttaggcctcgaaggacttgtcccacttagtcctccagcagccgctccgatactttatgttctgtcctgtgcaagattttgtttcccaagcccacagtgctctctcctgcctctggtccctctcgtatgccacatggaacagttctccttcctaaacatgcggacaactcctcacattccacatcttggggaacacatcactaccttcaaaattctgttcaagacatttcccctgtgatgggttggaatgcatccccccaaagtaaatatgtggcatcctaacccctagtacctataaatttgatctcacttggggagtccttatcagaggtcatcaagttaaatgaggtcattagagtggccctactccagtaccacgagtgtccttataaaaaggagaaatttctacacagatacctacacaggcagaatgccatgtgtaaaatgaaggcagagagcagggtaatgcatctacaagccaaagaacaccaaaattgccagccactgtcaaacgctgggggagaggtgagaacagattctccctcacagccctcagaagaaatcagctctgcccacattttgatcttagactttcagcctccagaactgtgagacaataaatgttgtctaaaccactcagtttgtgacactttgttcacagtacccctaagaaactaatacagcccccatgtgccctgacaatcacagaaacttccctaatcatggtactcgtcttgctgtgctgtactgagtcacttctctgcctgctcctctgaattgccaactgccactccatgaaggtggagaccatgctttctcacccactttttatctccagagcctgacacaatgttaggtgcatgacaggagcaaatgatctctttattatagaaatgtaagaataaatgagtgaataaatgaataggatgatttctggtcatagacaactgttgcaacatggtcattatgttggttacaaggtaatgttactgtagcactgttactccaccaatgcccagcccaatccaggtattgaatgtgctctatactccctgctggatgaataaatgaatagatgagtcaattaacctgtaaagagacacctcccagagtataaaaggcacagtgtcctttccagcatgatttcattcctggcgccatgcttcttgaggggaaccttgccatatggaatagtcactcaatgttgatgtgcagcagagcatgacatgaaggcactgagaggcccgggagggagcttttgactgggagtcagaggatcataacctccttgggcaattagtctgagagtcaacatgtgagagcctccagtaagaagagtcatgctttaaaagaatgcctactatgtgccaagctctgggtagaatcctcatgaaacccatgaagggcaagtatgagcatctctattgtccaatgaggaacccaggcatatgagataggtgacttgtctgtggtcctgtagccagtaaggggcagcaaagatttctgcctagcagtgcctacctcaaaatgctcttcccttagaatcagagaattactttaagactaaccttacatctcagacttttccatctctgtttccagttttttatcttttgtaatgtctgaatgtatttatgtcttattatcctgcatggtttgaggaagcattgtcaacgtaccagccaaaattagctgtgcttggagaacacaagcaatgagctcagtctcttcactgacagccgagcttgaagccacaggcatgggtaccttggaagtggcagtggcagcaatattagaatctgaggtttcatttcgcacaaaggaaatgaaatccaggagggcgcaataggtcccctctctacttgaagtctttcctttcaacttttcaacaggaatgttttattgagtgatgtatgttaatgacaagcattggatttgattcaaataagcttacatttgaatccaagttttgcttcacactaggtatgttaactgttttctgcctcagtttcctcataagcaatcagaacttaatgtggtaaaaattaaatgatgtaatttgtggaaagcacttaggcagtttctagtacagaatatattgtataacacagtatatattcacacacagattatacagtatacactgtatattaaaatgcaagtaattcctcaataaatgatacgtcattattagaactattattattagtgctactgttgttgttaaggtaatttcccttacagggttggggaaccaggtgtgactgatatttaagtagactccttctctattggacaaatatattccagtttcctttccacacaagcaaaccccaacagccccagggtcacacctgggcagtgactagcccaccacacatgtttacagctgtggggttcaggatgaagggcgtcaacctacagatccaaagtcctctaaagagctaccctggtccaccctcccatgtttccctccttcttcccatgatcctaaagggttaacatgataattaaagcatgggatcctaattcttattatattaattaaactgaaaactgcagatggtgtttaataacaacttagtcccagcaggttccaggcactttacctaaatcaaacatatcataaagctggcatgagactcacagagtctggccctgccacatctggccagggacacatgttttcacctagagcaaaaggaacataccatctctattacttatgcagatgtggtcttaaattgcttgacagtctaattccaccccaccatcttctggagccaaaaataaaggagtattgattgcaaagattaataacagagcttaagaaggaaaatggtgcaaaacaccttttttctctcccttcgtgatataaacgcctgccacccctgcaacctaattttgtcacccagcacacgggagtgtattaattaaagtgacaccaaggacaggaaaatctgagctcttggggtgatgactggaaatacataaatatgcatctccaagctgtctcgggaagggaggcacgttgccaggcaagatcagcataattccaccaaggcgagggtggagaggagtgtgcacagcttgcacagctcacccctggaggtcaaggcacttattctggcaaatgtctcctaaacccaaagaaagaaactagacaaagagcaaatatgtgatttttctacctggtttgtaaagaactacaccaccacttttgtaaacgtcctctgatatggtctggagggagctaatatgaaatgaatatttattatgcactaaatttccagactatactgacagagatagagtggtgccattttataggcaaggacactgaggcccagcatggttagtcaatgtctcagccagtattgaaaaccaggtttgactaaaaccacacccctacactgatctgctgaaacagaaagcatgaaagaacagggtgaaatgaacagatgtttctcaggggccagctctagaacagttctcctggagggtgtggatagggacctccctccagggtcagcatgtcctttgaaagggccatttcttgctgccatccctcccactggcagagggtgcactgggactttgatgcctctccccagcgggggcaggtacctgcaaccttgggtggagaagtaagagatttagttgaggttggcttgtaaggcatgaggggatgggggatgattttagaggtgctcattttacacttttatttaggtgaacttcactgtagtcaataaaccagtttcaagagccaactgtactttgtgactgatttcggttactacaggggacgtgacttcaactcatcccgagcttccccactgtcatcattacctgttgggcatctccacctggacatctatgggcatctaacacttacgtagtctcaactggaccttgttctgcctacccaagctggctcctcccccatacagctcacatcaggtgcaggtgtccccatccacccaggtctcgcactaacacctgggctgccttgcccctcactctggcctttctcccacctgtcatattccaacaggcctgaccgagttgagccccacaatatttcgcagatctccctactcctccaacatcagtgctactgccctagtttaggaaatgcagagaacattcattaggctgtaaagagagggaactaagcagaggcagagaggagcagacacacagaagagaacccaggatcactgataacagcaaagtagtgaagacctcgctctctgcggttatgtgattgacgtgactgtctccagtgtaaatctgcacccacatctagcacatgggaagcccgtctattctttatctgctcttcttcctgggaaaaatttcccccgcatcctctgggactttcaggtagaggcaggcattctgatatgtagcaactctttctaaaatcacacacacacagagagagagagagagagagagagagagagacgaacaatgtcttttatttgttagcctactcccctagtaggctgttttaaaaaaaaagaataaacacaaacaatagaagattattagtgagttcttactctgtgtagggcagtgttatcagtatttacagaaaaacccttttaggttgtccctattattattctcagtctacagaggaggaatctggagcccagaaggttaattagcttgcccaaagtcacatgtccattcaatatcggatccagcatgtgagcacaggctgtctggctcctgcacatggactcctaaccgtgctcctgcactttaagttcatgaagacatgcaacaggtctggcttcttccccagtgtgcccccagaactgagcacagcccctagcacatggtaggtggtcaagaaaaactttgtgagtgaatgagtggatgagtccagcctgttcgtgtatatcattgctttaaaccctgataactggtctagtagtattctgttcccagctgtctgactaggcttccccgctctgcaggaaatgacagctccccttgccctccatttctatggattcatgctgagccagtgctctccctggagggcacccaccattccccatccctaagccctaggcaaaggccagccatgcagaatcacataccatctcacctgctgagttctcccctttgtcagaggaaaatccccggctaacctgctgtgtactgtggctgttgttattatgagataaggtgcattagccatgtgagggcattggcacgtgcattccacagcctgtcagacacaggagactggggatgcttccacagggaggctcggagagggatcccagggaaggaaatgcagtctcaacctggcccttcctggccaaaaacaaaaaccagagtaaaagaaagaaatgcacatagacaacagtcagattcattccatatgtgagcaacggagcatgtgcctctgactctgtgtgtgtttgtgtgtatatgtgtggttggctacccttgtgggcatctgtgggctgatgtgtgtcctctctgtgtggagctctgaagtggaagcaggaaaatgtgcctattcttgactccaaatcaaatttgtcctgcttttcttagtgtgtggagccaagagaagccacttctgagatgttctttagacgctactgtttaaggtgagagtttgaactaagttgtcaataagctcacaaactgtcagagtgggaggcaagtttagaaatcttcttataaaatcccttcattttatagacctaaaaaatgagacccagaaagcagtcactttccaaggacacacagctaatgagtctgccaggactctgcccacactcagtggactttgcacaatgcctgagggactgctagaaaacctgccattgcttaaaggaagaatttatctcacagttcagcaatggcagtaagacactgcttctaaaggcaggtcaccaatattcaggctctacgctgcacatcaaaaagtcacattggttgctgtgttctcaacagctcatgatccttcctgtgagtcctctaagtcaggacaatggagtgtgctcaaggggtccagatcacaggaagacagagagaaaaaaagtgacctgcaggacacattggcaaccactgtggacttgcactggcaaagccaggtgtttgaaaaacattatccaagttagaaatccccttggttccaccagaggatgacacatgggctaatcacagggttccccattctaggcctgagtaagcatgtggcccaaaccaggcctgacttgtcttccatgtccaacggctatttcataaccattacccaaatgcagggcaccgtcttctctgttgattccaccaagcccactccaaatgggcagtgggttaagtaagtaggggtggaggatgatgggagtttcctatttattgaggggcccccatgagccaggcaatgtgtagagcactttacagagagcatctcttcataatcaccacctatggggaagtcaatattatatcacagaggagtgaactgggaatctgagagggctccaagggcccctttggggtcatgaggatgggcataaaaggcagatgatttcaaatgtggacaagttggctgggaaaattagaagcaaaatacgtctacagagagtggagttcacactttctgaagcccctggcttcctcctccatacccacaccctcaccctggctccggacccatttttcatccatgacttcctcttgaatctcgtttgactcccagccccgcttctcatgacttgccctgctctgtaggtcctgatttggcccatccttagatcaggctgtctagggaaggactgctagctcccatccccagacggatcttatcctgaggcccccttctgtgtcctgctccaactggaagccacctttaatattttaattccatgcagtaacttagattactaaaatggaagctctttcaaccaagtttactgtttaacatctgagcctgaagtatcagcaatcagtgaatggagcttagggaaagtagactgctctggcttgattctgcttttcatgcagcatcatattctgctgtgttttggcttacagtgaggaacactgacacacctgcatcataacaaggtattttgttttctttaaaaatgtggtacaaatatgtttttctagttagtttattgaattgtctttcttgacttttttattcagaaatacatatttatgatttttcaaaaatagttcattaataaatacatctgggaaatgctggacacgacagcccttcttggagacttatggttcataataacacaggaaagactgaaaagccctttaaagaaaactttcaactttctttcacccatctttttccatcttcagaaaacagagctactaggaatccacttggaaaatgatgttgtgtagacgattcaaagaccaaaatgctctgaaatgggcaccaatgctgagacttgcattagaaacagagcagtgaggattctgcctgccccctgaatgggatttcaatgggctttttaaacaagcccactgtatttctatcttgaataattagctgaaggaacactgcttttcaagaaaaggagaccagggaagaaagatacctcagaaaaagggtcagaaatgatatcagaagtttaaaatggcacctagacccaaacaaacatgaaggcacagtctcttttgtctataaagacaaaattgaggatgactgcaagggggagaagaaactgcgagttgcttgaagccccctcatctcaggccctccatcttcatctcctgctcgtggccaactggcttctgttcccacccttcagcccacagggtcctccatcttgctgggtgggtcactagactacacagaccaccacctctggaaactgccctgacctacatgcccaacttgacaatgcttgaccatggttcacctcttcattttcattgcttattgcaaattctcttccctctgctttgcctatgtgcatccagtcatagatggtttgccactcctcccttaacctctggccttcttacttgcatagggctgagataagcgcctccaggatgccaaaacagaaatctcctgctctgagaatgccatcaggcaatcctctttttctaaaaccagctcacctcctgacttccctatgtcctatgaggacactgccaccctcaatcccccaaatataaagtcttagtactctttaatcctttcttttcctacctttgccttgttaagtcaacagaactctactgccaacaccctcctttcttttcatttctactgacactctcagctcagtttctttccctgtcatctgactatggtagcacaggcttgccaccttttactgcactttgcagttattgtgtttcttacaaattgaagacctgtggcaaacctgtgtcaagcaagtctatcagtgccattttccaatagcatgtgctcacttcatgtctccatcacattttggtaattctcacaatatttcaaacttttaaaattattactattattattattatatctgttacagtgatctatgatcagtgatttttgatgttactattgtgattctttgggggccacaaactgcccttataagatggtgaagttcatcagtaaatgttgtgtatgttctgactgctccactgaccagccgttccctcatctctctctctctctcctcaggcctccctattccccaacacacaacaatattgaaattaggtgattaataatcttaaaatggcctgattgagtgaaaggaagagttgtacatctctcattcttgatgaaaatctagaaatgattacacttagtgaggaagggatgttgaaagccaagagaggcctcttagccagtcagccaagttgtgaatgcaaaggaaaagttcttgaagaaaactaaaagtgaaactccagtgaacatatgaattataagaaagcaaaagagccttattactgatatggagaaagttttagtggtctgaatagaagatcaacaggacattcccttaagctaaagcctaatccagatcaatgccccaactctcttcaattttaacgaaggctgagagaggtgaggaaactgtaggaaaaaaagttggaagctagcagaggttggttcatgaggtttaaggaatgaagctgtctccataacataacagtgcaaggtgaagcagcaagtgctgatggagcagcaagtcatccagaagatctagctaagatcattgatataagtggctataccaaataaccaattttcagtgtagatgcaatggccttctattggaagaaaacaccttcaaagctttgaagagcaggttgatttcttgttagaaactagtgcagctcatgactttatgttgaaactaatgctcagcaaccattctgaaaagcctaggacccttaagaattatgttcaatctactatttctgtgctttgtttttggatggagtcttcctctgtggccaggccggagtgcagtggtgcaatcttggctcactgcaacctccacctcccgggttcaagcgattctcctgtctctgcctcctgagtagctgggactacaggtgcccaccaccatgcccagctaagttttgtattttcagttgagattgggtttcaccatgttggtcaggatggtcttgatctcttgacctcatgatctgcccacctcagcctcccaaagtgctgggataacaggcatgagcccccacgcccggcctctgtgctctgtaaatggaacaacaaggcctgtgtgatagcacatctgtttacagcatggcttactgaatattttaagcccactgttgagacctactgctcaggaaaaaaaaaaagattcctttcaaaatattattgctcattgacaagcacctggctacccaagaactctgatgaagacgtacaaggggattaatgttgtcttcatgcctgttattacaacatccattctgcagcccatggatcaaggtataattttgactttcaagttttatcatttaagaaatacacttcataaggctgtagctgccatagatagtgattcttctgatggatctgggcaaagtaaattgaaaccttctgaaaaggattcaccattctaggtgccattcagaatacttgtaattcatgagaggaggtcaaaatatcaacataaacaggagttggcaagaaattgattccaaccctgatggatgactttgagaggttcaagacttcagtggaggaagtaactgcatatgtggtagaaatagcaagagaactagaattagaaagggagcctgaagatgagactgaattgctgcaatgtcatgatcgaacttaaatgggtgaacatttgtttcttacagatgagcaaagaaagtggcttcttgagatagaatatactcctggtgaaaatactatgaacattgttgaaatgacaacaaaaggtttagaatattccatacatatagttgatgaagaagtggcaaggtttgagaagtgtgactccaacgttcacagaagttctactgtgagtaaaatggtaccaaacaacatcacatgctacagagaattctttcatgaaaagaagagtcaattgatgtggcaagtttcactgttgtctcattttaagaaactgccacagccactcctacctttagcaataccactctgatcagtcaggagacatcaactttgaggcaaaccctccaccagcaaaaagattacaactcactgaaggctcaggtgggggttagtacttttgagcataaggtactttaaaattaaagtatgtatattttttagacataatgctattgaatacttaatagactacagtataatataaacataacttttatatgcactggaaaaccaaaaaattcctgcgactttatttattgcaatattcactttattgagatgatctggacttgaacaaattcctctcagatcactcttctcgattaatagatccatttttttaaccttaggttaaaatgagtttgctcatctttcactttttccacctttctctacctgacatagcaggtttagatgggaccagtttattgcaatattcactttattaagatgatctggacttgagcaaattcctctcagatcactcttcttaattaatggatccatttttttaaccttaggttaaaatgagtttgctggtctttcactttttccacctttctctacttgacatagtaggtttagatgtggccagttcagatgcaatgtcctttgtgtttccttctatccatatttccaacgggatgggtaagcttgcttttctctctgggcttcttctttggcttgtgtgctgtgacttgcccaagagttacaaagctgtgggctcatatgttctccccctgtgttcgcctagggaacaaagcctgcctctttctccatttggttctagatgtcccatagaaagcccccctcagaacgggtgcccaagaaatgtgtgttaagaagaaatccgatgaataagaacagcttcaacataccccactgcacatctcaaagttcaagacagaaaaattacaacagtcttatttgagagattaatggattagaaaagcttatattatatcttttgtgacattttagaatattccagggatcatcatatagattacattgattgatcaagatgactatcctatgaaatcaactgcaattaactatcctcatttgaaagatgaggatctggaggctctgagaggttaagggttattcaagatcacatagttaatattttgtggtgccatatcacctgttctttctgtcacacaacttagtacaagagaagttaagagtgaaaattgcaggttttttttttttttggtgtgcagcataaatccatccatagcagagtcaaatggattacctgacactgacatgcccagtgtatgctaatgagaagctcaatcattattaatgcaaattataaccaaagactcactatgtcctttatctcaggaggagacatatgtaggacaaactctgggcatgaagctcagaaatttagagtatcgttctgcttaaactgctcatatattccattggagtttattggaaattattttttagggctcatttctgggttcacgttcagtgcactatcaatagcttcacagctgttttggagaagataagagaccgtccatcaggttcaatgctgctggtttgtgtcatttcctcttaggaaaacatttcctcttaggaaaattgcccagaaaaaaagaaacctattcccagggaaagttttaagaaattattcatactcttggagggtctagaagatacctagtgatgctgtctgctctggagctgcacacacgtgagctatgcagccaggagggattgatgaggcacattagggctagcaatgaactctgcatgataagtctagaatggcagtgcccttctcctctcctttcttttccctccacccaccagctattccagatcctcctaggctaaaggacaatgaagatctcagcctggggcaaaataatgcaggaggagcttgaacctaccacagggatccaggatgactcctggtgagaaaggctgctttcaggaatgacagacatcttacgtgtatcacttggggaattcattgattcagtccttcagactatgcctcaagttccttaagggaggtatctgagaaaatgacaaagcaagctacttaaaatgtgttcatgtggtggaaaatgagctcgtacctttcttcccatctttatctctctcaaacagagggagatcataaacacaatgaattcaacattcaaacttcagagagaagaataatgttctttcaatgtccagcaggacccctggtataaaattgccatgcagcctggtgtgacattaacccacatagactaaattggaggcatcagcttcaggtgttcatgagaaggacaggtttgctttttgacagattaggcaaagtcatagggcaggggtggtgtccatgttgctttgggtgttccatgcattttgtgagggctgggacctgcatgtgaagatgtaattggaaactgaagattcagtcaggccctggggtcagaatccccaaggcctttggcaaattctgcctcctgtcctgcctgtgtgaccaagtggttttcgctaaaaaggctgtgcaatgccacagggatcacctccagcaaggagattttcatggcagcaaagaacatggatatatcttgagtttcttcttatggaagggaggtcaaccagacctgtagtggatacttttagtgtttcacctcgaatcttttttggaaggttgagcctgttccttctgtgagtgccagcagctaatggggcaaggacactgccctccatggagggacctgcctcccctggagatgacccccatcttatctcttccgcagcccacagccagcaactgactcacatgggaatgtcaaaggcagcctctttgcctcagggtgggatcaaatctgtggggccacttggaatccagagttcttgcgggatcaggctggagctagtttccacctgataccatattcttgcttagcacgttttccctgcctcactctatttccctcattctgcttctcctgaggttccccctccacccaagaaaccatttgtgctagagtcctcagcttaagttctgtttgtaggaatcccaactacaggcaagaaagcttcgcagtcaaacacaccacaatggagacgcagcttccaatgagcctgccctagccctagaacagcaaagggaagctgggaagccatggactttcaagttgcagaaagcaatgaggcacagcactgagcaccttggaagcacccaataaatcctggaggtctgacttgattgataaagctccatattttcacatgcttggttatttgcacgtcaacatttctgttctcctctaagtcctcagggaccagtctctgcaaggacaattaatttcacttgcttaccagatttaagcacaattagtcactgggtttgccattagttaatggcaggcagagctagcagaaccatcatttttatgtttggggtagtaataaaataaataaggccttaagagaaaacctgaccctacagtggctgctgtttgcagatgagctgagaaattaatttttcagcccctgtatttggactgaagattctaaactctcttgatgatttgggaatgtgtgacagagctcctctgataaactcaaaatggggcaaactgatccccaaaacagccagagcctccttagtgttaagcctggaatctatttctaaaacaaaatctcaagggccaaactattcaacaggataagagataaagtgggactcaggtaggtaagttttaattaagaccagggtctgggtatgagggctgctggcaggccaataatgcacacccagccagcatgcctggcacacagtggccagcaagcagtgggaaaagggacaggcatgaggcatccttgtgattcagttgagggggagtagggatcagagctcacttagttcctggatgcatcaatatggggaattgagaagagagaaaggaaagagaaacagtaacttcaatggagcacctatcatgtgctagatacattcatatagttgtctctattaaccttttcaacagcgttgtgaagaagggattgatatttctatctaaaagccaggggaaacaaagctgagaagatacaaacctacatcagatgaatacccaagtctacatgattttcagcccaccaaggttgtactctcaatacttttctggaattgtagttagatgggaccttccctggagagaatggagtcgtaagtttgaccggagtctcccctacgaagtagtgtttatgagctgagcagtgagtgaaaagaggagtgttgaaggaaaataacctctaagaatattcacggaagtgagaaaagcatgcacaatggggggaggtgaagagagacacgctccattttgtagcctggtgagattaaagggaagtgagttcatagagtgtatcttgagacactagggacagacatggtgccagaaacgccccagacaccaagaaagcacctgtgtctacagaagaagggatttaactggcacatgtacaggcaggatgctgtatctcattctttagtgacttggcactaaaaaggcaggaatctcatttcttcaccaccagcattctgcccccaacaaccctcagactctaagttggccaaagctaaggcaagacatggggtggccttcctggctccctaagaagcatttcaattgaggcctcagttgagcaggaaggtcagggttctgctgggaggaaaggggaatgatcaccttcctgctcgacaaggtgccccaggagaaaacctcaactgggatgcttcagcagaggagtgattttttgttgttgttgatatcctgaaggaaaagaccaaaggctggacataattccctaatctctcctccaccggcctctttcaaagacacattcaaagagaattctagctctgggctgtggttctcttcagccctttctcatgccctaggagcagaaattgttaactgggaagagtggacttccccaaggtccaatacccaaagatgaggtctaaaacttggctgctgtagttggtggcccagggagaggtcccatcccctcatgtggtctctgcaccatatctcttctctacttgagtctcaacattattttcattttctctagtctccttagagactttgccccatacatcagcccttctttaccttgcctctggctaccctctgtctaaagacatgataaggtccacctcatcctaaaataattactgtaacatccagatctccctggacacctcccttagctctgccaccaccgcctctacaatcctcttctctccccttcctctcaccattaaagttctcaataataatatgccctcacttctgcaactttggtttgtactccttgtaatttaaattgcaccctgagcatgcaactaaatttttctctcaatggataaaggagagggaactaaactcagccaagtcccacgctgctgcttaacatgcattattataggtaatctacacctgacataaaacagactctcaaacaacactgatgatttaatttgtcatttaatccagtactctttctagcttcacatgccccatcacatctagggatagaacattcttctgccataactaccatggcagtaattctcagtggtggtgggaggcagagtttcagaagcctccagggaattctgcttatcaaccccagacagacacatccttgaaatacctactcattggaatagcacagcatctcagctcccaggcttctgaccaagctcccaaaccatggatctctctcatcttcctctgccatacctaaaatatgactcctgtcgaaggctttgtctgagccctcctgatttctcagtctacagtatatccagtaggaattcactaactcccacaatgaagaatgcatatttttgcagcagactttgaaggctctgagtttagcagccctgacttttccccgaccaacaggagcacatttccagctgttcctcaacccaacctaaatggatctggggaggcctgctggaggagggaacaattgaattgacacttgcaggacagatacagatatcaatgccctggagaagcagaggactagggttttccaggcagaaggaacaaggatgcagaatataggatatggaggtagggagccctggtctgttagactaaatgtcttactggcaggagaatggaagtggatgaggcaagaatgtttccagagaaaataccatcctgctagctgagaagaagcaacaagaagctagtgataaaaccaaggcagaaagtatttaaaaaccaacatcaggacccatgacaaaccatctgtaacagtcagtggggggatattaacacactccagcgcctgccctgaggcagccccaccccctgcaagatgcagcatgatagaattatgcaggcagtgaccatgatgggcctagggagaggtggtggccagtgagtgcaggcagtcacggaaagagtcctgaggccgtgggcagggcatctcaggctcctatgcatgcagcacagtcccacgtcaggcctatactaacaacctgctcctgcttttgatgcccaaggcttcctccagccattccaaggaagccctggagttcctgcaaaatactgaagggtaaacatgagtacagaataagtgtgtgtgcagtggcaggaggtgcagaatgaggctgcaggcagacccagaagggcccagcttaacaccctttgccctcctcctctttccaggtcacctcccaccagtgtccaactccaccagtaaccctctgctgtatttccttcctccattccagctgcccctggcgactacaccctcactccttccctagcccaggagtctacagcttccttctccagcctattcacgcagctcatcttcccaaagtgccacatgatcatggccaactcctgatggaaactctcatccatctgccattcagcatagaaatccctgacctaaaaaatagcagatgctggtaaggatgcagagaaaagggaacgcgtatacatcattggtgggatgtaaattagcacaagccctatggaaaacagaatggagatttctcaaagaactaaaaataagactaccacttgatctagcaatcccactactgggtatctaccaaaggaaaagaagtcattatatcaaaaagatatgtgcactcatgctcatgtttatcacagtactactcacaatagcaaagatacggaaccaatctaaatgcccatcaacacgggcattatctttgaccagataaagaaaatgtggtacatatacaccaggaactactactcagccataaaaaataataaaatcacttttgcagcaatgtggatggaactggaggtcattatcctaagcggaataactcagaaatagaaagccaaataccacatgctctcacttacaagtgagagctaaatagtgtgtacacatgggcatagaaagtagaataccagacactggagactcagaagggtggcacggggctgagggaggagaaattaccttatgggtactatgtattctatttgggtgatgactacactaaaaacccagacttcgtcactacgcaatatatccatgcatcaaaactgcacttgtactctctcaatctataaaagtaaaatttaaaaaagaaagaaatccctaatctcgtattgcaggccctccatgatgtggcccaatctcatgttcaagttggctccccccatgagccctgttctccacctaatctaaacccaggaaaagagcaaaggaactctgaatcgggttctctggcacctttttcatgtccaacattgcaccaacattttaaaatgtattatctatttttttctaattcaaacaacacctatgaagcagatattagtattcttcatttgtttctagaaaaataacaaagaaaagaaataggtttggaaaagttaggttgcccaaagtttattaattctcaaggctggagctcagacctttgtctgacagtctccacatcttctcttctttcccacgacccgaggcttccccagagttcactgtgggtccccacccaggtttaccccacatgcactgcctcttaacctggaatgctccatgcactgtcactttctaaatcttgcaccttcttcacagcccagcccctttctgccaccgcagctgagggtaattattccctccacaccaccttcagcccacgcacctgacacatcactccaggttgttctgctggcatttccgcatctctctcacttcccatattaaacagcaagctgcccgatggagggtcttttgcaaggaccacagtatatggcctgccctccccagacatgctcagcgcagtgtctgtgcagagtggatgctcaaccagagttgaaccaatgctggggtacctcaggcaattcacccaacatgtgcactcagtttcttccccggcacagcacatgcaccagcaaacactgagagagcacctgtcccacccctcatgtcttggagtgttcactgggtggggcaagcagcagacagcaacagatcctggataataagaacaagaaagacagacatgccttctcagaaccagctggcttctctgcagcaagggacaagggtcccagggaaggccttgcagatggaaggaaaaggcaacacgctgatatgagaagggtatagagataagtcccaagaccagatcttccaagagctgtcatataacagtgagaagtctcttcatttcctagatcctctgtttccttcagtgaaatggaaaaaaatgcaatccccacattccagagagttgggaagatgatatgagatttgtttgtaagacacttactatagagtctagtgcagtgtgcagcaattatggtctatgattagtagaccatagacctggtcatagaccatatgcctgttcaacaacaggccctccaaaaataggtaaatacataaatgaataaaaagccctgatttctgtggtgtcattactcccaccatagacaactttaccctagcaatgtgatgtcactgaattgtcaccagccagcagcacatcactgcttgcagatcacaaaaaattgccaactcactttgccactctctccacctccctataaacacagacaaacatctttggtaggtggaaaaataagctaacagctgtaatttccaactagggtgtggagaggagatggaggcctcagacacccttctccaatggaggccaaggccttccacaggcctgcctgtgtggcctcagcaacacagccttgggcagattgagtccctgtatctgatgtgcagccaagctcctggaatgtagctgcttggaaagaatcacaagcctgcctgttgtgagaatcctctttagatgtgcaagaagattcgccttctggcatccctccccagggaagatggcacatggctaggaagcctttcatttgtggtcagttttcactttccaaggatgtgaagaacatcctacatttctacttttgttgttgttgtttttgtttttcaatcagtacttaagtgatacccaattcccatggtgacagcctgggccagtagccctcgcactcagcttaccatcactctcagatacacagaaattataacagagcttccttctctgtctgtctgaaacttactcaccaagagagacctcactttctagcaagttctagaggcttgttataggcatgcagagaaaaaaaatagaaacataaaatttcactggacaaaaatgaagatgattatctcttacaggtggtttgaggaatgtgtgagtgtcaaagtgaatagggagaactccatgtctctctcagtgacaatatgccaaaacaattgacgagatctctatgccttaagagtggaaatttttaaaatagtgctctgaaaaagaaaatagaaatgaatcttcacaatactgttttagagctcttagatttggcatgggacataggcaatgccttgaggactggtgagctgaaacatggcactgtgggacatacaaaggtcatgaagtcaactttgaagcaaactgtttttctcctttcctcattaaaagcagcagttgtaaagaaaattgccatgaaatccttgtaactttagcttttcatgctcactggccatgaactgcattgaagaactctggtaaaatctgacctgagaataaaatagaaaacttaaatattcctataactattaagaaaaactaaatccatattttgaaacctttctacattgaaaacttttggcccagatagcttcactgtagtgttctaccaattatttaagaatgaaatatttccagtcttcaacacactcttacagataataatagacaatgaaggttttccctgtgataaagagtgtctaactgctcatctattttctctcgctgggcacaaaggaacactacattccacaacctttctggcagttagattacagccatgtgactagatgcaaattaataaaatatgggcaaaaattatgtataaaaattccagaacaggccataaagtgttatttccctttacgtggaaacttcagaaaccatccatttaatatgggagcctcacaatatgtgcagattctgaatatcttagtcatttttatgccaagggggcaacctaaactataatggactatgaagcaagtcagaattaattgtgttaagatattttggcatttaattgttaccacaaaatagcttagactaacttgacaaatatacatgcccctaaaacaatgtataccactatcataactttcataacaaaatctgataaaggtgataaaagaatgaaaaactaccagccaaacttgcttgtaaatatagagataaaaaccctaaacaaaatattaagaaaattaatatagcaattgtaacctgagtttctttcagaaatgcaaagttggtttaaaattagaactatctatgtaatttgttatattcatatattaaagtagaaaaaactataatcatcttcacagatatagaaaaagcattttataaaatgtaatattcatcttaagggaaagaaaatcctcttagcttcatagaaatgaaagaatttcttaacttagtaatggatatctgtaaaacatattaaacatcatcctaaatggcaaaatactaaaagcttttcctttgagagaagaaacaaaatgcataagtccaccatactatttagctcaggctgccataatacaatatcatagactgggtggcttaaataactgcaatttattttctcacagttctggaggctggaagtccaagatcagggtgctagcctggtggggttctggtgaaggttcacttttggcttgcagactgccatatcttcactgtatcccacatgagagaaatctctttctcttcttacaaggccacagtcattttgcattagggctccagccatatgacctcatttaatctcaattacttcctaaagactctgtctccagatatttaccacactaggggttagggcttcatcagatgagttttggggagagatgtaattcagtctacagcacccatgatagcttttattcaacattgtactggaggtattatttctttcattaaaagggggataaaatgctaaagattgtaacaagatcatgattttcgcaaatgatatgactgtgcacacagaaattccaggagaatttatagttaagttattaaaattaataagcctattcagaaaagtaactggatttaaaatcaatacacaaaatcaattgtttttccatacaccagctatataaatgtaaaacataaagtaaaatttacaagatatcatgaaaatgtcaaatgccttgtaataaatctaacacaaggtgtctatatctttacagtaaaaacatgagataagttaaattgagaaaaagaatgcttcaataaatagactaccaattacatgggtcagaaaactcagtattataatgatgtaatttatttccaagtcaatctgtaaattcaatataatgaaactatctatggtaatttttggtaaaacttaaaacactgatccaaaaacatatatggaaatgaaaagatccaagagtaaccaaaatactcttagagacaaactaggttggagacgtggatataatagttacatagatttactaggaagttaaataaattaaaacagtttggtattttacagagatagacagaccaaagggagagaaatagtaattctagaaacatgcctacatactttatttatgacaaagatgacactgtgctgaaggaaagcagtaattttctgataggatagcaatatagtgtatagaaaatgtagcagaaataaatatactattcatattaacaatacagatgttatgatacatagtgatgtatttaataaaaatgtgcaagacctttattgaaaaacaatataaaagtaactaaagaaaaaaaaactaaatggaaagatagatatactatgttcatgaatagaaaaacccatcgcataaaggtgccaattatccccaagtctattttgatcttgtttatgtgaaatataagaagctgattttcaatacatataaaagaataatgcttcaaggaagttctggaaaaaataaaaaagataagtgtgacaagcacaaaagtattatagtgcacagggaaaaacaaatagatcactggaggagaaaagaatgcccagaaggagtctcagttacatacacagcctgcttatgtgattgaagagatactggaaatcagtggagattgtcaaagtccatggactttacagcacaaaaagtaaacttgaatgcatacttgagccagtgattctatttcaaggtatgcattacaaagaacacatccatgtgttgttcacaagacatgtataggaatgcacactgtagcactgtcaatattggcatactggcaaaatattgaaacaatccaaatgccagtggtgaatagataaacatgatatggttgtatagttaaaataaactttactatatggtatctaaataaatggactagtcctatatgtaccaaatgttgattttaaaaggcaatacatagaagatttcctactatttgtaaattagatacagttcaatactacttatacacattctgaagatattaaaagtaagatgatacatatattaaatatatttctgatctaaaatatcaaagatattaagaaattaagagataaaatatttaaaataatcctatattttatttacagatgcatattatatatatttttgtttgttatattacttttaatttttttcacattaaagtgttttctacaaaacatacaaagatagttaatgagatgtgaactatgataaaaaatacaggtattgaacaagcactgaatctgtttacacataggacctaatatttatcaactctggatgattatggttacaaagaagaaatatacattcataatttttgtaacataaatataacaccaaacaaaaaatggaaagtaatacttagggaaataggaagctacttgtttatgtgtataataatcttatcttccacagtggagattaaaatacttgaacccgatagttgaaagtactgcaacttcttcagtttttcagatgtgactttataagtacagaataacttaggataatttaggaaccaatatttcttgtaataaaaaatattcaaacttcagcaatatctttagttttacttctattcattgttcctcaaagtcaagtaaaaaaaaaagtaatgattttattaagaacaggtttataagatgacactattttattctctagattacctctctctatccatccaaaaataggcagagccagacacctgaaatggttttctccaaactgaaaatattaattacttggagagagggaaacatgttagtaattgttattttttaaaatttgaatttgtatggtaagaataaaaatatttgcaaaaaaataatgtaaccaggaccaggcacggtggatcatgcctgtcatcacagcactttgggaggctgaggcaggagggttgctggagcccaggagattgaggctgcaatgagctaagatggcgtcactgtactccagcctgggtgacagagcaagactctgtctcaaataccaaaaaaaaagaaaaaatagtacaataattatattacaaaatatttaaggcaataaagtacaacatggcagaaacagagagtatgagacgagggattttaaaaagaacacaaacgaagtgggaaaagttcaagaacaatttaaggaagagcaggctttcacctggaggaaatatgaaatttcaaaaaacaaacaaacaaattgaggaactgaatgtgtgttttgggggagaggggctaacctgaaaataactggttcactgagagtgaaatgactgtgtttaaaagtgtggggaatacagtatatgatttcaaatgagggagttggctgtgattgctggtatgagaatagtgctgggaaatcccaggaaaataggattgttcagtctattaagtcaaaacagattcacagaggagggagcacaggttattgaatggaaaattcaagttttccaggaagatgaagtgagtaaagtattccaggatagaaaagtaaaacaacaaatgcaaaagcacagaaaggagacaacttgtgattgaaacatcaggtgagtgagaaggactgggaagggggaagccgtgaaggcaggcaaggctgtcacatcattgcctttggtgtctactgcagcagcttggacttctcacaggagatcacaacagactttctcttggggagaaaaggggctgctgggaaataacttgattagtcattaaaaagatactcagaaggtattgggtgaattttttaaaaagagacacggctggagtgcagtggcacaatcacagctcactgcagccttggactcttggcctcaagtgacccacatgccccagcctcccaaagtgcttgaattacaggcacgggccatcacacatgacctagaaatggatagatttaaacaccccccaaagcaggaaggaagctatctaggtgtgtgaacacctgcttcaaaaatgaaacaaagaggagactttgaggcatatttatgaggcattctgcatctctagatggcaaacgatgtcctgtgggaaacaaggacaggctggggttaagggtgaatgagtggccaggtggatggtggtgctcttccactaatgaataatgttggtagaatggtttagggtcgcgctaatgagctcagtgttgaacaagttgagcctatgtatctggcctggaccaggaccccacatgtcacaccttcagcatttggtggtaattgaagccttcggagtgggtgacactgctcaggaaccacagagaatgggctaagcagggagcaggatgtgtaagcctggaaatacacatcccctgtcctgtacttaagtggctgattattttcaggcagcttgtcaggtttcatttatcctcttggttttagcactttgttccaccccgttgatatcatttagaattttgattctatcagtcaacatattaaccatcccaggcttttcagtttaaaatgtctccgtcgagcacgcacaactctcccaacttcctaatacaataatcataaaaatgataaaatatcacaccatcattcaaaaaattacaactttgtagaatagcaaatgtgccatttctttataagcattttggaactggtacagataggctaataaggaaagagccaggaacaaaaagtcaacaagataagatgtaaatgggaatggttaatagaatgaattgcaagggaaaaattgaaattgctcaaatgaatccacatggaaagtagagaaaacaggataaattgtaagaaggacacatttcaaaaactagctctgaatccagaataaaataacaaagaaatggaaaaaaaaaaagcaataataaaaggtctatagttatagaggctagagaacacagcaccaccctcaaaaacattcagaagttgctgatatacatgcaaacaactatagtaaatattattaaacaaagctataattggaaaaaaatcctcaaatacaacaaaaaccaaaagatagcatggcaattgaaagaagccaccacattccaaggaaaaccaatggaaagaaacaaatattactggtacccatgctaacaaaaacctgtcaaaaaatcctgtaggaatattatttttaaaaggaggaggaaggacacattcaaaggaagaaaaataactcaggtcatttctctcttgtgaagtcttacatggtagagaatataaacttgaattctaccagtcaagttattcttcatatgtagagaaccagaaatgaaacaaatcttcagaaatgtaggagtttagaaaataaaatatctatgtccttttgttgaaatatctagtgaaagcacaattcaaccaatcaagagttaaactgacagtaagaacctaaatgcagaaaagctgtatgtaaaatgattctcagattttccaaaaaagatatcagaaggaataacacccaacttatcaacattatcttatggagaaaggttttaatacaccacatctatttgaactggctatgaattaaatctgcaataaaataatatgttaaaatatagtcttatatttttgtactttgatttgtgcatttttcttttgcttagatttaattgtctttaaagaatatgtacttttatagcaataaaatttacataaaatatatacatccttaaaattgtatattatctgtgaaattgattagtatgtctttgctctcttaatctaagcctgattactgttgaatacaatggttctaaggtcagcactttatgacattcaactaagcaataatctgccaagttaacccaaatatattttattaatgcactagggcagtttttaaccaattacaaatctatttattcatgtgccacattttcctttttatccacaggatcactatctaagaccaccaaacaatgtactgctgaaatcaagacataccaggtctatgaattattctgatttgccagtctaaaaagtctatcaaaaacaaacaaaaacaaattgaaagaggttagcctaactcaagatgatctgttcttcgggaattggtaccaccttctagggatcactttttcctttctaagtgttcacagatcttcttccaaataaatcatttgtaaatgttggcacagttgcacatcaaattcactggcatatcaaataaaaaaattcaataattcaatggtttctcaaaaagttagatataaaaccatctctgatactctaataagccattctgattttcaaatattatcagcagtgcagacacacacacacacacacacattgttccagagtcttggaatagttttctaattgaatctggaagcaggcttttacaaggcattaagggaaagatagatttattcatttattgaggaccaagtgaatgccaacacaatgctgaatcatatgatgtctaatttaattaattgacataatccaccactgaactagttaattctattttggaggtgagaaagctaagactgagatccataaagtgaccatctaaaatcacacagccagcaagccactgtgctaacacacaaaaaaatgaaccaatggtttttacatgacagcagtgattctgcttcacattattgtctgttaatgccacccagtattccttaaacactgacctcctctgccaacgagagtttagaaagcaattctgccataacttttgttttctttagcatttttcaccaattgaagttcattctttcacttggccctatttacacacacttttgagtgaatatccatgttttgttttattattctgtgcattacctctcaatttccttgcttgtctcttacccctctgattccccagatcctcgtagtgagcccctggcatctgcctgctgtccctcctcactgagataatttgtgattagaccactcacactgcatgatttaaagactttcccctcttcaatcatagctgtggacctcaaaatgttcctttttctgaaaaatttggaattctgcttacctgaagaattaactaactaccaagttgtgcctaactctgccttctagttcgcatctattacaatcaatttcaataagacagtttctctttctcccaaatttcccactacttgcattatcaacaaattattttctttccctcatttttaaaatgtgaacagctctgcatggccccaaatgtgccatacatattctggctgttttccaagacacttgccctgggcttgtcagaagattgatgggtccacagtcactgaacaccaaaagcaatgaccagctcatctaaactaccttgtttccacctcagaggtttctgcagtcggggtcccactgcacactgggagactgtcactgtagccctctcgatagttctacatcacactgtgcaatgagctgccaatggggcagcttgttctcagcagcagttatccttcttggtggtttcgtcagtagctccatttatgcagctttctctctacatctattcttttcttctcacagctttcacagtatgttttcattattatttattcacctactggctctaggagatctgagtctctcaagctccactgtccgttcatttatgaatttacccaaccctactatgtgctaagctgagtgccaagccatttgtttagcatggagaactataaaatgaatggaacacagtttttacactcagtgaaggcacagtttaatgaaagacagaacttataaatgaagagtaaaaattcaattaaataagttcagtgatagaaacaaaaggagaggatgggtgcagtggctcatagctacagtcccagcactttgggaggctgaggtgggtggattgcgtgaccccaggagtttgaggccagtctgggaaacatggcaaaatctcatctctataaaaaaatgcaaaaattagccagttgtgatggcgtgtgcctgtggtcccagctacacaggagggaggctgaggtgggagaataacttgagcccgggaggcagaggttgcagtgagccaagattgtgccactgcactccagcctgtgcgacagagtgagaccctgttaaaaaaaaaaaaaaagaagaagaagaagaaagaaacacaaggaggacaaataaatagtcaaatttccaattaaagaagttatataggagctgtcatagaaaatcataagaaaaaacctacaaaataaacaaaactgaatcctgaaaaattcaaacacttgactaacaagctacaggaagtaactgtactttgagatattccccaaggcctagcatttgagacatcacagaacatgcatgtagctgtaaaggtaaggctgtaaaggtggctatgatcaagtgaagatgctttgctaagaaagctgaattttaatctgaacactagaactactagagatgaataagcgatgactgaccttatcagaatttattttacaaagaattttgtacttacaatatggagaaagatttgagggagtgaaaagaggagagaaaaaggtaagtcaggaggttggtataataaactaagtagtcatcaagataataaactaagtagtcatcaagacatagaaatcacatgtatttgagagatttagggggtagaatggatagactctattaacagagtagttctggggtgtatggagcaagtggatatttagaattatcccagtttctgcttagtcaataaaatatttggggagacggagagtgagatacataggtagaacatagagactttttgtacagtgaaactattatgtataataccataaagatggatatatgtcattatatatttatcaaaagcaatagaacatacagcacaaaaagtgagtcttaagtaaactaagaccttaagttaataataaggtatcagtattggctcatcaactgtaacaaatgtgctacacaaagatgttaataatatactacaaggctatagtaaaaaaaaacagcagggtactggtataaaaataaatacacaggtcaatgaaacagaatagagaacatggaaataaagccacatatctacatccaactgatctttagcaaagtcaacaaaaacatgcactggggaaaggggacacttttcaataaatagtgtggggaaaattggattgccatatgcaaaagaatgaagttggacccttatctttcaccatatacaaaaatcaactcaagatgaatcaaagacttacatgtaagactgaaactacagaaatactagaagaaaaccaagggcaaaccagacattgatctaggcaaataatttatgtctaagaccgcaaatgcgtaagcaacaaaatcaaaagtagacaaatgggaattaactaaaaagtttctgcaaagctaaagaagtagtcaacattgtgaacagacaacatgcaaaatgggagaaaataaatatttgcaaaacatgcattcaataggagactgatatccagaatttacaaagaactcaaattactcaacaacaaagcaaagaacctcattaaaaagtgggtaaaggaaatgaacaaacacttttcaaaaggaaacataccaacgatcaacaaacctgaaaaaatgctcaacatcaccgattatcagagaaatgtaaattaaacctacagtgagttaccatcttacaccaatcagaatggctattactaaaatgacaaatgtaacatgttggggagcatgtggagaaaagggaacacttatacactgttggaaggaatgtaaattaattagtacaacatctatggaaaactgtatggagatttctcaaagaactaaggatagaactaccatttgatcccactactgaatatctaaccaacggaaaacaaatcactatatcagaaagataactgttcactgcagcactgttcacaatagcaaaaatatgaaatcaacttaaatgtccatcaactggtaactagataaagaaaatgtggtgtgtatatatatatatatatatatatatatatatatatatatatatatatatataatggaatattattcagccataaaaaagaataaaatcatatattttgcggtaacactgatggaaacagaggatattaccgtaagtgaaataactcagaaacacaaagtcaaattcctcatattcattttagttataagtgggaagtaaatgataggtacacatggacaaagagagtgaaataatagacactagagagagacttggaaaagtgggagggtgggagggaggtgacaatgagaaattacttaatgggtacaatgtacattatttgagtgatggtaagactaaaagcccagacttcaccactacacaagatagccatgtaacaaagctgcacttgtaccccttaaattaatacaaataaaaaataataacaatagaggaaagtggagggaagagaagatgaatatatgagaactctactactttccagtcaatttttctgtaaacctaaaactgtttaaaaaaataaagtctactaaatttttaaaaacatagaagataagagaaatactaatttgggactttccagcaccttgaatatgtcaactttaggttagtcctcaatgagagtcatcttttcaacagtctatagagtaagcctgtggaaatgctgtctcttgccttccttaagaactcagcgtctactgcagaaggctggactcaatgcccttgatgtttctttgacaaccagatgctgtagttctggatgtgacatgagagaagtgggtatgcacccatcatgggagttatacaacttgcttgcccctttggaacctagctttcctgaattatataattctcactactatattgtgtatgcataagcctgaacaggaatacaaattttacagccaggttgtgcatatggatgacttatcacagctataaaatgtggatgctatcaattcatgaatctcactgttcaaagtgaaacagtacataaactgcagactgcatttcacacaattctaatggatctctggatacaggaggaatagaagaataaaaagaagtaaaaaatcaaaagatgtggaatatctccaatttgaccttaagaaaaagatgtcctgtcaacgctttgcccagtaggatactgatgtgtatgatggacataaacaattgtcctcaatctaaaaataaataagaaaaaccaaaaccaaccaaccaaacaaacaaaaaaaacaagccagctgctctttgcatggcagagctgtaaagagcatgtaacccaaggaatagggagcacaaaatacatgaattcagaatttataagagacattcgtggcttcctagctattatggacacagctcagggatgcataatttgtcacctcccaagggtgtttattcatcttcagacatgtctgacaccaagaagggactttattttatccactgagctaagctttatcttgaactattctacccagtgttcctaattctttatatatggaccataaagcacaagtctgcctttagtaattaagtaatccaattaacatatgtatagggtatatatactgtcaggcactgtgctaagcattggttctacaataggggaaatacaaattcagtccttagatccatggattttattgcctatagatatgagtgcatgttaaacaaaagtaagcacataagtacataattgcacagtgtaataattgctatgaaataaaagtatagggtctatgacattaaaaaaaatagagaaaggtgatttaaattaaggtgtatctaggaaggccattctgaggaggtgacctttgagaaggatgagtgaaattggctaggtaaaaaagcagagagaaaggtgctctaaaaatatggactaacttacatgaagaagagcagaaaactattcatgatgttcaaggagcatacagaagctactgggagatgaaattaaatacacctagacagagacagcgcatgccgaatttccattttctcttatttttcttggttagtcttgcttggggtttaatacctttattaaaattaccaaataaccaactttaagctttgctaattttcgatgttattatatatattctaattttttctttcagattacattgaactaaacttgtctttatttttctctcctcttaggaaggaaactaagaatcctgaatttaagcaaaactctttttttgtttctaatataggcatttaaagctataaactttcctttaagcactattttagctgtattagataaacatttagctaatactttagctaaatatttattattgataatatttagctaatacttcagtaatattttagctacattatgttagttatatttcctgtgaagtttctagattgtttatttttattgatttttaaagtaattaattgtagggatagaacatgttatgtatgattttactctttaaatttactgagatttaattctatggctcaaaaactggttattcttggtgaatgtttcatgcacactaaaaaactgcatattctgcaattttggggtatagcgttccataaatgtcaattatgtcaagttagctgagggtattgtacagatttataaagccttaatagttttttgtttacttgctgtatgagtttttaagagaattaagttaaattttgactatattagatttttctacttattccactagatttgtcagattttacctcataaactttgttgctccattttgtgcataaatatttagacatgttttctctctggtgaatttgttccttttattattatgcaatgaccctctatcctctgtaatactctatggcataaagtccattctgtctgatattgatatagcctcaccagctttcttatgcttactgtttacatggtatatctttaccttctctctcaatgtatctgtgtctctttgtgtttaaaatgcttacatacagcatatttttcccattttatagttattaataatgagaagactggtcctgttcctttatcataacagggaagacctgttcctttattataacatgtagagaaatttacacaatttctttttcatgagtcccattaatatgaaccaccttcctttacaagtttatggtggcctgaaggcaagaactgatatgtagctccgttaaaatgtattttgttagatgcagccaatcacttcaggctattgaaattttatagatcattttttttctaaccagaggcactgctttccaaaaattaatgtggattaaaaacacttagagatctagtcatatacggattctgatccaggatatctgaggtgaggtctgagacttcacttatgccagcgatgctggtctatatggtccactttgaatagcaaggatttacagtacccactaacttgcaaagagtcattcagattgtctatgtccgaagttactaacttgaatggcttgatggtgtacggtgagtatgtgagggtataaagtcagcaggtgacaaaaaataaaaaaacgaataataccaagggtaatctggagagtgcaggtaccaccgaaaatatcaaatttacaaatttaaaacattgtgctgtcaaaaaaccaaggatgtcagataaattcagatcatatccaactgtttatgattcctgttcaatgtcactacccacatatcaattaaaagaatgaaaggctcacatgcaaaacggcaatgatccatgtataaacagaatttaagttcagtctccaaagactgatttatccacagtagccctgcccaattcatattttccacactttatccacaaatacatcttttaagaccttgacacaggtgttattaaaaatccatacatatttctgtttatcataaaatgttcacttatcaatgggcattcaagtatccaccatgttttttcaacctgatagctcattttttttctttttagcactgaatcatattccattgtctggatgtaccagagttgatgtatccattcacctgttagaagataccttagttgcttccaagttttgaaaattataaataaagcagctataaacatttatgtaaagatttttgtgtgggcatatattcttaattctttgggctaaataccagaagagtaactgctgtattatatggtaactgtatgctgtgttttgtaagaaactgcgaactgtctgccaaagtggccataacagcaatgaataagaccttttgttgcttcatgtcctcaccagcatttggtgctattggcgtcttggattgtggccatgttaataggtgtgtagtggtattccactgttgttttaatttgcattccctaatgacgtgatgttgagcatcttctcatgtttgtttgccatctgtaaatctttgataaggtgtctgttcagaatttttgcccaatttttaaacaggtggttggtatttttttcatagttgaatttttttgtttgtttgttttggggttttgttttgttttgttttttgttttgtttttttgagatagagtctcactctgtggcccaggctggagtgcagtgctgtgatctcagctcactgcaacctccgcctcccaggttcaagcaattctcctgcctcagctttcccagtagctggaatcacaagcatgcaccaccacacctggctaatttttgtatttttagtaactatggggttttgcaatgttggccagggctggtctcgagctcctgaccttaggtgatcctcccgcctcggcctcctaaagtgttgggactataggcatgagccactgtgcccagcctaattgttgagttttaagagttctttgtatatgttggataacagtcatttatcttacatgtgttttgcaaagattttcccccagtctgtgacctgtcttcttgttcccttaacaatgtctttcacagaagtgttaaattttaataaattccaacttaacaatgttttattttatggatcatgctttcgatcttgtattaaagaagtcaccaccaaacccacggtcatctaaattttcagtttattaaaagacttttaaaaataataatacaaaattaaaaatcagaggcttatagtaaattttctattaataaagtttatttctttacattgagataattggaaggaattctacctcaggataaattaggcttctggtgaattcagtctttttattttctcctctgaatctgtgcagatttgtggacacaagacaaatctctaattatagattgcctatctttccttagtttaacgcaataatttatctgttcaaagtattcgcttattttagtttacaaatgtgatgtttccagtgaaaatatgagcaaacatcttaaattgcagtttataccaacatgcctattttacatatatggaaactaaacatcagaatagtttctaatgccatccagctatgtggtgacaatttcaaaatggagctgcctacttcctagactacaatcttctctcccacatcacccaggcatgctggcgttcttcagcccaggactccaaatctcagagctgttcctttgactatgaaggactttttcaacaaccgtaatgataatatctagcagatgtatggccctttctatgtgccaggtaactttataaactctaacatagataatcttcccaataagcctgtgagatagttgctattcttatccctacatatagataataaaagagaaaaacagacaggttaagtgattttccaagattacacaggtagtaagtgagagagaaaggatttgaaaccagtcagtcaatctcctgtgtctatgctcatgacaactatgccttgttgtctttcttagtcatgccactgtcctcctgccttccaacctgagcctctgggccaaatatgatctttctgaatgtaggatgctactcacataggatttttaaacaaagtatttcctaaatgcaaacattaatgggtttaatgatgcatttcctaaaggcactattaaaaggtgcctgtagtgttcaacctcatgccaatgctgcctttttcaaatgactctgctgtcatcattatagcaggtaaacatctattagtaattgtaaaggaaatgaaagtaattacagcagcttgagactgcttagtgaacaaaaatgagatattccctcctcaatgaacatacctcatactcaaccccaaagaaaaaggtaaaaattgcttaatgtaattgataagtgaatctctgctctttagaagcagagatttagatttcagttctcttggatgctggcattgtccatgtcttttaaggaatgtatagattcctaagactaagacagtaatgatgaacatttatatggacagggtggattgcaatcattattgaatggttttatattaggttgaaaatttataagttgaagataactaagaaaatatgtttataaagagagaacagatattcatccttactcttttcagatacctactgaaatgaacaggccattttttaaaatctggggcatcatgtatcatgaaccagggaaggctgctacctacttatttaaactctttgggaggtttctaggggagaaggaaaaaattaatgggatacagcaatgggagattcaaattcttctcactttgaaaatgcatcatctccgtggatttcttcttatatttacagagacaaagtaattcagagcagtaacaacggaaaatgcctaggttcctcacagctctgctgggtacagtatgcagaaaccctcatttaccagcatttttctctgaacaatagtaatttgtcagtaaatagcagagaatatggacgccaagaaaaaaaaaaggttacaaaaagttacacagtggtttctcttactgttgttgaggctgtatcaatccgaatgctagaaaatgaaactttgtcactggggcaaaaaactcaaaagaaaaaattccactaaggcacagttttgataatggggatttaaatttatatcacagtctccacctgtactcacaagcccaggttaagacttgaaagggtgattctaactgcatccagatgtactattaggaaatccaaagagaatcaacccacctgtttatggaaagagctctccacattcaaggaagagtaaactaaacaaaaactgattattctaaaggaagtaactcaggaatgaaaaaccaaacatcatatgttctcactgatatgtgagagctaagctatgaggaggaaaaacataagaatgatacaatggaccaggggacttgggggcaagggtgggaaggggtcaagggatagtaaagtgcagtgtataccgctcgggagacaggtacaccaaaatctcactaatcaccactaaagaacttacttatgtaaccaaacaccacctgttccccaacaaccaatggggaaaagtacatgaagatatttccaaattagaaaacaacaacaatatggagacataaaggaagatatcattatgaaagaaataatacataaatatatttacataatattgtgttaaagatactaaagaatatattgttagaaaagcatatgctaaggaaaacaaagccaaaattttaaaaatactataatttactacagcaaggactctttataacaaaactataaaatgaaatccataaaacattggctgagaaatgaaagaagtactagcagagtcaaagcaagaaagaatgaaggggaaataaaaatatataagtagaacttatatagtcattaatattgctaaaaggcatgtgaaaactaaagaaaatctaatctgaaatatgaaagacaaaccaaggaactccccagaatgagcaggaaaaggaaatgaattgaaaatgatcagagaatgtgacagatgtggagtaatcataataccaacatatgaaaaatcaatgttcctgtaaacaacatgcaaataaatgggatataaataataaggaaatatttaatagatgacaaaattattgaactaaagtgcaagtttctgtttgcatatacaaagacctcactgaatcctgagaaaaattaatggcatatcaaccaactccggaagtttttaagttgaaagacattagtaaggataactacaaaggagaaagcacaagagaggagaaaaaagtggaagaggaagacggacaacagaaaaaggaaaaggagaacaaaaagagaagaagaaaaagagcagtatgaggataaacggaggcagagaggagagatgagaaaaaagtggaaaaggaaggggaggaaaagaaggaagaaagagaaaaacaggcatgtggtaagtgagaagaaaaaaggggaggagaaggagaaggaaaagaggaggaagacggtgaaaaggaaagaaagaggaagaaggggagcataaggaaaaagaagatgaaaaaatgaaccagacagaaggagaaaggaggaggaaataaggagatgaagaaaagaggggagaagagagaaagttgtgagggggtaagagagaaagtaaaagaggagaggaaaatcaataggtgaaagtttctccattgtatgacacacaggaagaaggcaatcgagcaaattctaaacaatattagagaggaaagctgtgacacaagaatattatatacagatatgttttaattaatgtataaaggcaacagaaaatgttctcagatatgctgtctcagaaatcatactacttattatattgctcaaaaagctactccagctgataaaaaatccatcaaaataaagaaatgaacagcggctaaatcatagtataaagaaacattcaacaatcattaaaacaattggagcatagaattcagtcttaattgtaactatagatatggatgggaaaaaataaaagaatgtgaaaggcaaatatatatcttagagacgccatataggatgttaagaagaaaaaaggaaacatagtaaactgggtcgaagattctgtaaacaaagattaagtaggaggaagaaggagaggaggaaaaaaggtattttagtattaccttacataaggagagatatgaatatatagtttcactgttaattctgaaagagaaatggagttgcatgtatttttaagcctaaagaaaaccactggagattaaaagaaaatgcttaacttcaggtaggaggtaactatagtaataataatggtaacagaatgctaaacaccataaaaaatttgaaatgcacaagtggacatgagaaaaataaaatcatatatttatattataataactatcgatagttaaaaattctcctttaaaatacaagattacaatttggcatgtttttgcagtggctggtactggttgttcctttccatgtttagtgcttctttcaggaactctttagggcagggctggtggtgacaaaatctctcagcatttgcttgtctgtaaagtattttatttctccttcacttatgaagcttagtttggctggatatgaaattctgggttgaaaattattttctttaagaatgttgaatattgcataaactaatgagcaaaataaccagctaacatcataatgacaggatcaaattcacacataacaatattaaccttaaatgaaatgggctaaatgctccaattaaaagacacagactggcaaattggataaagagtcaagacccatcagtgtgctgtattcaggaaacccatctcacgtgcaaagacacacacaggctcaaaataaaaggatggagaaggatctaccaagcaagtggaaaacaaaaaagggcaggggttgcaatcctagtctctgataaaacagactttaaaccaacaaagatcaaaagagacaaagaaggccattacataatggtaaagggatcaattcaacaagaagagctaactatcctaaatatatatgcacccaatacaggagtacccagattcataaagcaagtccttagagacctagaaagagacttagactcccacacaataataatgggatactttaacatcccactgtcaacattagacagatcaacaagacagaaagttaacaaggatatccaggaattgaactcagctctgcaccaagtggacctaatagacatctacagaactctccaccccaaattaacagaatatacattcttttcagcaacacatcacacctattcaaaaattgaccacatagttggaagtaaggcacgcctcagcaaatgtaaaagaacagaaattataacaaactatctttcagaccacagtgcaatcaaactagaactcaggattaagaaacttactcaaaaccgctcaactacatggaaactgaaaaacctgctcctgaatgactactgggtacataacgaaaggaaggcagaaataaagatgttctttgaaaccagtgagaacaaagacacaacataccagaatctctgggacacattcaaagcagtgtgtagagggaaatttatagcactaaatacccacaagagaaagcaggaaagatctaaaattgacaacctaacatcacaattaaaagaactagagaagcgagagcaaacacattcaaaagctaacagaaggcaagaaataactaagatcagagcagaactgaaggaaatagagacacaaaaaacccttcaaaaaattaatgaatccaggagctggttgtttgaaaagatcaacaaaattgatagactcctagcaagactaataaagaagaaaagagagaagaatcaaatagatgcaatgaaaaatgataaaggggatatcacagaaatacaaactaccatcagagaatactataaacacctctacacaaataaactagaaaatctggaagaaatggataaattcctcgaaacatacactctcccaagactaaaccaggaagaagttgaatctctgaatagaccaataacagcctctgaaattgaggcaataattaatagcttaccaaccaaaaaaagtccaggaccagatggattcacagccgaattctaccacaggtacaaggaggagctggtaccattccttctgaaactattccaaccaatagaaaaggagggaatcttccctaactcgttttatgaggccagcatcatcctgataccaagcctggtagagaaacaacaaaaacagagaattttagaccaatatccctgatgaacatcgatgcaaaaatcctcaataaaatattggcaaaccgaatccagcagcacatcaaaaagcttacccaccatgagccaccacttgggcttcatccctgggatgcaaggctggttaaacatatgcaaataaataaatgtaatccagcatataaacagaaccaaagacaaaaaccacatgattatcccaatagatgcagaaaaggccttcaataaacttcaacagcatttcatgctaaaaactctcaataaattaggtattgatgggacgtatctcaaaataataagagctatttatgacaaacccacagtcaatatcatactgaatgggcaaaaactggaagcattccctttgaaaactggcacaagacagggatgccctctctcaccactcctatttaacatagtgttggaagttctggccagggcaatcaggcaggagaaagaaataaagggtattaaatcaggaaaagaggaagtcaaattgtccctgtttgcagatgacatgattgtgtatctagaaaaccgcatcgtctcagcccaaaatctccttaagctgataagcaacttcagcaaagtctcaggatacaaaatcaatgtgcaaaaatcataagcattcttacacaccaataacagacaaacagagagccaaatcatgagtgaactcccattcacaattgcttcaaagagaataaaatacctaggaatccaacttacaagggatgtgaaggacctcttcaggaagaactacaaaccactgctcagtgaataaaagaggatacaaacaaatggaagaacatgccatgctcatgggtaggaagaatcaatatcgtgaaaatggccatactgcccaaggtaatttatagattcaatgccatccccatcaagctaccaatgactttcttcacagaattggaaaaaactactttaaagttcatatggaaccaaaaaagagcccgcattgccaagtcaatcctaagccaaaagaacaaagctggaggcatcatgctacctgacttcaaacaatactacaaggctacagtcaccaaaacagcatggtactggtaccaaaacagagatatagatcaatggaacagaacagagccctcagaaataatgccacatatctacaactgtctgatctttgacaaacctgacaaaaacaagtaatggggaaaggattccctatttaataaatggtgctgggaaaactggctagccatatgtagaaagctgaaattggatcccttccttacaccttatactaaaattaattcaagatggattaaagacttaaatgttagacctaaaaccataaaaaccctagaagaaaacctaggcaataccaatcaggacataggcatggacaaggacttcatgtctaaaacaccaaaagcaatgacaacaaaagccaaaattgacaaatgggatctaattaaactaaatagcttctgcacagcaaaagaaactaccatcagagtgaacaggcaacctacaaaatgggagaaaacttttgcaatctactcatctgacaaagggctaacatccagaatctactatgaactcaaacaaatttacaagaaaaaaaaacaaacaatcccatcaaaaagtgggctaaaggatatgaacagacacttctcaaaagaagacatttatgcagccaacagacacatgaaaaaatgctcatcactggccatcagagaaatgcaaatcaaaaccacaatgagataccatctcacaccagttagaatggcaatcattaaaaagtcaggaaacaacaggtgctggagaggatgtggagaaataggaacacttttacactgttggtgggactgtaaactagttcagccattgtggaagtcagtgtggccattcttcagggatctagaactagaagtaccatttgacccacctatcccattactgggtatatacccaaaggattataaatcatgctgctacaaagacacatgcacacgtaattttattgcggcactattcacaatagcaaagacttggaaccaacccaaatgtccaacaatgatagactggattaaggaaatgtggcacatatacaccatggaatactctgcagccataaaaaatgatgagttcatgtcctttgtagggacatgaatgaagctggaaaccatcattctcagcaaactgttgcaaggacaaaaaaccaaacatcacatgttctcactcataggtgggaattgaacaatgagaacacatggacacaggaaggggaacatcacacactggggcctgttgtggggtcgggggtgtggggagggatagcattaggagatatacctaatgttaaatgacgagttaatgagtgcagcacaccaacatggcacatgtgtatatatataacaaacctgcacgttgtgcacgtgtaccctaaaacttaaagtataataaaaaaaaaaaaaaaaaacacaagattagcctataatccccagcactttgggaggccgaggtgggcggatcacgaggtcaggagatcgagaccaacctggctaacacagtgaaaccccatctcaactaaaaatatgaaaaattagccaggcgtggtggtgggcgcctgtagtcctagctactcgggaggctgaggcaggagaatggcgtgagcccaggaggcggagcttgcagtgagccgagattgtgccactgcactccagcctggggcacaaagcaagactctgtctcaaaaaaaaaaaaaatacaagattaataaaatgggatcagaaatacaatacatgctgattccaagagaaatacctaaagcacaatgattcaaatatgacaaatacttttcaggtaaactcataagaatagtaatcaaaaagtgtcacaccaatattcaataaagtagatttaaggtatacaatgttaaattggaaaatgatcatttcatattggcaaaatattgagccctaatgaagttgtggcttacataagtgcataaagcaaaacttaagagaagatggccaagcatgtgcccaattcagtgttgtgtatgtgtctgggtaacacatacacccattgcagtcagtcacttgtttgcagaagcaattttcagaaaggttgtaatgaacaaaatgtttcagatattttggaggatagactgtgcagtgacctccacatatgaaataggaaaccctccagattacagggaggaaaattgcatgaagaagcatggtatgcccatgaatcacatggctcagcagattatcaaagaagactttaccacatttgattatataccatatatcaatgaaagcaacttgagagatttgaatagaaaatttcctcaagttaaaaactgcaaagctaaaattgaactacttgggtgctatgattcaccaaaacaacttgttattgaaaacccctgttaagggaatgaccctgactttgagatggtataccagcaatgtgtcaggtgctgcagagcattcttggaaaaggcccaccgaggctgggcttatgccctgctgcagccaacagtgacaagaccccacctgaggttctgcatttctcagtcagtgtgctaaagtgcaataatgttctacagcttgataccccagctcttccttcagttgacttactgtttcttatcttaaaaaataattgtagatggaaatcagttgtgtttggctgaacaataaataaaaatatttgattcagacagtttatggggtatattaagcattcttggactagttgaacctttcactttggcccaattacaagactagtggaacatacaacatatagggcaataaattaaagcaaaataaagtaaaacatcacttgaagacctatgtaacatctaagcccatcaagacttagagaatttagtctacctcttcaattaatttgtgtgaatagcttgatgaaggacaagtgccctccactcacctacgctgtctctctcttttagcccatggagctcatagtctggattagaattattttaattcactcacaccgatagtgcacaattgtatatttaaaagataagaaagagaggaaaatgtattaaatcaatatttggcacttttcatacctcttaatttttgtctaggttatttcatgaggaggaatatagaccatagctaaaccagaatagaagtattcctctttgctgttctatatgtctgttgagtgatatgtctatatttacatccacatgtaacccaaatgtcaaatacaaatttacttaggtgataaaaaacaatttaaaagttgaaaaaaaataccacaaaacattgctaaaaagaaattaaaggcacaaataaatagacatcttatgctaatggattggaagacttaatattttaagatggcaatactgttcagaatgatctactaattcaatgcaatctctaacaaaattccaatgacattttttgtagaaataaaaaaaactaaaattggtacaagatttcaagggacccccaaatagccaaaacgtcttggaaaaaaacacaattgaaggtctcacattttatgatttccaaatgtaattcaaagctatgataataaaaaacaatgtagtattggtaggaagacagatatatagaccagtggaatagactagtgatccctgaaataaaccctcttgggtatggtcaaatgattttcgatgagggtgccaagacaattcaaagaagaaaggatagtctttcaacaaatcgtaatgggaaaactggatatccacatgcagaaaaatgcagctgtacccttgccttacaccatacacaaaaattaactcaaactggctcaaagatttaaatttaacactaaaatcataaaactcccagaagaaaacatagaggaaagctttatgacgttagatttggcaatgaatattatacctaaagtacaggcaacaagagacaaagggataatctggacttcaacaaaattaaaaacttttctgcatcaaaagacactatcagcagagtgaaaaggcaacctgctaatagaaaaatatttgtaaatcatatatatgataatggattaatatctggaatgtataaagaaccccttcaacttaataacaaagaaaacccataaatgattcaattaaaaatagacaaagaacttgaataacatttctccaaaggagatatgcaaatttgacaataaacacatacaaatgcacaaaattttaaattgtggaaatgcaaaccataaccacaatgagatgctacttcacatccattgaaatggctatttaaaaaaacagacaaacaaacaaaaagcagataacaacaagtgtcggcaacaatttggagaaattggatttcttgtgcattgctggtgggaatgtaaaatgatgcagctgctgtagaaaactgtatggttattcttcaaaaaaattaaacataggattaccatatgatccagcaattttacttctgggtatatacaccgaagaattaaaagcaggcattgaacaggtatttgtacacccatgtttataacggcagtatttacaacagctaaaatgtgaaagcaatccaagattccactgatagatgaatggataaataaaatatgatatatacattcaatgtgatattattcagccttaaaaaggaaggatattcttacacaagctacaacatggatgaatcttgaaaccaagaaagtgaaatggaaataagccattcataaaaaacaattgccatataatgctattaatatgaggtacctagagtagtcaaatttatacagacagaaaatagaatggtggtttccagcatccagagaaaatgggaaattagttctttcataggtacagattattagttatgcaagatgaagttttctggagatagatggtaatgttgattgtgacaatgtgaatatacttagtgccactaaactatacatttagaaattcttaaaataataggttttatgttatgtatattttaccaataaaaatttaaatcagaataaacacataatttagtaatatcttctaatacctaaagttgttcttaaaacttgtgaagtttattcaacaagtaaaaaaataacaaatttaaaactaaatatagaagattatctactgaatcaattaaaagtattaaaattaactcctaaaaaagagcacatcaaacagttttataaaagaattaaggtcagggtgtaggtggaacagaactatataagagcataacttttgtatattattgaactaaagttggtattaatccaacacaaattgttattaagatgttaattgtagtgtcctgtgcaactactaagaatataataataataatacatatgatgtgtgtacatatacatatatatatcaagggagttaaaatggtaaagaaaaaatatccatttaacacaaaagaaggcagtaacagaaaacatgaggaacacaaatgatgtaagtcatatagaaatcaaatagcaaaatggtagagctaagtcctttcttagaaattatattaaatataagtggattaaacatttacttaaaagtagagattagcataatgatttaaaaaacatgatccaactatatgctctgtacaggtgcctcactgtggattcagacaagcacactgaaagaaaaaagatggaaaaagatattccatgcaagtggtgatagaataggttgactatacttatatccaacaaaatagacacatgtgtacatatacacatatgcactcaacattacaacacataaatatgttatgtaaattttgacaaaactgaagggagaaatagcgatacaagaatacttggggacatcaatgccccactttcaacaatggaaagatcatccaggcagaaagtcaataagtaaaagcagacttgcacaacaatatagaccagatggacctaacaaacatatacagaacattccatccaataaccacagaatacacattctttttcaactttcatggaacattctccaggatatattacctgttagaccacaaaacaagtttaacaaatttaagaagactgaaatcatatcaagtatcttcaccagccacaatgctatgaaactagaaatcaataaccggaggaaaataagaaaatttataaaatgtggaaattaaacacatccctgaaacaacaagtagatcatagaaaaaatcaaaagggatactaaaaaaaattcttgaggcaaataaaaatggaaacacaaacataccaaaaataataggatgcagcaagagcccctctaagaaggaagttaatgttgattaaaactacattaaaaaagaaaccttttaaatattctaactttatatctcaaggaactacaaaaagaagaacaaacgaagcccaaagttagcagaaagaggaaaataataaagatcggggcagaaataaataaaatagagactagaaagacactaccaaaggtcaatgaaactaagattggcttttttggaaagataaacaaaattggaaaacctttagctagactaagaaaaaggtgggaagtttcaaagaaaaaaaattataaatgaaaaagaagcaaccaataccacagaaatagaaagggtcataagagaacactataaacaatttttcaacagcaaactgaataatttcgaagaaatggataaatttctagaaacgtacaacctactgagactgattgctgaagaaatagaaaatctgagcatactaatagtgggtaataagattgaaacagtaatcagaaacctcccaagaaagaaaaatgccaatccttctcaaacacttccaaaaaaattgaagggaacactttcaaactcattttacaagaccaccattacacctttatatcaaagcctgacaaggaatcttcaagaaaagaaaactacaggctaatatcccagatgagcatagatgtgcaaatcttcaacaaaatgctaacaaacctaattcaatagcacattaaaaaaaaaaaaaacatatcccatgatcaagtggaacttacccccaggatgcaagaatggcttaacatacaaaaatcaagatatgagatacactacattaacaaaatgagggaaacaaattatatattcatctcaaaagatgtagaaaaatcattagagaaaatttaacatctttcatgataaaaattttcagcaaattaagactaaatgtcatgtaccttaacatcataaaggctatatatgaagcctatggctaacatcatactcagcagtaaaaagctaaaagcatttcctgcaagatcaggaacaaaacaagggtgcccactctcaccatatctattcaacatagaactggaaggcatggtcagaacaattaggcaatacaaagaaataaaagataaagaaaatgtgatacatatacaccacggaatactatgcagccataaaaaagaagaagataatattctttgcagcaacatggatagagctaaaggccattattcgaagcaaactaacagaggaacagaaaactaaataccacatgtttttacttataaatggaagttaaacaacaagaacacatggatagatacgagaggaacaacagaactgggacctatttgagggtggaggttaggaggaaggagcgtatcagaaaaaaatggctatcaagtactatgtttatctgagtgatgaaattatctgtacatcaaacccccatgacatacagtttatctataaacaaacctgtacatgtaccccgaacctaaaagtttttttttaaaaaaagaaataaaagacattcaaatcagagagaaagaagtaaaactgcatatatttgcagatgacgtgatctataaagaaaatccttgacctcaccaaacaaatgcaggaactaataatagtgcagtaaatttgcaggatacaaaataaacatacaaaaatcaggaatatttctataaactaacaacaacgtatttgcaaacaaatcaaaaaacaattctatttaaaatagcataaaaataaaattctggtgtataaattacaccaaggaggtgaaaaatctgtatgccatgctgtaaactataaaacattggtgaaaaaactgaagaagacacaaataaatggaaagatgtcctatattcatggattggaaaaattaatactattaatatgttaataccacccaaagtgatctatagatttggtataacccctaccaaaataccaatgacattcttcacagaaatggaaaaaaaatcgtaaaattcctgtgaccacaaaagtcctctgaataccaatgcaatcttaaacaagagaagcaaatctgaagacatcacactacctgatttcgaaatacagtatagagtatagtaattaaaacaatatagtattggcataaaaacagatatatagacgaatgaaagagaatacagcctagaaataaattcacacatttacagtcaattgatctttgacaaagttgcaaagaacacacaatggggaagacagtctctttagtaaatgatgttggagaaactgaatatctgcacacaaaagaatgaaaatagactcttatttcacaccatacacaaaaatcaactcaaaataaattaaaaacttaaatgtaagagctgaagctgtaaaacttccagaagaaaaaaagctttttgacattggtctggggcgtgattttttggatgtgacccaaaagcacaggcaacaaaagcaacaatagataaatgggactgaatcaaattttaaaatcctacacatagcaaagtaaacaatctacaaagtgaagagacaacttgcaaaatgacagaaaatcaaataatgtgctaatatccaaaatatataaggaaatcaaaaactcactaaccacaaaacaaatagtttaatttaaaaatgggcaaggacctgaatagacatttctcaaaagaagacatataaatgaccaaaagatatacgaaaaaatattcaacataactaatcatcagggaaatacaaatgaaaactacaatgaggtatcaccttacacctgttagaatggctatgataaaaaaaagacaaaagataacaagtgatgatgagaatatggaaaacagtatggcaatttctcaaaaacttaaatatagaagtaccgtatgatccagtgatcctacttcttaatacagagccaaagaagatgaaatcagtatcttgaagagatatttgtctgcactaccatgttcattgcagcattattagaaattggcaagatatagaactaacctttttttttttttcttttgagacggagtctaactctattgcccaggctggagtgcagtggcatgatctcggctcactgcaacctccacctctcaggttcaagtgattctcctgcctcagcctcctgagtagctgggatcacaggtgcccgccaccatgcctggctgctttttgtatttttactagagactgggtttcaccatgtttgccaggctggtcttgaactcctgacctcaggtgattcaccagtctcagcctcccaaagtgctcgattacaggcgtgagacactgcacccagccagaatcaacctaactttttatctgcaaataattggacattattgtccctttgtagggacatggatgaagctggaaaccatcattctgagcaaactatcgcaaggacaaaaaaaacaaacaccgcatgttctcactcataggtgggaattgaacaatgagaacacatggacacaggaagggcaacatcacacaccggggactgttgtggggtgggcggaggcgggagggatagcattgggagatatacctaatgctaaatgacgagttaatgggtgcagcacaccaacatggcacatgtatacatatgtaacaaacctgcacgttgtgcacatgtaccctaaaacttaaagtataataataataaaataaaataaaaaagaaaatgtgatatattatatatgtacatatataacgtatataaatgtgattatatattatatatacacatatacaatgtacataatgtaattatttgtatatattatatatacatatataatatataaatgtgatacattatatataattaatatatacaatatataaataaaatatatttccattgtgacaacatgggtgaacctagaggatattatgttacgttaactcaaatattatattatgttaactcaaataagctaggcacagaaagacacatactgaatgctctcacttatatttggaatctaaagagtcaaactcatagaagcggagagtttattggttgccagagaatggtggttgccagggactggagtgtgggggaattatgagctttttgtcaaagagtacagaatttcagttaggtatgatgaataagatctggagatataatgtacagcatggtgctatagttaataaaattgtgttatacatttgagattggctaaaacagcagatcttaaatattctcatcacatgcaaaaaactgataactgtgtgaggtaacagatatgttacttagcttcattttagtaatcatttcgtagtgcacatgcaaacggtatattcaatggaagaagaacagtcttttcaacaaatagtgctggaggaattaagtgtctgtattagtttgttttcatgctgctgataaagacatacctgaaactgggaacaaaaaaaaaaaaggtttaattggacttaaagttccaaatggctggggaggcctcagaatcatgatgggaggcaaaaggctcttcttacatggcgtaggcaagagaaaatgagggagaagcaaaagcagaaagccctgataaacccatcagatctcgtgagactattcgctatcacaagaatagcatgggaaaggccggcccccatgattcaattacctctccctggatccctcctgggaattctgggagatacaattcaagctgagatttggatggaggcagagccaaaccatattattccattcctggcccctccaaatgtcatgtcctcacatttcaaaaggaatcatgccttcccaacaatcctccaaagtcttaactcatttcagcattaatccaaaagttcacagtccaaagtctcatctgagacaaggcaagtcccttccactcatgagcctgtaaaatcaaaagcaagctagttacttcctagatacaatggagatacaggtattgggtaaatacagccattctaaatgggagaaattggccacaacaaaggggttacagggcccatgcaagtccgaaatccagtgggcagtcagattttaagctccaaaatgatctttgactccaggtctcacatccaagacacactgatgcaaaaggttggtttccatggtcttgggcaactccgcccctgtggctttgcagggtacagcctccctcatggctgctttcatgggctggcattgagtgtctgtggcttttccaggcacacggtgcaagctgttagtggatttaccattctgtggtcaggaggatggtggccctcttctcacagctccgctaggcagtgccccagtagggactctgtgtagggactccacatgacacatttcccttccgcattgccctagcagaggttctccatgagggcctcgcttctgaagcaaacttttgcctgggcatccaggcatttctacacatcttctgaaatctaggcaaaggttctcaaacctcaactcctgactccttgatttccacatatggagtccacaccccagtagggactccaaccccacatttcccttccacactgccctagcagaggttctccatgagggccttgcccccgcagcaaacttctgcctgggcatccaggcgtttctatacatcttctgaaatctaggcagaggttcctgaacctcaattcttcacttctgtgcacctgcaggctcaacaccacgtgaaagctgccaaggcttggggcttccaccctctgaagccacagcccaagctctgtgttggcccctttcagccatggtgggagcatttgggacacagggcacaaagtccctaggttgcacacagcacagggacctagggcccagcccatgacaccacattttgctcctgggcctctgggcctgtgatgggaggggctgccatgaaggtctctgacatggcctggagacattttccccacggtcttggggattaacagtaggctccttgctacttgtgcaaatttctgcagctggcttgaatttctcctcaaaacatgggtgtttcttttctactgctttgtcaggcagcaaattttctgaatttttatgctgttttccttttaaaatggaatgcttttaacagcacccaagtcacctcttgaatgctttgctgcttagaaatttcctccaccagatgccctaaatcatctctctcaagttcaaagtttcacaaatctctagggcaggggcgaaatgccgctagtctctttgctaaaacataacaagagtcacctttgctccagttcccgataagttcctcatctccacttgagaccacctcagcctggaccttattgtttgtttcactatcagcatttttgtcaaagccattcaacaagtctctaggaggttccaaactttcccacatttttctgtcttcttctgagccgtccaaactgttccaacctctgcctgttacccaattccaaagtcgcttctacatttttgggtatcttttcagcaatgcccctcattcagtaccaatttactgtattagtttgttttcacactgctgataaagacatacccaaaactgggaacaaaaaaaaagttttaattggacttacagtttcacatggatggggaagcctcagaatcatggtgggaggtgaaaggctcttcttacatggtggtggcaagagaaaatgaggaagaagcaaaagcagaaacccctgataaacccacatcagatctcgtgagacttatgcactgtcatgagaatagcacaggaaagacaggcccctatgattcaattacctctccctgggtccctcccacaacacgtgggaattctgggaaatataattcaggttgagattcgggtgggggcacagccaaaccatatcagtatccatagactgaaaaaaaagccctcagcctatgcctcaaacttcatacagaaattcactcaaaattgattgtggaatgaaatgtaaaatgtaaaaatataaaaatgttaggaattttaaaacaagagaaaatcttaaggatctctggatagacaaagacttaacatcaaaagaatgatccgtgaaagaacaaatttctaaatttgacctcatcaaaattaaaacattttctcagtgaaagaccctgtttacatcaaaatatcatgttgtatactgtaaatttttatttgtcaataatacctcaaaaagaaaaaataaataaataaacttagcaaaagatcaggataatagtaaatggttacttgctttatcaatgtttttgaggaaaatatttagccaactaattattgagctgggttcaaactcagtccactattagagtcactgatactttgttatttattaattattaaatgggaaaattttaattaattgtgttctgttaatttttcagttagtcgatttgctctgaatacaattctgaaatcctttaggtgataattttgaaaataacaaaaaatacaaatgagaaaaaatttatatatatagatgcacgtcctagaatagctaaaataatgctaacaaagaagattaaaatgggaggaatcactctaccctatagtaaggcttacgctatagctactgtaatcatgatagtatggtgttggcaaagggacaatcacatataacaatggaacagaatagacaatttagatacatacaaatatgtccaactgttttctcacaaaatacaaaagcaattccatggaggacggatagccttttcaacaaatagtattaaagctattgggcatccatagaccaaaacaaacagacaaaaaaaaaaaagaaagaaagaaagaaaagaaaagaagagaaaaaaaaaccccaaaactctcaacctaaacctcaaactttataaaattatctcaaaattgattgtggactgaattgtaaaatgcaaacgttttcagtaaaaaataaaagtagaaaatcttcggggtctcaggctaggaaaagacttgacatcaaaagcgtgattcgtgaaataaataattctctaaattgaacctcatcaaaattaaaaccttttcatggtgaaaagacaagagtttgaaaagacaagctatagagtggcagcaaatatttgctgaccgcatatctgacaaagaactagtgtctaaaatatatgaagaactttcaaaactcaaaagtaataagcaatccatttagaaaagataaaaacagatattttattgaaggggatatatacatagcaaataagcacaaaaaaaggtgtgcaacatcattagtcattcaggaattgcaaaataaaaccacaatgaagtatgactccacacctatcagaatggtaaaatgaaaaataatggcaacaccaaatgtcaggaaagatgcagagaaactggattattcttacatcactggcagaaatataaaatgatacagacacgctggaaagcagtttgatactttcttacaatacccaacatgaacttgccatatgatccagcaattgcactcttgggtgtttatcacatgtaaatgaaaactcatgttcatgcaaaaacctgcacgcaaatgttcatggcagcttttttcataattgccaagaattggaagcaacccagatgtcctccaatgggggaatagttagacaaactgtggtatatgtgatattactcatatgtggtatatgtgatataatcaaagcagtgaactactaatacacatgaaaacgtggacgaatctctaaggaattatgttgagtaaaaaaaccaaagccaaaaggcattattccatttatatcacatactgaaatgacaaaattttagagatggagtacaattaatggttgccagagttggggacagagtgtcaggggaagaaatgtgaaaaatatttgggtggttataaaaggacaacacaaaggatccttgtggtgatagatctgttcagtatttttactgtggtgcagatacacaagtttataagtgataaaatagtatagacccgaatgcacacatacatatacacagacacacagagagatgagtacaagaggggaacagtgaataaaatcagtcaactgtatcagtgtcaataccctggttttgatataatattagacttttgcaaaatgttaccattgagaaaagtgggtaaaggatcccaggagacctctctgcattatttcttacaactacatatgaatctataattatctcaataaaaatgtcaatttaataaagatattagacaatatcatactgaatcttgaatcctaggcaaggagtttaaactcttttcaatagctagttgagacccatagaggctggttgagtatggacgacttgattaagagctatggatcaaaagaaccaatatgatgacagtgagtgtgatgaattaaagggatgttactaaaggcagtgagtcaaaaaaccataatcagcgatcaagttagaggcaatattgaagccaatattgtacccaatgaagtgtacaacagatccatgcctatgaccacttcaacaaccacacatccaaccaaattcactctgtccaagttcttttttttgtaatttacactatttttgggaatctgatcataaaatacagtcacttccaagagttatttcgctatattgagctcattcttttatgccataatcttaacattttgtaaacatgaagacacatttttagtcttggtttcaataattttataatcatataaatgtgcatgaaatatgttttctacttattgtggcaattggcatttttgaaaaaaattattttaaggtgttcgaagattgaaaaaagcatatattagacttctggtttaaattaattttaactaaatatttataaaattttgattaaataagtttgtaatcaatgtttaaatgtctgagaaaatgtaatttgttaattgatttcttagctttgtagccagcattaaattttcaggaaatattatttaatgaatttatacatttatgtaattgtgcctgagataaaatacaacaggagtgaagctcttctccatgcactaaagattccaggagaccatcagtttgcagatcagggctctctccatcataccacactgccctggaaaggtttacatcctctttaaagcctctctgagctgctggctccagatcaaggaggaataggcttaccttatggggttgtccatcctggacactgtgaggaaggcagcaaggttggctgtgtaggaggagcacacaatgagcgtgaagagccaccagctgcccatcacgatgcgcatggccatggagttcacggaagattcgccacctgcgggaggcagacaaagtggattggccagtggcttctgctctccctcctatccccagggaggtgttctgccctgcagccaggcacacaggccatcactcgtgatgggctggaaccagggaggtgactgtcagctgggtctgggcatctgtgccaattctgggataggatcctaaaaccatggatcttggacaagggcagaggaccacaaaatatgaaaaagttaggactgggcttctagtggtgcgaaggttgtcaaaacaccaagggttggggtctgaatatcaaaatctttcagttagaagattctacctcacagtggtaagaacttctagggctgcagccttatgtaagatccctttccaatttcaaattcatatatagcagactcgggaattctgtaaatatagaaataactcctactacatggagggatccctggctttcttttaaacctgagaaatgagatgtcccatatcacttttattagtattcagccctcattagatggcttttcttcccccagaattctcagaaatcagggcatgagacttttagttagaagtttagcctctttgaggccaattatttctccttggtctctaaagtgttaggagaagagagcttctcactgcttattctccttacataacctcacaaagcatttgccatggtgcaaacaggatgaagactcacattagaaactttgcaatttgttgctccagtcaaaatggcacaatcctataactcactagtggatagaagtaccatccagacccctcagaggtaggagaatttgtacctcaagaatggctgaagtactgcttaaatgattgcaatacaattgggattttttttccccattaagtcatcaaatttaagcaagattcacagtttcattgacaacctcatgtgcatagcaatcactttaatgtaggaggagagaaaagtgcaaagcaggactccaaagttaattttatctaaagtggagaatcaggaattgaagttgagctccttattgttgtttcatttaatttctctctgatattattcagagaaattgggtgcagcatgacatttgtactgtcctagagattaagtaaaattgcatttggaatgactttggtaaaatgcacctgagaactttgccaatggataagttcttccaggcccctagagctattcaatgatcaggaaaccagaaaggtaccttgctgtacgaaggctccatagacaatccagatggcgctgtgcagagtggcagaagctgacggcctgggctgggcagcactctgagccctcacagcctgtatcctgttcaacacaaatatcagcacaccaaccacagggatggctgctgcaatgcaggcccacacagcgaaatcaaatggagcaaagagggagaagatgctgattttctcctcgggcttcttaattagaatccccactgaatagtccatgtaccgcttgctgaagtccacaacgctctccctctctggggtgatggtgatggcagagatggccaagtctgctctctgaaaggcaaagccatctcatttagacggcagtcctcagcttactgctgggttctgccctgggtcaaggtccaccctctgtcctttgagttgctctgttcagaggaatggatttgagagctggcaccctgagagtctgaatattataaggaaaatccaacactaagttgtctgttactatttccttcaccttacaagtctctctcttctaaaaacttcaggaaactgcttctacagaaaagagccgagtaaagtatcttcatttctctacgaattatagtttatcttcactttgttgttttcctaccaaactttagctatcttctttttattttccctatgtttccctctaccctccaccaagaaggcccttctatcttctaggcctgtgtgcatcctccctacatgttaagaccagaggcacactccatttcttcatcacacctctcagactctattatcccacattgatctttctcttttctaaaacacttcagaagttatatggtgagttctacaactatgttagacctcattaacatattagccagtgagtgtttcatatgtagacttcatgccagagagtaaaatactgaaagaataaaggggtcatatatttatttctatcttccaccacccttaattcatggcttgcaaacccacaggtttattcttccatggtaaagccatggtgtgaagaatctctctggatgtgccctactatgaccttaaaattacctcccaagatgtttgctttccaaaatgggcttcattttaaaaacagacagaaaccccattaagatggatccagactgtgaggagaaaactgccaagtttggggcgattacgggtttcatgtccggatgggtggatgccaggtgacaatggggcttagggtcctcctttagtcacaagagcactgaaaggcagtcatcataatgatctggcctcttgaccctcaaagtgggaggcatcagcagaactagtttcttttagaatgaccaatagtgacaactgattcaacctccaagctcaaactgaggaaacacacgtggaaggattttttcaaggtttaatatgtaggctagggacagatatactcatgtcctaaacagaaatctaatactataccttgagtaaaggcagcaaataggaagtgaccctatcaacactctcctcttacacttgtcacactggcatctctggttcttgcctctcttctaaaaactctagcatccagggacaatttttaggattaggaaagtttggagcatatttaagggcttaaaaagagatttaatggagcaggataggcttacaagacaaaatgaagggaaactaatttatgaagcaaggttcaaaggaggcacaaaggaatcaactcatgacacaggtggaggggttgtcctgtgacagtgggacagactgacaggggacaggggacactcccttctgtgggagatggcaggtgcctgcagatgtaaatttcataggaattagaggtacaattttatgccccaaaatctcagtttatttccccaatatagaagtacaatcatttttttttttttagttgggaaggatagaagattcttaggtagctcaagaagaaaggtaaactttttaaacggtctctgagagacatagccaaggagcccaacaaaggacaagttaaaagattctggcagtactgaagggcccagctgattttggagaccacacagggtttctaaagcaatctggacagattcacaatttccttctctaatttagtgtagcaacctggatttcagagtgaagaggatagataatagaatccattcaggcttaggatgcaacaaaaaaattaagaacagagggagtcacaagggatgaagggaggaggggtttgtctggccacccatagaggacgcagtatcagaaaggcacagaagctgcagagaaggatgggcctcaaatacacacactacgtggaaagaaccagacacaaaagaccacatcttgtgtgactccatttacacaaaatgttcactgaagcaactctatataagatagaaagtagattaatggttgcctagggctgggggtgggaatggcattaactataagtaggtatgaaagatatcaatggcgtgacggaagtattctaaaaccagattataatgaaggttgcacaacccggtatctttactaaaaatcattgaattgtatatctaaaatggataaattttatagtatgtgaatttatcacagtaaaggtgtttctgaaaaagattaatagaaatcggacgaatgacaagcctagtgtctgcctttacagatttaaaaagcaaagggcctgtgctgtgagagtaaaagttcaaaagagtcagaaggacaacttgttgtggtcatgcagtgggctagtgatggtgacatgtaagatgctaacaagatgcatgggggtgaacactggagtggagtacagcaaaggtccctggaggcgaggaggtcaaagtattgggagtccagggttgtccacagggatgtcagaaattgtcagaatggtggcaggagaaataatggagatggaggatttgagtcagatgccaccatgataaataatcatggggaaatgacccagtgtcatgagatgacaagaatggggacatggtaagttggcctcatgccacgagtttcaatgaagatgcagtttctacgggagggaagaagagtacaatttaaataagtatgaggacctgggggatgccacaccatcaacacatagcaatgtagacatacacacatatgtatgaatatctaacctgtggtctataagggataggagaatgagcactcatcagtacccctggtgggaactaggtttctgcttcaccctaaacgtagggtaggttccttgaagggtgtgctacagagtaggcacagtggatgatagacttcaaaggaatgacagcaatgggcagggaggtaacatagagtgtcagagacgaggagatacaagagcagaaatggatgtagcaggggatttgaagacaaaagagcctttgtgtggggagaatggtaactgtggtctgtttagctggtcccaaggtttccactgtgcaattggtcaagtttagatattaccccagaggaagactagggtgcccctccccctggatctgctatggggacctaccttgctgatgagctccccgatcatcccgttccaggaggtgttatggagctggtgaccgtacctgccatcaggggcttggtaaatctcatatttaaagcccagagccttggccagtgcatccaggacatctatggagaaccctttgtagcgcttgggctgtcctaggatgttctcagccaccatcacgaaaggctcttcctgaggacaacagaatgaaggttctccaattaaataacaggttcatcaacacatatttccagtgtaatgttagagagaaagatctgattagaacatttgcagttccccaatttaggacttcaggctcaacttctctgcctttttctaaaagcagtttatggacactcaaggaacagtgcacaggatgatcactccaatcagtaggtccatacagaggagtggagattcatttgtcccgtgtcatcccaggctctgccccaacccctagttccctgaataacatggtttgttttccttcctccgtttgtaacatccatgcagagctaggactgtatccttagaatatgccaaaattatatgaggcccacataagaaacatgcaacttctcatccaggatagtaagtggcgataaagctctgtgacattaggttgagagaaaaagcattatatctacaggctatactagaaagtggatatggatatggattaactgaccaaggccagaccagaagccaaagggtaggacagaattcaaacccagagttcctagttcaaagccatgccatgctcacacctgcacatgttgtgctatgccacatgtgagcgaggtggtcatctgaaaaatgtcttggcactccctaccattccccttccttcttgtgtgaaactgaacaaggggcctttggcaaacagctccagggagtatagctcattaatttagttgtgttgggaaatagggtgtaaagcttatctgtggtgtgcaaacagagaatgcagaaatactgttgccaaaggtttctaagccaagggaatgctagtgtctgctgggagagaggggacgtttgggcacgtgtgactcagccaataagaggcaagtctataatgtctcctgcagtttttataaaaatgtgaaaaaagcaattgaaaggaagatgcttttaaagtctcttacaaatgcaaaagtctatgattccaggacatccatgcagaaaagttgcaactaccgaatggtcttcattctgaacttgtgtcactgtcacatgagcccatcactggtgttgggtgctaagagaatgtcctcctccagcatctatcttggggttctggctaccagaacaactctcctaaggaccagtagtgggtcaagatccattttacatccaagaacaaatggagcagcttggccccctctggtcctcagaggaagctgtgaatgagaagtccttttctagagcagctcagggacttcctttggaaggcacagaggtcctggggcagaaacttcaatctcactcttcctttcattattcatacaattatttgaatgaaaggccttatgaaagctcacaatactcctcaagattctcttctccccaaacccagcattaaacagaaagcagcctctgattcaacagcctggatggtgtagctcgctcccagaatgtccccatgatcctaccaagacagtcaccactttaagagtcaatccttggaggcggctgcccatgggcctctcttgcaagctgccattcaagcccttctctgagtcccatgtcgccaactgtgaaggaaaaataaagattgtgagggatggaactggcacccgtgcacaccataggacctcggctcctacactgggatcctgaattaggcaggtaggtgaacagtagtcccctggagttcccagagacccagagccattttaaaaccctaaagagaatagatatatggtagacagagttacatgtcctccttcagctcgcctggatctctatagagctcagcacagccctaaaatgaaaccaactggtgagaacttgtctctagaacaaatgtttatgtccagttttattctgttcacccacagaggccatgtcactgtgatgcctgcaaaataccctctttctttaattactcctttgacttgcccaggccacaaggcccttgagttcagccattgctccctccatgggtaggatgaagctcagcagtaaagcaagtagcaaacactcaagtgtacagcttgtcttgcaccccggtgcctatggcaagcagggtcaagagcttcctgcctgttttcactgtggtgccagctccctcattttccttgacaggcaggtagaggctaatggcagagtaaatgtgctctgaatctgctacattctcttaagcctgcagagtatatccaatagccagaggcatctctgatagtcaccctaaggtggtcaaggagaacctaccttggctcagaaacaatgaggagacacagttgttcatgagactgcttcccctccctgcatccttgcagggtctatacaacgacaaaacttttgtctgggaaacgattctcgactattaatggggaagacataacaaaatgcagatacccagccccatctcaagtcaactaaatcaggatctcagggcctgagcataggaagtgttaatgcctcctgagtgctcctgatactgcagccaatgtcgagaacccctgctcttctaggtcactgggcctccaacttggctgcatattagtatcttttaagggggctttataatgaagtgtactgaaagttgggccttacccccagagcctcttatttaattggtctgtagtggactagagatggatattttagctccccaggtgattctaatgcacagccagaattgtgaaccactgctgtagattaaagccatgatgctcaaactatgatatccacacaaatcacccagggattttgtatgcactttctgattctggggcctgagattattcatgtctaacaagctcccaggtgatgctgctgctgctgctgctaatccatggaccacaatttaaatagcagggggctaaagggtcaaactgccacaggcagtatatactgttgtcagggaaaatccataagaccccctagttaacctgaagagaagaagaactccagtggaaaagtgctactgggggccctaaagtaaagaatgcttctactctgtcagcatttcccatggtcctgacatctgcagcagggtctgcacactaagccctgactataaggccatagaacctgaggagtcattcctcctggaagagacaacaactctgagatgtaaaaccatcagaataagagatggagttctagagtcagttttaaagaaacctggaatttcctgttgtcaccttggacatgatacccaccaagacccactccatcctgaataatagggtgccttggtgtgatgaataaataaattagtaaaaaacatggccatgtaccccaaagaaccacccaccgccaccaccactaattaatttgggggcattgagataaagaacaagtgaagatctacccaaaattctgcttaaagacctcgaagataccaaaataccacactttgggtaatgatacagttaaaaaaaaaaaaagcaaaaatcatggctatttctccattggaccttaaaaaataggctgagagctgtggcttatgcctgcaatcccagcatttcgggaggccaaggtgggtggatcgcttgagtccaggagttcaaaaccagcctgggcaatgtggtgaaatactgcctctataaaaaataaaaataaattagccagtgtggtggcatactcctgtagtcccagctatttgggaggctgaggtaggaggatcaattgagaccaggaggtcaagactgcagggagccacaattgtgccactgcactccagcctgggcaacagagtgagaccctgacaaaaaaaaaaaaaagaagaagaaggaaggaaggaagggagggagggagggaggaagaaagggagggaggaagggataaagaaagggaggtagggagggagggagaaagaaagagaaagaaagaaagagagagagagaagggaagggaagggaaaggaaaaaggaaaaaggaaaggaaaggaagaaattgcattaagatacagaattggttcctacagctggattaaaatgcttgtcagagggaagaggacaaattcagacaaatggggtcaaggggttgattgcctctattctttggatgttctactatggactcactggggcaggagtggatatttatttggggtgcctgcatctgcactcccataactgcttagcccaggtgctggagctgcttagccctgatgtgtgtcctgctacttctcctgggtgtaggtggagttatagaggtcttcttgaccatcccaatggctcacagagtcataacagaagacatcttgtcctaatgatgatgtgaccattccaggcactcaatactcttatcctgcaccaggacccagattcgtaacatctgctgccaaaccttcctggtacggtgaaggggcatcttaattctctactgtcttggcttggatgagtgtttggaatggagctctgtgcatcttgatcaacaaggctttacctgtctttctactgggattataatcagaaattagaatggaggatggaggcaggaagaaacagttgggatgaagccctgaacatcattctctgcttctggctcactgcttggctccaggatgcaccacctcagtccccctagacctttgcaacagctttctcattggtttcgctgctctcagcctctcttatagcacatccttcaacaggcaagtgggtacccttacaacaaataaactcaaatatgaactatattaattaaaatattctaatgaattcctttttcttacagaataaatcctaagacttttcagcttggcctaaaagaaaagccttcctcatccagagccaatcctgactctcaacctcactttagtttatgtagttacagtacactaaaatccccaaaatccctccttctttctcaggcacaccacattccctcctgatatttgtatctagtttttctctgcctggaatgccctttctcctcttctgggtctggtaaactcttacttgtttgttgaaataagatttcactttagaatagttttagatttacagaaaagttgtagatattgtacacagaatgtcaatagatccataagccagtttttcccattaagacataacattagaatgacacatttatcacaactaatgaatgttcagcccaatatccatgatttatgcaaatctgcaatagaaatgaaatagaaggacctccagttccttctactcttggcataagtcagtgagtcagctgtggcattggggtttcttgccatgttctctggggtcaaaactctgtcttcataagctgtctagagcctcaggctcttgggctagacctggccttgctcattcccatctcaggatctccaaccttgcctcgaattccaggctctcctctccaacattaacttctgtaactggagaagaagatgggaacttggaggtgtgaacttagcagatgttcatgagtcagtagacctatgttctaattgttgtcaccacttacctgagtgacctcagatagcacttgacagcacaatgcttgaaacatagaaagagtcaacaaatatttttgtatacaaaaaaatacagaaaaatgtgttgagattacaggcgtgagccactgtgcccagctgattctattttcttatctatgaaatgggaaataaaaatcttccttgcctacaaattgaggggctgttcaaagaagaaaataactttgaaacagtctattataaaatagcttaattaagaatcacaaagtaaagaaccaggatataaaactgtatacaatatgacctcaattatgtttttttaaaagcagtggtaaaaacgggagaagacacgttaaaatgtgatacgtggatatatgtgttacatataggtgatggaattataagtaatcattattaccttctttatcctcttcctgattttaacaggattttcactaataggaagtaaaataagcttttgataaaaataactagcatagatgattaagcaatatcctatcacatgcacttgtacgactcaaaactgcatgataggggagcaattggagtcaaattacctgtcagtatgtcaaggccaatctgagagtcagaacccaataaatcagtgctttggctgtaaggaattttggtctaggggtgctttatctcctagagggggcatatggctagtttggccagcacagcatctcatattctaggatctctccaagatggtgggagctctgtaaactgttgagttgggagataggaagtggccacagctgaggcccagatccatgaagataagcaatccaagtaatctttctctgctgagaaagaggagcagcttcaaatcattttagttaatattcagacaaccttaatacgagaaggccatgtaaattaaaatggaatttcatgaaggaaaaaaaattcttccaagcctattatcatgcttctctctttatctaaaagtggttaggaattaaaagtatttttgttttgttttgctttaatacagacttctgtctccctggcctttaggcatcctgtaccctgataaagcaagaaaaaaaatacttcaaagcaaaaaatcaaaattctgcctttcaaacacatcaaagttcaactatgttccaggattcaggatccttcatattgggtaggaaactttattattccctcacatcagacagaagccaagtgccccaggctgagtgaatctccccatttccacaaaactgtgtgatcttgcccaaatcttaagacaagagtggtaaacctccatcattactggtcaaggccatccgtctgcaatccaaaatataaggccagaacatagaaaagcacggttcacaagaaataatccagtggaattttttttatgtaaatgaaggctttaaatggatcaccagccttgtagtcacccaagattaggagagacatgcatccctcccccatcctgagggggtctggcgctcgccactctgaatgctcaggaaaatgtttcagtcaataaaagccaaacgaggccgatgggcttgataagtgggaagccagaaaaagctttcatccaaagaagtcccaacacttagtcatacagctccagaccatttcatttgtacatgagtgagtctactctgacttccccttgtattttgcagacagaattttgtttacaggatcgatgaatttatggccgcacacacccacttttgacagctgacctgtcaagatcagtgcctgaaaaactaatttccagcactattaaacaaaacaagtactgctgctatttgataagacagctacggttttcattcattgctgagatctgctctacccaaaccagaaatgtggatggagccagaggttatagcacaatcatcacttgaaaggagatatatggcctcaaaatctgattatgacaaacaactgtgcaagagatcagccaattggagaatatatttcacaaaccactggtctcaggaaaatatatttcccaagtcaaccaggatgttcttcaagttagtgtttctgagttgtaagatgtgggcatttgggactctgtggccctgtccttaataaatgcagggttattaaccctaaatgggacaggcatcctttggaagattgggctttgtgttctgtagactagttataaaggtgtcttaaagtgtcattctcttttcatggggaggaagaatagaaacgggtggcaatcttactgttttacagcccagagacaaaatataaccaatttcatatagagagcattgtaaattcctgcgaagggaaggagagaggaagggaggaaggaaggagggatggagggatgcagggaaggaaagaaggaagggaggaaggaaggaaggaaggaaggagagaaggatggagggagggaaggagggaaagggaggaagcaagagaaggaaggaaggagagaaggcaggagggagagaaggagggagaaagtgaagaagggagagagggagaaagggagggagggagcaagggaaggaaggagggagggagggaaggagggaagtagggagggagaaaggaaagaaggaaggagagagggaaggaaggagagaaggaaggaaggaaggagagaaggaaggaacgaaggagggagggagaaaggaaggagagaaggaaggaaggagggagggagggacacaggaagaaaggaaggaaggagggaaggaaggaaggaagcaaagaaggagggaaggaaggagagaaggagggaaggaaggagagaaggaaggaaggagagaaggagggaggaggggagagagggagaaagagagggagagaaggaagaaagaggaaggaaggaaaaaaggaaggaatgaaggaaataaccccaaatctcatgcttaataatatccaacaagacaatggatcaataagctacactgtcacaattttacagctcagttggtaagcttgtctcaaggtagtattggaaggcaaaaggtgaagattttatggccatgtctatcagacctcatctgaaatcccataagagctatgttctcatcaaccagtgactgccatgatctgagtgcagatggccccagcctcaatgatgatggccatagtgggtctgtcattatgtcagtgcatgggcttttctaaaacaataagtcatctactagggttttttttctttgtttacttctattggaaagcaaatgggctcagagtatgtttcaaaggatcacagccttaaataggggtaaggtgaaagggaactcactatcttgaatcagcttgatttggacattcggccagcactgatatcagataatccattgcaagccttaaccttcagctaaatgcaggaacaacatgtttagatacaaacacagcaccttggaaggagagtgtgaacatctgagggtagaatattaatattggtagccaggattcctgaagtaaggtataacttgagaggtcattttgggaatcccagcatatcagagccaatgaacctgggccttggagggtatgagtcacaggagttggcagtcagaacctagttaatacacccactgaggaagaggctaggaccactcttgaacatctcaggcatgtgtataggaaggagtgattatcgctgtctgagatggagagaattgagagtatccatctcagttaggacctttgcacaaggaattgagcctttggtgaaagacatactttcttaaaaacaagtcctagaaggatgtgtgttaagtgtccagaggacagagctgtaagaaactaaaagaagagtgaaatggaaaggagagctatcatatacaggggcttttgaaaaacctttagcaaggatggggaaaagatacttcccagtggtgctggagagaaaggcaatgaaaaccagcagaaataccttctgcactggcaagagatcagtcataatgaaggcaatggaaatgctcaagctctagcttctactaccttaaagcccaggccacaatggtctcagtgggctcacacaggataaaaggactgaccaactccaataatgccatcagtggagacttttgtcatattaagagcaaggatggaggcaggcagttccacttctgcttaagatatagaaaggagcgagaggatttttgaacaacaacaacagtaaagccagatatatatatatatatatatatatatataaacatatatggttatatatatatatatataacatacatgtttatatatatataaccatgtattatattcatatatatacaaccatatatatatgtataaccatacatatatacatatatataaagttagcctataagaaacttgcaattgcaaaaccaccctttgaactgaatttcaaatggtacaaaaccactccaaggagagacaggatgcaagaagtgtttctgctctatggcagagcatggatcaaaagcaggtggtagttattaaagtgggtaagaagaaaaaaccctggaattttaacaatcttaaaggtcagatgtgggccagcaggacagtcaggatccccgggccctagactcaagggaggccacatctactcatcagctcttctccaccaaacctccactggatggagcaggaaaaagaaaaatataagctaccatccaaaagttataggaaaatatcaaagatgtgtgtacccaataaaggatatgtatcaggtatacataaagaaaacttacaaacaactcatttttaaaaatacagaaaggacttatttttccaaagaggaagacatgtgataggccaatatgcacatgaaaacatacatgctccatatcatgagtcatcagggaactgcaaagtaaggtcacaaggcagtacactaaacctcactagaatggctaaaatcaaagactgatgttaccaagtgtcactgagaatctggcaggcaaaatctgcagccacattggaagacacttcggcaatttcctataaagttaaacatatgatgttaagcccagcaattccactcctagacattacataagggagatgtaaaccgtgtccatacaaaggtccatatgtgaatgttcattgaagctttattcataatagccaaaaaattgaaactctccaaatgtggatcagctggtgaatagataaacaaagtgtgagatatttacacaacagagtactactcagcaataaaaagcaacaagcaactgacacacacaacaacatggataaagctcaaaagcattacgccaagtgaatgaagccagacataggagactgcgtgctttacgatgctgttaatatggcattctcgcaaaggcaatattataggtactgaaaatagatcaatgtttgtctggaggtggggatgggagaagggtatcaaatgcaaagaggaaggtgggacatttggggctaatggaagtgttctatattttgaatggcctggtgcttacattaccatatacatttgtcagagctgatcaaacaccatatacctcaaatggatagatttattgcacatactaaataaaccatatggtttatttagatacaagtatgtgcaataaatccagccatctgaaatcattatgtataaaatcattatatatatatatggcacatacttgtatttaaatatagttaaggtttatttagatacaaatatgtgccatacacacaaacacacacacacatacaatgatttgttaaatgatgggccatgtgctgaggaggtaggtagtggcactaacctgtcacatgactaaacgatgacctattggcaaggatgataagagaaaatgattgccaaaataacattatggccgggcacagtggctcatgcctgtaatcctaacaacttgtgaggctaaggcaagagaatcacttgagcccaggagattgagaccaacccaggcaacatggcaagactccatctctaaaaataaacaaataaaaaaaacagccaggcattgtgtcatgcacctgtagtcccagatactcaggaagttgaggtgggaggatcacttgagcccaggagttccagtctgcagtgagccatgattgagccactgtactcaagcctgggtgacagagtaagacttcaactcaactcaaaacaaaacaaaacaaaacaaaaataacattatgatcaattttagtactctcaggtgactgtgctttaattacatggagctagatggtatcaagtggccaaaaaattatcgatctcaaagaactagatgcatcattgtaagggtttaggaagaatataagtacagttttaactgcaaatagctccatggtgtgtggggggaaaaatagattacataacattatatatagtatgatccaactttttaaaagcttatttctttttgtgagatggtgcacatataagcttaagctcaaaggtagttataagtagctgtttctggcattgggtagagcaatgggattataaggaatgttcatctcttgcactacactgtactataaggtttgaactgttttacctagaggaagcattgtttttataatcagaagaaaaatgataaagcaattttcattttgaaactgcagtgcaatctagcttatgactgtaatgttgatttcgtacctctctttaattgtttcaggtgtattggtttttttctctctaaataaactgcaagttccagcaaaggcattctctatagtgggacaagccaggctggaattctgtttcttccacagatgagcttggggaccttcggcaaattgtgaactggtcatatttgttctctgggctcaagtgtcttcatgtgttgcaagttccatcagatattagttattgttattaataatatgatctctcctcttaagtctctattatgctcaggctcatactagcagattaagagattcttgttggttttaattgacccgaattaatgaccctatgtacactatacctcagtctgaagtctgacaagacacttctgacagtcaattctatgagttcttacatagaaaaaagtggcaggtgtctcccattacactctctcaaactctggactggctcctctctctggaacatcgttcccttcctttgtcctctgcctcctactcatcctttcaatatcattctagagatttttccttgtacctccaggaagtacaaggtagttataagtagctgtctcccttgggtgagcccatgatatcctgaccatacccctgtggaaatgcctttcataatatattaaaattttacatctatctgttcacaaatacactgtactttttttttttttgcaatggagtctcgctctgtcacccaggctggagtgcagtggcacgatcttagctcactgcaaactttgcctccccagttcaagcaattctcctgcctcagcctcccgagtagctgggattacaggtgtgtgccaccacacctggctaatttttgtatatttttagtagtgactgcgtttcaccatgttaaccaggctgttctcgaactcctgaccccaggtgatccacccacctcagccttccaaagtgctgggattacaggtgagccactgcgcccagcccacataactttttgttaaggcagagaccatctcttcttcattttgatttgctcaataaaatcttgtttgaaaaactaataatattgatcatcttctgggtgcttcctcattaaatggctggaatttcattcttttcttagactcagggtcccagattatgcctcatatttgaagctctgcaaaaggttttctcactcagtgctgatttacttagagtggttgaaagttcctgggttggattttgtcttttgcatgattttgtgttggaaacttactttaagacttctagtcatggtaaagtatttgaataataaatatatatttttttaaactcgcttgatatgtctttaccactaggcccctgttagtgtgtggtcagtgggccaggagcattgcagcatgtctccatcccacatctactgaattagtttctgcattttgacaagagtcccagaagaacataggcacagtaaagtcggagaagaacagtttctatatcagggtaccatcattttttgcttgggacctttatgagctgccttaactatccttcagtttcttttttatgcactccctatctaagcctccctcaatccagctgccaggtttctctttttctttaagaaaattgctttatttcattcttctcaaaattctcaagtggttttcaactacagttgggtcctccttttcatggcctgtaagactcaccaagacctgatccatgtctgcctttaaccccaaccatcacactttctacctcgctcactacaccccaccgacactggccacctttcactttctctttcaagccaaggtccttcctgattaggaactttgtgtatatccttcacgttcccaataaatcttatctctgacattcacatctcatggttggctctttctcatctggtgggtcttgcctgatgaggtttaatcttgataaaggccttctcaggttcaatcttcctaagtattttaatatttttaaacacaagaccttgctattttcttcatacttctcaaatattgaaactgtgaaaagcaccttccacgatagggaggatgtctattttgctcaccagcatccactaaacatctgacacactttctggcacgtggcatgcacttaacaaattatttgttgaatcaggaaataaattaaagaactagttgatggatagttctttaactattccataaaggaccatgtttaccatacagtaaatattttaagttgtctgggccatatggtctctgtggtcaactactccacacattgagtagtggagttgggttctagtagactttacttagaaattaagcggcaggctgcattgggcccaagggccatagttcgttaattcctgaatgttgatacctttattatattgttcccactgcctagaatgttcttgcttcaattacatatttaaaagcactacctttctttcaaggttcaattgtcactttaaaaaaattgtttaattgccctgttttcaggaaaccccattttatctctccaactagaagtgacagatcctcctgcatctttaacgcattatgcttacccattttcacggcactgatcacattcatatttccctgacagttcctgcagcagattgtattttctaaagatggttgtgacaatattccccatcccacatgctcttctgtaatgtgacttctccacctcctatcaggaagagaagtctaattactcttcctttaaatctgggctgaatctgatgctgtatgtctttgggactaggtcagaaagggccatacagtgtctgcttagttctcttgagatacttgctctaggacaaagcttttcaacctgacactattggcatttggggccagataattatttgtgggttgggtgtgggggctattctgtgcattgcaggatgtttagtggcatccttgacctctgccaactagatgccagtagtgcctctcccccgactccccggccccccaccagtgtgataaccaaaaatatctccagacattgccaaaaacccttggaggatagaattatgcagcccccccccccaccacccattgagaaccaattatctaggagaatccagctgcccgcaaaaagtacagtaaccctgagaccaccatgctggagagaccacctgtgggtcccacatggatcccatatgtgtccagccttccaatcacctctgccaaagcactagacatgtgagtgaatccatcttagacccttaagacaggtgcataaactagctgagtgtcattgagtgactttagttaacattagaagaatcccaaagacaagccctgaccaaatttctgacatacagaatccattagacatttataaattattattttacaaaatttggggttgtcatgcagtaatagtaacttgaaaagaagttggtcctggaaatacagtgttacaataaaaaaatataaaatatgtggaattggctttgagactgtgtctaggaaggaagataggagaaccttaaggagacttttagtggaaccaaaactcaagaaaactactgtaggagtttaggggaaaatattggaagctgaaaaagaagctacttttgttattaggttgatgagaaagtaattgtggtttctgccattaaagtcatggtaaaagccacaattaattttgcacgaacctaatatctagtggcagaaaattttagaaatttttcacatgcagtaatatggaaagtagaaaatctatttaataaactggtgaatctaactactgaagtgtccaggcagaaatttgaatgatcctttggtttctcttaattgcatgtcataatgcatgcataggtgcatagatagttcatagattaagtaaagaagggattctgttttcaagcagaatttaaataaagtatatagaagatagaagccaagatttgttggattcaaaaataaaatattttttattctcagtgttttctagcagaaaattccaaaataagagaggttctcaatgcaaagatcaactcctgcagactagccagaaaatgtggacccatgaaatgaagggtatacctgtaaaccctttcttaagacttcatacatatttaaaatgctgccttgaagacttctcagaaagacaaaagaccttctatagtcttaaagatgtacctcacagaccttctctgttagacaacagaaattctaaaaatccctaggagcctgtttgggaattcaagctaaagaagagactgtcagaaatatttgcaagtgtggcttttatctaatgtggtcaacaactgataagcttaattttaaaacccacacaatttttaaaatggaacagaacagagccctcagaaataacgctgcatatctacaactatctgatctttgacaaacctgagaaaaacaagcaatggggaaaggattccctatttaataaatggtgctgggaaaactggctagccatatgtagaaagctgaaactggatcccttccttacaccttatacaaaaatcaattcaagatggattaaagatttaaacgttagacctaaaaccataaaaaccctagaagaaaacctaggcattaccattcaggacataggcacgggcaaggacttcatgtccaaaacaccaaaagcaatggcaacaaaagccaaaattgacaaatgggatctaattaaactcaagagcttctgcacagcaaaagaaactaccatcagagtgaacaggcaacctacaacatgggagaaaattttcgcaacctactcatctgacaaagggctaatatccagaatctacaatgaactcaaacaaatttacaagaaaaaaacaaacaacccatcaaaaagtgggcgaaggtatatgaacagacacttctcaaaagaagacatttatgcagccaaaagacacatgaaaaaatgctcatcatcactggccatcagagaaatgcaaatcaaaaccactatgagatatcatctcacaccagttagaatggcaatcattaaaaagtcaggaaacaacaggtgctggagaggatgtggagaaataggaacacttttacactgttggtgggactgtaaactagttcaaccattgtggaagtcagtgtggcgattcctcagggatctagaactagaaataccatttgacccagccatcccattactgggtatatacccaaatgactataaatcatgctgctataaagacacatgcacacgtatgtttattgcagcattattcacaatagcaaagacttggaaccaacccaaatgtccaacaatgatagactggattaagaaaatgtggcacatatacaccatggaatactatgcagccataaaaaatgatgagttcatgtcctttgtagggacatggatgaaattggaaaccatcattctcagtaaactatcgcaagaacgaaaaaccaaacaccgcatattctcactcataggtgggaattgaacaatgagatcacatggacacaggaaggggaatatcacactctggggacggtggtggggtcgaaggagaggggagggatagcattgggagatatacctaatgctagatgacacgttagtgggtgcagcgcaccagcatggcacatgtatacatatgtaactaacctgcacaatgtgcacatgtaccctaaaacttaaagtataattaaaaaaaaaaaaaaaagtaattgtagtgtcacaaacatgaccaggttagacaaaatgggttagagacaatgcagaataagagagacatttagatccctgaagtatgggaaggaaatcagctgcaaaaagaatctacatttttttctctcaaaaagtaaggatgatttgggaagaatcaagagctcaaagagtagagtgaagaaacaaagaagcagtaacaagttttaattgaggagttaacgacatgagacatgaatagctggatatgaaaattggtattgaccagtgatcactatgtgctttccaactactcctccttacaaatggtaatccttattgcagttatcctatcactgccttaccttcatatattgattgcaagggagttatatcatttgtctctttggatttaggtattcaggttgaaaaccatacttggggagatgtatccaagaatctgtactcaaagagcttcatctgtacctcaacctgacttagatgataagatcctagactttgggtcaatggcctaaatggtacgagtctttggggtcctttagagagggagttgagagtattttttccattcgagaggggtgtgaaccattatagccatcagaagcaggatagcaggttgcatgttccaagtctagcaataacatcatcctatgctcttctagaaagtgaccttgtcgcttccacatttacatacaaagcctaacctcacccctctcccttcaatattgattggttttatttgtaatttctaattgttgtggaggtgacattttgtgacttctgagtctacattctaaatggccttcaatttccacttatgaccgttgcactggggcaagccagccaccatataagagattcaacagcttgagatcagcatgctgaagaggctacatgtagatgtcctggaagatagttccagatgatctcagtctttcagtaactcccaccaaggtaccaggcatgcaagtgaagccctcttgaaccctcctgagtacagctaagtgacctcagttaaagtcacccatccaatcctgcagaatctatgatatataataaaataaaacatgatgaatattatataaaataatataataaaattattgctctcttaagctgttaaatgttggggtcatttgttaatgcatcaataataacagtttctcatgcatttgcctttatgctcatcttaaaagcctgggctggtttattcctctctgtattcccacatcatctaaaatgctgcctcccatacagtaggtgaacttgtttacattcaacaaagtattgtcacacataatatctcatttgagtgtcaccaacactttgtgagttaaacagaacagaaatttttatcctcaattttgctggtggagagacttgaggctcagaacggttaggtgatttgtgtcaattaaataatccagagagcctgtaaactcagaacttctgaatcaaagcccatggggttttcctcacaaaatgcttcctatgcacatagcagtgactgtataggcatttcgttatttaatggaggaagaaataaaggaaaggcaagcaggagagaagaaggaataaaagagaaaaatgttccaaaggtggttaacttccacagtgatgaaatctcatctggactgggactgctgatgaagcccagaactttgacacaatcctgaggtcagcattttgcaagcttccattccccttacatcttatttgacattctgggagccagatcattgcactggcacaacctagaaacctcatagggctcaggcctccttcctcctgccccttcctcttagccccatactatagaggtttctccaactgcacagaaggaaaatgactctcattcacccccagcaccagagtcaaagagttattcttacccagaaaatggatataagcataacaataataaagcctacaccagaaagtgattagtctatgtaacctgggagtgatattaggcaataggaaccaagagacagagattttgaaagcattttctgttacgggatagcagaagccttgagcccagatgatctagctaccaagacagtgtaaggggtaaaagatgggtcttcccatatctaattttacctttcatagtccgtaatcagaaggtgaatagtacttgctttcagtaccagtaagtcttctttagtttatacatgtaactcagatatgaagataaccaaataaatcacctttctttctacaacagttaaaagagaaaatgatcagtacattactttgtaagattagaggggactctgtttctgataagcttgaaggctgtgttcagggaaatgagtcataggagtgaggtgcacctgcccaccgtgactgtgtacatctcaaggtcggcagccaagagtgtctgcctctatgtggcctccaaagaccctgggctcagacattcaaacattcagtaagaacatctgcaactgaactgaaagaaatggaatggaatggagtagaacattcacataattccacactgattgagaagcagtacagtatagtgtaatgtgcttccactaaaaaacctgaggctcaagggtgagattgcctgagaaacatcatgtgaccttagtcaattcatgtgactatcctatgtttcactgtcatcccctgaaaaccaggagcagaagttcttaatatctaacctcttcaccagtgaaatcatatgggtaaaagagggttgagagctataaaactgaccaaaaattgatatcgtattagcaatattaaaataattattatctttggcagaatgaatttgggcagacttcagtttgaatcctacctcaatcacatactaattatggctttaaggaagctaattaaccctttttagcctcaagttttgtttccttaaattagaacacatattaacattgatagcaggtcctcgtgaatttcaatcttcatcaatgctctaatcgctttgaaatttatatttctatatcaggtttcttccctgagctccagactgaaatggccaggctccagcttgacatctccacttgaatacctaatagacaactcagagtcaaaaatttcaaatatacaaccttccatcccaaaactcctcaaacacatcacacactaatcttttattttccaaatattccatcatctcagttacaaacacctttatctacctcattacttaagccaaagatttcagagtcatccttgatttcaccttgcacacaaaagccatctgctagccatgtttactctacttcagaactctatccagaaactgcaccatatctattactacctcccaaatcccagccaccattatcacctggatcactgaaactgctttgtaacagatatccctatttttactcgggcctcaaggtgacaggcagttactattcatcaaatatcaatatgttcttctaaatttctcagcttcattccagtgagtttggggccatgtgcctgagttctaacaaatgggaatgttagcaatggggtctcttgcttctggctcagagcacttaagagcctgtgtgcttatccttccatctcttctttagtggcagccatatagttcacaagttgatggggtagaataacaggatagatgttgcctggatccctgagtcactgcatggagaagacattccctagagaaacacctggccacatcaggctttctgtgaacaagaaataaacctctattgcattaagcctctaaaaataacagtctagcctatcctgaccataatacatcccctacataggacacagagtgacattccagaaacataaatcatgttatactactccttcatttaaaatgttcccttggcacccatttaaaataagatccaaattcccaagcataacctacaacattctatacgatctgaccactgcctagctaataatatcctatcacttcctcctagtaatctaaaacagccacactggcccactttctgttcctcagacagtccaaaactattcccagtttagagcctttgtacatgctctccttctggaaacattttcaccctagaactactcttaatagacttcttgcattagtcagttatcattttccctaaagggattccttatcatcctaagtagactcccctactaagtccttctctgtcctgtattcctattgtagttttcaatagtattcataactatataaaatgatccaacttattttattatttagtttctaaacttttatagatttcttgtctatctcccctcactggaatataagctgcatgaggacagagtattgtttgacctattttcagcaggtccttcagcacttattaaaatgcctggcacagagcaggcactcaataaaaatgaatgattattactatcattaccataaattataaagatatgcatacctatttttacagttagctgaattccaacaggagcatctattcttaggtgactagggtgtagatctggaagaatcttaatacatgatcatacagcgctctccctcaacaaaaattcagagaagattcagctgtgctcaaaagcacacaactcttctgacccatcaccagggaagaatttggtcacctgatcatcagctgtgattggctgaaagatatgattactcctattttaagagcaaggcttctgcccaacctcataggcagaacaacttgcaatgtaaaatgtgaataattgaaaggaaagaaaaccagagcaaatactttcacaaagagaataagtaattagctagcaagcatggaaatatgtccaatctaataacataaaaagcaagttgtcatgttatgctatttctacttcgatttttgcttataaaatatttttaaaatgaaatacctagcaatgatatctagaaatgagcacaatgacaatacagggtaaactgatactctgtggaaggtaacatagcactatgcatcaaaagcctaacaaatatatctcttgatcagtaatttaaattccagggaactatcctagggaaggactcctatagcttaatgacagaaacaaaagtaatgcacaaagatgatcatcagagaactaaacataatggccaaaacaaacaaaaaaggaaactacccaaaatccaattatatgagaattgtaaagtagttacggtccacctcctggatataacagtaggcagcattaaaaataatgatcagagattgtattaacattagaaaatattatgacccacaatgttggatagtaattgaataggaatcttgtaacagttgaagaaatgttcaggttgatagaaatagaatgtgttggataggtgggcccagagggggctctgggagaaaaggacatgagatgagggagattctaggtgtttacattcttgcaatctcaggagagaagagagccatgaatgtataagaatctaactaaacggagcagaaagtctggctgagccagaatttcgaaggcacctcttctggttgccctggttacaggcccccttctcttggtagtgttattataaatgacacaagtcacatgcaaatgaaatgagcagatattagggtagcgccaggttggctctaagaagctttgccttgggaccagatttcaagaagagtttgagaagggtttgcacaggagacaaaggtgatattagaaagaaagcatcacatccaagataagaaaagactgctgctgaaagcttgagaaaatcatgtcttctgcaatcccattgagatagccctcatcacatcaatgggtccacatggcttcccttgttcagtctggtccctttcgtcacatggaagaggaagcctcaggaccaaaacttagtagagctcaatctccccagtggcttttgagggcccgtataggtaaaaggtggggaatgaaaactatattatttaaaaaagaaaaacatatattcttattacaaccatatacacatttaatattatacatgtgtgcacacatatatgtatggtatgtggcatgaagatatataatagacagatccaaaaattaatgatttaagtaaaaaaattattgttaaatttatttaaaatttaatgcatttaaaaaactttccataatgagcttgatgtgcttttataatgagcaaaattaagtatgattttaaataaagtgaaattttaaataattttatgcaagcccagggttgtgaacttgctatggccaagtcaatgactagctgaaagtaaccatccccatatttctgctagtcagcctactctgactagtcaggttagagccacatctgccttcccaaaatggcctttctttaatccacattatttaatgaagcttggaatagacaaactgtagaaagagtcgatgaccctcttgagtgtatctttatgagccttgtaattggtataagaccaaagcacatacaatctcagctctccggccctttatgagttagaattggtgggaaacacatcccagagctggccctgagttcacagtcttggagacacactcaaactggagaaagtccagaaatgatgacttgcactcacaaggtaaaatttgagacatgactgactacctttgtgatgtggaaggccttggaggtgacctcatgccaaggtcaaaacatttcctgtacatgacccctgtgaaaaaatgctaagcctcacaccaatatacgactgcttatttacaaatgatatacatatatatactaacatattgtgtatattacaaaatagatataaaatggaattttgacaagtggagatacagataaattttgttaaatgtcttgcctgacttgagagatcatattgtaattaatgaatatttcaagacccaatatatacttatggcaaggttcattattaaccactataaatttgatttgatattttaaatattctattgctaacttggaatttttaaccaatttcctgtaataccagaatatactgttattttttctacctcataatatggctgacaaggagctgagactgagagttaaagaaatgtccactcatccattttcatattgtaagctatgtttgcctttattaatattttcaatctgtccattactaaaaggtaacttttaagtttttttcaaattcctctaagggttattttagttaaaaatcaatattatacataaattccctaccaggtggatataaattataatacattacagcttatagaaatcaaataaaaacttagggcattctggcaaaccatctgtgttctgaaatcctacttttccctcgggtatctcatgtcccacacttcagtgctgctgagagtgtgatccacagatcggtgccagccttcaaactcttcctagtcttcaatgagataagcagagaaatcaaaagtgtttataaacatctagcaatttcacagattacactatgtcatctgatttaactagaagagggagggacttgtattctgtgtatctttaatgttttagaaattcattttattatactctataaaaatatgggttggtggaagattgaaaattaaaataagtggtcctttactgcaaatagttgagaagcactgccatgtgtggcacatgggcagactgacatgtagacagtgagggcactgtcaagcacacagcaggcaaggccaggaccaaggcctaaatgattcggctggtaaagagatgacaagccacttaaggattcagagagtttattacttatatggacagagagaggaagaatagccaaacatgcccactccctgtgtcttcctacatgccagaaaagatgacactaaaaccaaagggtcttggtgactgtaactccagctgtgagatatcccattgctggggagccaattctagactttatctggtctaaattactataacttcagttgtgggatactccattgctgagaagccaattctagacttcacttaagcacttttatagcctacagctatgtcctgataggtgtagggcagaaagcctcacacctcatgaagtgtaatgaaaaactgtctcaggacagcctcccacggggaataggaaggggagtgggagatggcctcatagcagctcctcagaggcctcccttcttcttgtgttccggaaggattgcaaggtgatacaccaagactttcattagctgtagtttaagcctttgcttgtatggcccttctggacacatacaaggtcatcaggcaatcatggcaaagccattcccctataagcaccagtgctaatgcacatagcaaatattgtaaagcttaaattcttttcttaagttttaagaaaaaaaaactaaaaagaaatttctaattttatcctccatcacccagtgatgtgacaatttcactcatgagagcactgatcttgtgaaatcttcatacaaagccagaaatcacatgccaccagcctaaatgactacccagacactcaacagatggggggaggggactcacttccatcagaaatgtcatttttcaaatgtgggcaatagttcacagagttgtttcttctatcaaagcatcaatatattcagtaattaaacaagcatttattgaaggctgccacatgccagaaactgacaggcacaggtcacagaaatgaagtatagatcctgtcctagagaaatgtctggtctagaagggagaaagatagaataaaagaaagtaattaaaatcatgagttacatatgagaaaaaggtttgtagaatgcactgaggagaaacagagaaaagagtgatcctctgagcatatgagactagggaaaggtatgacaaagagagtgagatatgattaaagttaaagagtgaatagaatttccccaaacagagacttacataaagctcattactgatcaaagaaagagcatatgaaaagcaatggtggtaaaaagagagcatactatgctcagagatactcttttccccaaaaacttctcatttccttgacttacatccagtgggccaagagaaagacaacaaggcataataaatagaggctgggtttgggggtcaaactttggttcaaattctagttcctccccttgcagactgtgtgaccttgggcaggaaactctttgattctatttcttcacccacaaaataatggaattaatgcctacctaccttaaaaagttatttataggattaagagtaggctgcatataaaatgactggcatattggaggtactaaatttatttttatcattgttacaatttttcttaaagagcttgggatgcttttgaatcagcctagtctttctggtacaggatggccctcttggaatatgaagcagcccgatcatgagcctgtgggtttttagtcttttcttctccctagttccccccactattccttatgaagcctgttttggccggccctttttcataggctagtagaggggctgctagaaagggtcctaggactccaggcctggtcaaacttgcgcaagcatttcagttacctattgaagcaaaacaaaccacccccaaacctaatggcttcaagcagccacaatgtattatttctaacagttcaatgagctaatggagcctgctcctgggatttcattcagctggaagatcaataggtcctgggttcagctgagccggctgagatgacttggcctttctctccacgtggtttccgtccttggttcttcagcgcctgcccagttcaggatggcgtccaagggaacaaaacagaagctgcgtggtctcttgaggctccagaacttctgcaacgtcacttctgccacatgctagtggtcaaagcaagtcgcaggagtgccaggattcccagagtaaagcaaaggactcttctgaaaggtaagagcatcaaattcacattgccaaggagggcgctcatgctctgctggcgtgagagcgtgagaaaacctgaggcagctggtaccactctcacttctcagcccttgaagtggcacttccgctcgggcacccctgggcactctgctggggccataagcacacgtgttggggccctgacacccttgcccaagaaccccatttcctggtgacctagatggaaaaggtctggaacaaacttgaattacacaggcctctcccctgacccctgaacttccctcatctcatccctaaaacaaggaggtgggactcatacctatcagagcccttcccacaggccaaagacatgttgagaccctgccatgcgctggacgccactggtaacagctcaggaaccttctctcactgtggtcatctctctcctaccctcagcacccattctccttcaacccccacccacatgcaatagtcctcccttatctgagggggatacattatgttccaataccccccctagtgggagcctgaaaccacaaatagtaccgaacccaattgccatcaactggaacacgtttctgttcatgttcttctcccataaatttaatccccttttcatcttaactaagcacttatcatgcactgtggccgtaaatttgcagtttgagctgtgaagaataaatttctttttccttcttcacaatttcatggatagaagattcgttctcgccgtagatcttagcaacctcagcatacaacttttttctttccttattatgtctagagctttcaccttttcacttaaaggaagcactttatggcctctctgtggcatatctgaattgccagcagcactaatcttgtactttgggaccattattaagtcaaataagggttacttgaacacaagcattgaaatcctaagacagacaatctgataaccaagacaggtacaaagtgaccgactggtaggcattatctacagtgtgaatacgctggacaaagggatgattcatgtcctaggtaggatggagccagatggagtgagacttcatcacgttacttaaaacagcactgcagtctaaaacttacaaattgtttatttctggaatttaccatttaatattttggggccatagttgattggttgactgtgggtaactgaaaccatgaaaactgaaaccgcaaataagggaatactactgtatagacacaggcatttggccctctgtccatttgtcacttacactgagctaacagttttataggttatgccaggtattgctctgagcactgtaccaatataaactcctctaatcctcaagacaacctaatgaggtaggcaccattactgattccctgtacaatgcggagactgaggcaaagtgtagttttatagcttaaggattaatgaccgccttttggatgaaaatgttctcatagtctgtcagctgcttttgtatagcccctccaaggatctaccttctaaaatgtacctgagttaagcataggatctaaggcatggtaagcaaaccaagccaacagggggcaaacttggggcggcagggttcacccactcagcagatgctcctctactgagctcaggcacagcctcaatgccttcaactccccttcaaggttctactacctaatctcgcttggaagaacaagcctctcactgaggaacaccttcctggtcattatctgtggatgagaaggaaagttttccctatggcccaacccaagccgaatgcttatatggctactgctgctgctgttgtgagaactgtcttcaggatgctgagaggatctgatgcccaatctgcacatgggtggagtgagggcagaaaattctcccatctgtccattctgggagttggcatgcacaagaaaacagacataatgatctctgatcagggaggcaataagagaccaccaaatctgggtggtcttacaaacattcaaagcatccacaggattgtgactgacattgttgttaagggaaagtgggaagaagctcactttgagcagagttcagcagcatcctgaataatgtgacagagcctactgggggacactaaagacgaggaacaggagctgaagttggtccatgtactatgtatggtggttgagctgaaccaggtcaaattctagctccatccaaacacactgtgtgaacctaaggatcttactgaaatctccaagcctgcttttgcaactccaaggtggggacagtcattcctacctgctataagattcaatgataagccaactaaaaagggtctggtacattcttggagttcagtaaatattgcagcatgctgctacactggcaagtattctaagggaagtgtaagctccaaccagaacagaaaggccaggtaggcaggggccaggaattttatatcgtaacactcctggcacagcctcacacaggctgaccttccttggacattgaggcagtccttgcagatacaccaacagagggagtagagcatggtggttagagtgctcctctgcactcccactccttgattccatttctgcatctgttactatctagctatagcatttgaggaaagttttatggcctctttgaacttcagatttttcatctgtaaagtgaaatctataaccattttaattatcttttgctgcattatcaaataattgcaaaacttagtagcttacaacaacaatcactttcacttgttttatttatttgctcactcttttgcagtttggacagagtttgacaacagctcatctctgctccatgtgccatcagccagggaaaaccactaggggtgggcaatttctttccaagttgacttcactcacatggctggcaagttggtggggctgtggtttaggagctcatcagagggtaattgttgaggcctcagttttcctccacatagcttctcctcattgttgagcctggtagcttcagggttttcaaactttttacatggcatctgggtttctccagagggcaaagtgcagactgccagggatcataagcactgtctcatagtgtctcaccatcagttctaccatatcctgtggattaaagcaggtatagccctgcccaaattcaagggtagggtactgcaaaagtgcgtgggtactgggaggtatgatttgatggggaccatcagaatagtagctcaccacagcctatcttcctcatagggctatggataggattaaatgtactagagcatctatggcacttgtcaagttgtgagtgacctgctagtactgaaaggcagcacagtggagagcctcccactataagctggtggaacagactccagacaagctgctccattctcactgctcactagaggacaagctgcttaacccctgtgtggttcgaattcttcatctattaatataaaacagagataataatagcacttgccttgtagaattgttgtgaggattaaataagctgatgtttgtaaagtgtttaaaaccatgcctaggacatagtaaacatgatggagatccctgccattattataatcctaatcagagccaactccagtctctgagtcttggtcatgaatcaagtccctggcatcaacacttcccatgaagcaaagtgatgactacagaggtgttgtcttccaccttgttcctggctgccccttgaggtcactgagggcctttccctctccctgcaaccctggtgctcctttccaggcatcccagtatgatggaccatagacatttactgttggattctggaccagtccttgggcagctgcacccttaaaaccctagagtctggtcaggtgctgaatgcagctgctcttgggaaaagacctggagccccactcaagctgatccccaccactctgtcttactgaaaaggatcacacttgttgtcttcttttgactttatgaacaaccaactccctcttggaatatatctctctgacttttccttgactgatcagtgcatggaaacaactctcactaatcagagagaactgtcctcctgggtggtaaaaggcgatttgcacagtgattggaaaataatatttttttatatctaatccataattaggtcttggagaaacaaattaagtgaaggcgaaatcatgtttctttaaagcatgaatactgatctgcataattatgtacatttaatggttttaatttccaagggaaactatttttaaaatgagttcggaaaatgtatttttcccttcaattctatgtctataaagttaagtccccaggcttgatactgcattgacccaacctgaaatcctagctaattagtgatgacattttaaacctaatacagcaaaagtatcttccacctctgagggcatcctgccatgccaggtaaagaataaatgcaagaaagagaatccccaaagtgtggtgcctggggacttgctctctctcgccccatatcaccattacattctcaagtctccaggcctaagtcttctcagtggggctcttgatggtaacagttgtgttattatgaatatataagacagcattctgacatccatttttgttagtagcaccctattttacctcagtgagaggtggtgtcataacaggaaacttgcagtcagacagccctgctgacttaagtttgtttaggcacgaataagatacatgaaaagtgctgaccatcagttgtttttgacctatataaatggcaattttatattgttcagctttattagatgcctgacatatggcaagaactcagtagattttaggtgttattattattgtcattggcctgatttgtgcaactcactgtaagtggaaatagtgctactgcctactttctaggttgttgggaaaattagattaaagtagataagataatgtgtctgtcactccccctggcacacaagccagtttcaaaacaatttagctccttctttttgcccattttgggtttccaccattcattttctgccaggtaaactataacaactcaacagaagtcacaaagagccctgcatcctttaatcatcaagcctttcagtgtcttggaaaaacatatgagactggtcacacacacacagtattggctagtgagacagaagtcaacaatgtcaacaataagtatacatttgcaacacgttctatagtgtctcaagcacaatttcctcaattttcctgttttatcttccctaagggctccagaaagtgagaattatgcctggatttcctgttcagtagccattctgctctactgcagcaatttgaggttccctggctttggtaaaatgttgttgccagagcatcagcagggccatcaaactttacccaaagcaccaagattctcagatgataacacaggtcagaaggcatttcgtcaaagtggacaaatctgcactcacacccatgagctgtggcttcagcaccatgcactgagaacccaataacagcacctctaacctgaagttaaagcctttggtttttcagtccttgatgaattcttggccagctcttcaaaaaacaaaaaggctctgagctcagctgagcaaattaaaaagtaactttttacgggtatcccaggaagaaggaagcacttgccatgcactatttcaatttttccactcaacagtgcctgcctccagttttacaattctcaatgagctccaaagaagctaaccagttagctcctggtcatatatcaagtgtcatgtgttaaacactaatggttttatctcacgtccccaaaccaaagatagcagctttagaaacagcttgtttgggcttcagcacaattagggatgtgtagagaggagaaattgactcctggagttctttccagtttctgatcacccattcaaacaagtatttactgagccctttctatgcaggtgctgcattggggactagagagccaatgctaagccaaggacaaggtcactgctctcacagtgcccacggtgtgcagaggtaacaggcatacaaattagcaattacaccgttgtgctgtgcaagtaagtgcagggcagccaacctaacccagcatcatcaggggaggcccctaaagaagaggcaatgacaaggagttctaaacggtgctagccagcttaagggaggaagctgggatagaggccaggagacagataaaaccactatgggtccccagttggtcagcatccaacagaacacactctgaacactttagggtgcaaattgccatggtggcccctctgtctgccagacagtccctatgccatgctccccccacaccccccaaaacacacacacactttcaaagtctcatttggcggtttactggattattccaaaccattctgcaattcagaattgtgaagctaccacaggaacagaaaacaaaagaaatgcttaagacagggaaacattgttatcagcctacttgaaatgtagtttgctcctctccaatatgttgaaaacattgaaaagccttcccaaatatctcaaacatctgctgagtgggccaaatacttcctcccatttgctccacccacagtcgctgtatccatcatgcttcagattaagtgacactcaattacaacatgtacaattttgcaccgcattcctctatcaagggctcatgctggagcagtcctttccccactgtctcctgggtgtgcacagtgatgtcgatgaaatgcatatgcatgataattaaatttgacataattacttttccaaatgatcactgacactccattgttccaaaaggactaatcctcagagcttccaaacccagtctggaaatttctggatctaaatgagatttcaaataatgtaatttataataaccaagatccccaatgaacattttaatatattctttctttgttacagtcatttgatggtaaatccaactgaattagaattctcctagggtgtagagcttcctgtctgggggtgccagctgggatgtcccagacattctactgtggaccttgaatttgtgagttgctccccagtctgccccaatgtgggaactgtgcctcaatcagctttctcctttcagataagccctagactgctgcgtgtgccagagagagggcaaaaggctgccagctccctatccctacctgctgaccaaaaaagcgacagaggctttcacagacatgagaaaccaggaagagagagggcaatggggaagagaagaaagtccccctgtcttgaagtcgtaacaatgcacaagtgatcaactcagtttggagcgtgggaagaagtgagtgcctgttgtgagccaggtgacttgtcaggtgcctgatacacatttgctcactgatttagcagaatcatcctaggagacagacaggaggcccctgagtagcctcagggttaaaacctagtccaaagtcacagctaggatttgcaactatgtgtataagactacaaaccccacactatttctggcaactgggaaactgcagcagagcacagcatccagggataatggaggggtggacagcaaacaggcaaagtcctcctgtggtcagagcaagagtgacgtccttctccagaaactgagacttcatttctgggagaatgggcatggaggactagagtcttggtctttttgccagtgaccccaagtcagctgcccaccttgcagtcctcatctcattttcttaattttcctacttgtgctctctgtattttacatcttggaataaaggaaggcacacccatctgcccaaggatgcccactgagataacaggtcccagatacattttctcttacgaggaagagcaagcaataccatcaacttttgtgaggctgtgagagggcaggctgtagggggacccttttgttcttcctctcaccaaagcccctggcacactgatgtctgacactccattttctcatcatactctatcccactaccttctgatttacataatgcaacttatctcaggaaatgttttccaaatcctatgttgatttctcataactgtgacaatttatctggttaggaaaacttcaagtgacaaaacatgacctgcagacatcaccaacatgggtctcatttgtaatgcacatttttaccttactcactggaaatggacagcacaaatggcactcacatggtgatgcaggtatccctcctatttttaagcagtgtcctctgcatttgttagaatcatcagtagacagatttgagtatgtataacatttattaactgtaacattagctctgacatttcagtttaatcagtgttactacagacaagtgaagtaattctcttctactcgcacataaacagtattatcttttcctttccaaaaggtaccaattcatgatctaaggcacttgggaaataatttcatctctgtgtggggaggcagatgaaaaaaatccagcaaagtctctgagagactccatttaaagattaaataatagataaattacagatgaggccacagagaaggagccctctggagactgctggatttttcaatattagttcttaataaaagccaaagagatgcgttttctgcctgtaaaactccagtttgttcaggaacaggatgatgagcccctgaagtggtgagtctttccatgaagagtgacaggaggtgaccaaaatgctcagtaaatccttcccaggccaaggggcaactgtgttcaataatcagagggatccagtttcattctaggctgccaagcactgacttccctgcaaagtgatggttctcaaagggcagcacagaatccccccgaggagtggaattttaagtaggggcacatctggcaaatgaactcaccacagggcctcaggataaattcagagccttcaaatggccccgcatagcactttttggtagcattcacaagtcctcagtgaagcccaaagtgggcagagagagtaagcccagaatggacaaggttcccctggtccctttaagaaccagtcatcttgatgtggggaaagtcagccacctgggctgctgcaggtgaaccccgtgccctgcaggggtccagcacaatacagggcccaggaaatgatggttagacacaggcacatgttctaaagttatccgaaagcctcacaaacacatgtgggctttatttctgagtctaagttagtaaacccatgacttcaagtttatcttcctctccactaagttagtaccttcatgtcactctcaaaaaacagctgtttgtgaagctacagtttactctgcacatagcttgcattgtgtttaacattgcatgcatgtcagccatagtacaggcccatacacaattcaaggaaaagagaatgggaaaattgaaaacaaaactcagggttacttaatttaaaattccacttgtctgaaaatagaaagggtcatcagactatataacagaaatgcagcagggatttttctttgccccaaagaggacaaagcaagtggttagatggtttctttgaggattccagtacatctttatacctgatatttatttagaatttaggatggttgcaggtgctgaaaagagtaactgatgtatgaatatatcccatttaatcctcaaaacaaccccataattttgtattatgttgtattatctcaattttcaagcagatgaaactgaggctcatagaagttgaataactagtccatggtcacacagcaagaaaatgggtcaactaggacatggtatttgcttctgaattccatgtgtaagtgatcatgattacccttagaaagctctgcatccagagggagatttagctgcacgggctggcttaggcctcaagaccctcctgttgctctggcaatgctgattatcagggaaggtcctagcaatgtgttcccatgtgtctccagtttagtaatatttgaaaaagtaggatacaagttgagcacctctaatctgaaaatgcaaaatccaaaatgctccaaaatgtgaaacattttgagcattgacatgacacaaatggaaaattctatacctgacctcatgtaacacattgctgtcaaaatgcagtcaaaattttgtttcatgcagaaaattatttatgatattctataaaattaccttcaggccatgcatataaggtgtatgtgaaacataaatgaatctcatgtttagacttaggtcccatccccaagatatcacattatttatatgcaaatattcccaaatcagaaaaaatcagaaatccaaaacacttctggtcccaagcatttcggataaagaacactcaatctgaacttaactggaatcaattcagaccactgttccacccaacttcctgttagccacactttttcttgtatctactgctgtaggatccactgtcagaaattttaggaagctaagttttgggtctgagtttagtgggatactttcccatggtctagtttcacttccatgcatagaaaacatattgctggctgccagagggggacgattttaactgctgtcatgctgactcaactggtctcataccacagaggtgcacaggtgaggttgtgtcgtggcagtacatgtgctgcagccctggcatcacaagtatgtggtggtagaggagaaacaaggtttgaaataaaccaagtaagaagccagccatggaaaaatcttccaaatcttccacctcacaaaagaaacttggaagggtttccttaaatttgacaatagggactgggcacagtggctcacgcctataatcccagcactttgagagactgaggcgtgaggactgcataagcccaagagttcgagaccagcttgggcaatgtggtgaaaccccatttctatagaaaatttaaaaattagcctggtggggtggcatgtgcctgttgtcacagttacttaggaggctgaagtgggaggatcaattgaacccaggaggttgaggctgcattgagctgtgctcaccccactgcactccactctgggaaacagagcgagatttgtctaaaaaaaaatgacaatagttttaaatttacaacacattaccaatgataagaaaccaaacaaaacttttctaaacaactactaataaaaaactttcaatcaaccataccagaggaaagatgaaataatcttgctcttctctctatgggacattaaattcaaaaggattatcatatgaggagaggatcaaagagtagccaaaaatgacaggggagaaattattatggaactgtgtgaaaggcagatgattgtgtgtgtgtgtgtgtgtgtgtgtgtgtgtgtgtgtgtgtatgattttgttgtatctgtcaggtttttcatgttttttagtatattttattataattttttctcattaaatattcactttcatacctgattttacattcacaatttcatattcttttccttaaagtaaaacctttgaaactgcatacacttcaagtcttagaaagcctggatctgccctgcctgtgtgtaactagaggggaagagccttcctctgtatatgccaagaatatatccatgcccctcttgtttcctgtagtcaaatccacgtctgtcattgtcaaattccaataaggtttataatttcttgggaatgaacattagcgcatttggcagagttattcccagaactcgagatcaggagaagctgggccactcaggcacagctatttgtcttatgaaagttgtagctaatatttccctttttactttgaccgctaggaaatgtagagccaagttggcgaaatgtagcaattgtataaactcatataagttacacttctatgagcctatcctcctcccacaccatcacccccaatcctatccccaactttattaatttcttgtcctccattacccaggctgcaattccaccagttatttttttctgatccatttttgggtgtgttagctgactcaagttctttactgaatcatattcattaaaaattcaaataatttaaatagcatatctaatatacaagcagcatgcttatttttatgatgggaaaaagaactttgttaaatgaatagatagacaaatacgacctgaaagttctgagtcattttcattttgctgaagttttgggcctgttgttaatcattccatgggcaagagtcactgggtcagggagatggaaaaggggcaaggaggaattcaagggaaagcggtgggcatttcttcagttgtctttttgtcttttcatatgcttgacagctggcaatttcctctgacttcatgcacacacttcccaaatgtggctcctattccacctttgatatttcttttggctgctgcacccatcccgtcctgatgcagaatcatttggcagaagttgaaaagcatgagatgtttgttgagagctctctgctcacaaaaggctatggctggtgccacagctatagtgactacacaggcacattagacacattgagcctttacattgctgtttgcagaaaaaaatcctgttgacaagggatgcaaaccacaaaagcttggaaagcaaaatcacagagttaagagatgcatagtaatccccaaacagaacaggaaatgcaaaccccagagactttggtggaaagttttctcaccttcccaggaaatcccgagctaaaatcgattaaaaggaaatgaaagctgagaatgttttttccatgaccaacccctaaggaagtgtggaaaatatgaagtattcaataaatggtgttggaataactggatgaccatctggaaaaatattaagtggaatccatttttcacacaacacacaatacaccaggatgaattccaaaaaatcaaggatttaaacacatcaaattgaaactataaaatttctagaaggtaacattgaaaaattatttaaaatgtagagagcataaaagaagaaaatagtaattggactacgtgaaaaccttccaagtggtaaaaaaaaaatgataataacaaaaagaaaatccaaaagacaaacaatattctgatgaaaatattggcaatgtccaatgcaaagggtaatctctttgatgtataaaactcctataaataaacaagaaaggcacagatcaacaattcagtttttaatctggaaaaattataagactagccattaacagaaaaggaaaacaaatgcctctaaaacatttgaaaagatacacagcctcatacaggataaagaaaaatacatttttcaattattctgtgttaccatttttcacctaacaggttggcaaaaatcccagtttggtaaagcactgcagtaacaaggctataaggaaattggaaccccaatgcattgttgacagatatagaaattgacccaacatctgtggaggcaacttggcaatatttagcaaagtcacaaacacacatatacaaatccttgtaaccagtaattatatttttaggtatttttcttaaagttattctcacacacttgtgaattaatatatggtcaaagtcatttattcaatactcttttcagaagattggaaatagcttaaatgtccatcaattgggtgttggtaaaataaatcatgctctattcactcaaaggaaagtattgtacttgtaaacaaacaaaaagactatagtaatgtacctgtaaaaaaaagaatcaagaagttctttctgaactaatatgaaaataactgcaagaaaaatggtgaagaggccatggaatattatgcagccataaaaagggaataaaatcatgtcctttgcagcaacatgggtgcagctggaggccattatcctaagcaaattaataccagaacagaagaccaaatactgcatgttctcactcataagtgggagataaatgtggggtacacatgaatataaagatggcaggagctggagccaagatggctgaataggaacagctccggtctacagctcccagcgtgagcgacacagaagacgggtgatttctgcatttccatctggggtaccgggttcatctcactagggagtgccagacagtgggtgcaggacagtgggtgcagcacaccatgtgcgagccgaagcagggcgaggcattgcctcactcggaagtgcaaggggtcagggagttccctttccgagtcaaagaaaggggtaacagacggcacctgggaaatcgggtcacacccaccccaatactgtgcttttccaacgggcttaaaaaatggcacaccaggagattatatcctgcacctggctcggagggtcctacacccacggagtctcgctgattgctaacaaagcagtctgagatcaaactgcaaggcggcagtgaggctgggggaggggcgcctgccattgcccaggcttgcttaggtaaacaaagcagcagggaagctccaactgggtggagcccaccacagctcaaggaggcctgcctgcctctgtaggctccacctctgggggcagggcacagacaaacaaaaacacggcagtaacctctgcagacttaaatgtccctgtctgacagctttgaagagagcagtggttctcccagcatgcagctggagatctgagaacgggcagactgcctcctcaagtgggaccctaacccctgacccctgagcagcctaactgagaggcaccccccagtaggggcagactgacacctcacacggccgggtactcctctgaaacaaaacttccagaggaacgatcggacagcagcattcgcggttcacgaaaatctgctgttctgcagccaccgctgctggtacccaggcaaacagggtctggagtggacctctagcaaactccaacacactggcagctgagggtcctgtctgttagaaggaaaactaacaaacagaaaggacatccacaccaaaaacccatctatacatcaccatcatcaaagacgaaaagtagataaaaccacaaagatggggaaaaaaaagagcagaaaaactggaaactaaaaagcagagcacctctcctcctccaaaggaatgcagctcctcatgagcaacggaacaaagctggacggagaatgcctttgacaagttgagagaagaaggcttcagacgatcaaactactcctagctacaggaggaaattcaaaccaaaggcaaagaagttgaaaactttgaaaaaaacttagacgaatgtataactagaataaccaatacagagaagtgcttaaaggaactgatggagctgaaagccaaggctcgagaactacgtgaagaatgcagaagcctcgggagccgatgcgatcaactagaagaaagggtatcagtgatggaagatgaaatgaatgaaatgaagtgagaagggaagtttagagaaaaaagaataaaaagaaacgaacaaagcctccaagaaatatgggactatgtgaaaagaccaaatctacgtctgattggtgtacctgaaagtgacggggagaatggaaccaagatggaaaacactctgcagggtattatccaggagaaccccagcctagcaaggcaggccaacattcagattcaggaaatacagagaacgccacaaagatactcctcgagaagagcaactccaacacacataattgtcagattcaccaaagttgaaatgaaggaaaaaatgttaagggcagccagagagaaaggtcgggttacccacaaagggaagcccatcagactaacatcggatctctcggcagaaactctacaagccagaagagagtgggggccaatattcaacactcttaaggaaaagaattttcaacccagaatttcatatccagccaaactaagattcataagtgaaggagaaataaaatactttacagacaagcaaatgctgagagattttgtcaccacgaggcctgccctgaaagagctcctgaaggaagcactaaacatggaaaggaacaaccggtaccagccactgcaaaatcatgccaaattgtaaagaccatcgaggctaggaagaaactgcatcaactaacgagcaaaataaccagctaacatcataatgacaggatcaaattcacacataacaatattaactttaaatgtaaatggactaaatgctccaattaaaagacacagactggcaaattggataaagagtcaagacccatcagtgtgctgtattcaggaaacccatctcatgtgcagagacacaaataggctcaaaataaaaggatagaggaagatctaccaagcaaatggaaaacaaaaaaaggcaggggttgcaatcctagtctctgataaacagactttaaaccagcaaatatcaaaagagacaaaggcggccattacataatggtaaagggatcaattcaacaagaagagctaactatcctaaatatatatgcacccaatacaggagtacccagattcataaagcaagtcctgagtgacctacaaagagacttagactcccacacaataacagtgggagactttaacaccccactgtcaacattagacagatcaacgagacagaaagttaacaaggatacccaggaattgaacttagctctgcaccaagtggacctaatagacatctacagaactctccaccccaaatcaacagaatatacattcttttcagcaccacaccacacctattccaaaattgaccacatagttggaaggagagctctcctcagcaaatgtaaaagataagaaatcataacaaactgtctctcagaccacagtgcaatcaaactagaactcaggattaagaaactcactcaaaaccactcaactacatggaaactgaacaacctgctcctgaatgactactgggtacataacgaaatgaaggcagaaataaagatgttctttgaaaccaacaagaacaaagacacaacatacgagaatctctgggacacattcaaagcagtgtgtagagggaaatttatagcactaaatgcccacaagagaaagcaggaaagatccaaaattgacaccctaatgtcacaattaaaagaactagaaaagcaagagcaaacacattcaaaagctagcagaaggcaagaaataactaaaatcagagcagaactgaaggaaatagagacacaaaaaacccttcaaaaaattaatgaatccaggagctggttttttgaaaggatcaacaaaactgatagactgctagcaagactaataaagaagaaaagagagaagaagcaaatagacgcaataaaaaatgataaaagggatatcaccaccgatcccacagaaatacaaactaccatcagagaatactataaacacctctacgcaaataaactagaaaatctagaagaaatggataaattcctcgacacatacaccctcccaagactaaactaggaagaagttgaatctctgaatagaccaatagcaggctctgaaattggggcaataatcaatagcttatcaaccaaaaagagtccaggaccagaaggattcacagccgaattctaccacaggtacagggaggaactggtaccattccttctgaaactattccaatcaatagaaaaagagggaatcctccctaactcattttatgaggccagcatcatcctgataccaaagccgggcagagacaaaaccaaaaaagacaattttagaccaatatccttgatgaacattgatgcaaaaatcctcaataaaatactggcaaaccgaatccagcagcacatcaaaaaccttatccaccatgatcaagtgggcttcatccctgggatgccaggctggttcaatatacacaaatcaataaatgtaatccagcatataaacagaaccaaagacaaaaaccacatgattatctcaatagatgcagaaaaggcctttgacaaaattcaacaacccttcatgctaaaaactctcaataaattaggtattgatgggatgtatctcaaaataataagagctatctatgacaagcccacagccaatatcatactgaatgggcaaaaactggaagcattccctttgaaaactggcacaagacagggatgccccctctcaccactcctattcaacatagtgttggaagttctggccagggcaattaggcaagagaaggaaataaaggttattcaattaggaaaagaggaagtcaaattgtccctgtttgcagatgacatgattgtatatctagaaaaccccattgtctcagcccaaaatctccttaagctgataagcaacttcagcaaagtctcaggatacaaaatcaatgtacaaaaatcacaagcattcttaaataccaataacaggcaaacagagagccaaatcatgagtgaactctcatttacaattgcttcaaagagaataaaatacctaggaatccaacttacaaggaacgtgaaggacctcttcaaggagaactacaaaccactgctcaatgaaatgaaagaggatacaaagaaatggaagaacattccatgctcatggctaggaagaatcaatatcatgaaaatggccatactgcccaaggtaatttatagattcaatgccattcccatcaagctaccaatgactttcttcacagatttggaaaagactacttcaaagttcatatggaaccaaaagagagcccgcatcgccaagtcaatcctaagccaaaagaacaaagctgtaggcatcacgctatctgacttcaaactatactacaaggctacagtcaccaaaacagcatggtactggtaccaaaacagagatagcgatcaatggaacagaacagagccctcagaaataacgccgcatatctacaactatctgatctttgacaaacctgagaaaaacaagcaatggggaaaggattccctatttaataaatggtgctgggaaaactggctagccatatgtagaaggctgaaactggatcccttccttacaccttatacaaaaattaattcaagatggattaaagacttaaatgttagacctaaaaccataaaaaccctagaagaaaacctaggcattaccattcaggacataggcatgggcaagaacttcatgtctaaaacaccaaaagcaatggcaacaaaagccaaaattgacaaatggaatctaattaaactaaagagcttctgcacagcaaaagaaactaccatcagagtgaacaggcaacctacaacatgggagaaaattttcgcaacctactcatctgacaaagggctaatatccagaatctacaatgaactcaaacaaatttacaagaagaaaacaaacaaccctattaaaaagtgggcaaaggacatgaacagacacttctgaaaagaagacatttatgcagccaaaaaacacatgaaaaaatgctcaccatcactggccatcagagaaatgcaaatcaaaaccacaatgagataccatctcacaccagttagaatggcaatcattaaaaagtcaggaaacaacaggtgctggagaggatgtggagaaataggaacacttttacactgttggtgggaccgtaaactagttcaaccattgtggaagtcagtgtggcgattcctcagggatctagaactagaaataccatttgacccagccatcccattactgggtatatacccaaaggactataaatcatgctgctataaagacacatgcagacgtatgtttattgaggcactattcacaatagcaaagacttggaaccaacccaaatgtccatcaatgatagactggattaagaaaatgtggcacatatacaccatggaatactatgcagccataaaaaatgatgagttcatgtcctttgtagggatatggatgaaagtggaaatcatcattctcagtaaactatcacaagaacaaaaaaccaaacaccacatattctcactcataggtgggaattgaacaatgagaacacatggacacaggaaggggaacatcacactgtggggactgttgtggggtcgggggagggaggagggatagctttaggagatatacgtgatgctaaatgatgagttaatgggtgcagtacaccagcatggcacatgtatacatatgtaactaacctgcacattgtgcacatgtaccctaaaatcttaaagtataataataataaaataaaatttaaaaaaaagatggcaacaatagacactggggactcctagaggaggaagggaggggagagtggcaagtgttgcagaactaactattgggtactatgctcactacctaggtaatgagatccatcgtagcccaaacttcagcatcacacaatataaccatgtaagaaacctgcacctataccccccgaatctaaaataatagttgaaatcatttaaaaattttaaattttttgtaaaagaatattgttgaaaagggggttgagaaatatctattccaatttatttggtttaaagaactgtatatgagaaaataacaacattaggcatctcttcaggcagggtggaagtgaggactaaacacaaaagagtcactctctttgtgggtggggagcaggactttcactatataatagttttgttcaaatttttgcaccacatgaatatataatataatcaaatagtttaacaatcaaaacagatttaacctaatgaatttttttaaatatatgtaactgagatcagaaaaaaaaaacatactcaaaaaagcattggtggtctcattagttagccagatggtctagttagaagccatgcactgaagagacttgggtttgtgtcccaacctaggcacaacacctccacgttcttaactacgatgcccttgcctgctggaggaaatggttggtgtaaggcctttgctgctccaagagaagactacaaagataagcaagcagctcttgatgttatgggcccaggaataagcacttcacctatgcaatgtcaaataaaaattaatcctaaaaacaaccctttttataagggacagaagtgaggctcagatcaatttcatgctttccacaacaaagaacgtagagcagacaattgatagcagagaaaaatataaaaggttactaaataaatatgaaatactctcccaccttctccacttaggagaaaaatagaaacacacgcaagacagtgccagggtcctggctggggcagagctgaggtcacctctccagggaagtggcaagaactggggtggcctgtgttgagacctccacatagccagcagccgaggggaggcagcagaaggggagatcactgcttggaagccacaccttagaatggaggactctaccaagcgcagcgaccgcagccctaactcagattgtcaagcctctatgtcaacaagcaaatgctaccggtgatccaggtgcccaacatcctctgccaacgcagaggaggttggcctgcaagggcactggctctctgaactgagtaaagtgaggcagggatgaagctaacagccatgttctggcatagtcctcaaatctctgctgtgtccactgaatctcaagtctgctagtccttgtgtggcttgctcactagccaagctttctggggacacagggaggcagaaagcagaccacagtgagaggctagcaaagaaatgcatttgctacctatagctacaacaaactgtggtattggcagctgaaatcattatctggataaaaacaaacagcaaatttgacaataaaatgcattacttcccagtgtaatgggaaagggtcctatatcagcacaaacctccaccttcctctctaattctccaacctaatgtataattacagctgggcaccttctcctctggcctaccaaccatgccctctgccctaataagtgggcatctaaatcagggaggtggggatgttcccagaattagcagtgggcaaaggccaatgctacaaaaacctggggtccactctctcccctgggccctcctttctcccagcctgtaatatttccagaagagctttgcctacctccagcctactgtccactcaacaaatccattcatatcttctaggagtccccataatgcctgtcaactttgctgaacattggtatccttggaagactttaaaatagactgatgcctggctcccacacctgggcttatgatttaagtagaatggggtaggacctgggcactgggatttttaagagcttccaggtgattctaacatacagcaaggactggagacccatgtcatattgttgtcttgttttgtttctttgaagttctcatcatgtgtcttcatagaaattacaatctaatggagaaaacagccatgatttcatgtaaaaggaaattgccaatttacttgctttttgcctactaaagagacttctcaactggtcatagctcaggataggaggatgaactgaccatgggactctcccagttttcgcagtgaaagtcctacctcccaggaaattccttagtcctgggcaaatgaggaatgttggttaccacagccaaggacacaacatcactcagcagtgatagacaggcattcagcaatcatcagacactcttgtacgcagaaatttagtcctaattaaaactagggggatgatattgaggaaagaataaatccacaccccaaatgtatttctgtacatggtctatcatctcaagactcattaattaacaattcttgggcatcttggtgtcaggttctgttgtccatgggatctgttggaagacactatgttctgttgtggaattcaagagataaataaaagatgaagctggaatcaatgggactagaactacatggacgagaaaaggggttctgaggagcacacacagggagcattggcactggccctggaggggctctggaagtgtcagagcagctgtgagagctcaggggcatgagatgaacccgtgtctggcacacctgctagacaagcagaaactccagtgggaatcatgatggggaccagggccatgcagtgacaaggtgaggaacaggtggctcagcaaggtaagaggtaggccagagcaggggttgagaggtggggacagcattgaatgaagtgtcactgggaatgaaatgccactccagggctaggttgtcaggaaccatgtggtattcacccccaaaaaataattcattgtgcttcccttttctgctcatcattatagcgccccaggatagtgtgataagcaaaaagatacagttcctgacctcggaaaactcactttctagtgcatgggaagaggaaaaaacaaaacaatttcagggcaaggagacaagtttgacctgtgtgctgtgctgatgatttgtattttaacttacactcaacagaaaaccaagaattcccagcagtaaaaacaacatagcaaggtgttttagagaaacttctgagacagaaaaagtatacaaaaagccttcaaagcttctgagccagcttcctgaacacccagcctggaggcagatagtacaggtcagaccctatttccagtctgccatgctgtgggatcctgggtgagctatgcctcccttctgcaaaatggggccaatatcagtgcttaatcatggaagaccagacagatatagctgggaagagtgtggaataaagacagcatctccaggaaataataatatttagaggaggatgaaggagaagaaagcagctatgaagtctgagaagcagccaagcctttaaacaaaaaacagttctggaaatgatttaagttgtcatttttcaaaatgtcttcagtgaagttaaatacttttatttcttcatgctgttcatgcaaccaagctgctgttggagaaaagttgggtgaaaaagctctgctgcctgtcaaggaaggaaaatgtagctcggaagccccggcccaggaggaccttgtcgaatttgctgctgtttctcagtctacgaaggcctccaggcaaacacataaagcacatcaaatgggaacaagactcaatttttgttcccctgcttcactctactggaaaaatccaaaacctgccttaggagagtgaaatctctctaacttgatgggagtcttctcagttctcctgccagggtttcatccctaccatgtagtgtaggcatcagatgctcactgagtacccactggctactgcatgccaggccctgtgctcccagcagacatcaccactcccagatgtttcagaaggacagacacccaggtaacgatagactcctttgcaaatcagaaaggacaggctcaactgatcctctcccggcccaggctgggcttttctgttttaatcaaaatatgttgaataccagaaagattggacagcatttgacagcattatccactctacaagcagaaatgtgacgaggttaattacatcatctaaagaggtcctaactgccccttccaggcatgttctatgagtttgcccctgaatgagcagtcactaatacctcctaatctcacacaacaggcactggcaatgcagccctgtggagatgaagacggaaagggaaaaggaaagttacacatggaaatgatgggtgctttctacgaaggcaccatgtgcagggaagcagtcctttgcatttggacctggttggctttgcatgctagcagagtctgtgggatgttggaaagatgcctgccggagaaagggaaggggtaaatgactagggcaggtgcagcaccatgcagattctccatcccatcttctttccaggcactagcccatgtcatgtgctcccttaaggctcagcagtgccaagtcaagattggatgaaataaaaggggcagagcagctctacctcgcaccatgcttggcattgggaggacatcttgagatcgttgtctaatcccagccctagagcatcagagcaaatttaccagagaggagaggaggatctgcgaggccactgtccactcagagccttgctgccatgggcactgcagtccagatagaccagaaccacagccatcagcagctgggattcagaacatgcccagatgcaatggccaccacatcccccacagatttacaaacccaggcctacctggaggaggtagaggaggaagtggggctggagtgagaagaactggtataatctggtgttacagagagccctgtttctcatcctgcaccacggggcagaagtcctgtttctcctaattactattctgtgaccttgagcacattacttaacctcactcagcctcagctcccccatcactaggatgtggatgataatccctcctatggggctgctgcttaccagtactgagccgatgttttcgaaatgcctggcacaccatgggcctcatacaaggttagttatgacaatggcacttctgagccagcttcctgaacacccagcctggaggcagatagtacaggtcagaccctatttccactctgccatgctgtgggatcctgggtgagctacgcctcccttctgtaaaatggggtcaatatcaatgcttaatcatggaagtcaagtcacagtggtgttctgaggattaaattaggcatttgatgcaaagccattcaaaaacttcctggcacatagtgttttataaatagttgttgctattataattgcacaagtgtggtcttgtaaagagagaccagaaaatgccctgcttggcccaggggtgtgtccatggtgaacaccagagtgcttggaaacccagtttccaaaggagggccaagcagccactgggctcaggagcccactcctgggaaggaatgattttctctattacatgaagtttcctccaatctctacagagttttggagggctcgcctgatctccccaaccagaaggggaaatgaagtaggtgcttctaggattaaaagctggcatttgaatctctgctcacagatggaaagtaaaagtagcagaacccaattttaaaaaatcaatatcaaattaaggataatttttcctctgctagaaggagactaaagctaattcccctggacttctgagtcataatatcatttggggaagaacatttcccttcaaatattgagacatctctgcgtgctcccactatgccacataagcatgattagctccatcagaaattaatcctttgttccctgaaatccatatagttacttttttgtagtatgtttctgacaaatgaataatctacttttgtaaaatacaacattattgattacatgagctgcagtatagcagtggctggccagttgcaaacgtggtggttgagatgataaaatgcctgtgtgatgctggagcgtaggtaacaagtgggtgactgagggtcaaactttcagaccacagcatgtgactcaggaaatgctaactcattccctcaagcctcctgagtaaaatctgtatttaaagagcatctactacatggctggcctcatgttgggcattttacacagaggacagtgttatataagcctgtgaagtaagtatcatggccttcaatttccaatgaagaaagagagatatattgtacatttgaaaaaaaaaaaaaccaaaaactagttcaagatcacacagtcagtaacttgctgggcctggatttatacacaaaaatgtctgggcttagaatccatcatcttaatcactaggccctgacaagctcttccagacctcaatggttatttaggaggccaggaattctcaacagtttaacattggtttgatctatttttgttagtcttttttgtcaaaattaatcttcctaaaggcaaaaaatttaaagtttaattacaataaatccaaattaatgttctcataataatttcataacatttttaaaatgtttacaaagccagccaggtctgggagctactgcaattagcccaaaatcacaataacagcaataataccaattacgacacttaacaactgaccctcagacaagaaatgtgagtgcacatgcacacacacacacacacacgcacttacacagtaatcagaatccacattgtaacatcatgcaaggaaaatgtttggaaaattgacaatcaatgccttttatgagatctctgtaggacgggcagtatcattgtctactgacagcttgaaaacagaatttcttcattcattcaacaaatgtttattgagcatgccaggccctgttctaaaccttggggacccagcaattaaaaaaacaagtaaaaatcactgctgtcttatatgttacaatttagtgaaggtagtctaatacaggtgttatatgggatgagcaatgggaagtgttagagttgaaatgttaagtgaacaaaagaatctcattgaagaagagttatttgagtaaaaaccttgaaagattgggggcagtaaggcaaatgagtatcaggggaagggcattctgggctgagggagcagcgagtgcaaaggccctgacgtagatgcatgcctggtgggcataaaatgagtgcaatactgccagggcagctgctgtggagccagggatgtcacaggggactgggtcacatgggcctcagagactattctagaaaagattcaagtacaaattagtgtacgtgcacgtctaaatcttcttccaggaggaattttgggcagctgacccagttaattgcaataaaagacacacattgacatgggatcaaaagaagaaagaaaatgaataaggatggaaataaactacagccagaacggcactagaaatgcctaaaaagatgatctctccacgtctccaacagctgggcctcatttttcttctcagcctcctaggagtcacagttggcacaaacagggaaatgctattcatcaccaaatgcaccatccccagagaataagtgccaacaactcaatctgagggattaaaactgtttttggcattgtaattagaaaagactgtctcccgggggatcatatatccagactctgtgaagcaaagtggacaacagcatcgctagcagcacccttgcaatgaaggcgacaagaagcttcccagaccctgtttcttaggtaaagtgcaaggtgctcaaaccagttctgccaagggtgcagagagggctgggcatctgaaggcgctactctctgacagagagactgaccacacacaggtttataatatcaagaagtggggcaagacctctcatccttcatgtaatcctcaccgaatggagttcctcgaatctgattttatggacagaaagatagacagtgagctcaggactgtcgtggcattgcccagaaacccactgaatatagctcttgtggttgccaggggaggactaacctctgaggattcacagaaaataaaccagaatgaaaatgacatacctttgtaggagccaaggatcttgctaaaaacacttcgtccttgtgtcatgaggtgagctgaggattaccactggtgggaacagggatcactttagaaaactgccacgagtctgcttcagtgcacagacaaataggcaatcagggacctgcccaaaactccctctcatccagcatggccagaattgttttactccaaaaaaatatataaagctgttgtcaccagaagcttacttgagccaaaataaaacctcccaagagtacccagagaagagcattctttgagatagcctggccactcccaggatgctgcatgtcatgtgggggttattggttagttgaggttgggagatatcgctggcatcagggggcccagggccttttaagaacaagagcatgtaatgttcagcttcttcgtgatttcctaggtggggctgtgatgtaaccactctccaacatgtcaaaccttcagcaaaatctgctacagattaaaaaggagctggggaacatcttgcaaaggaaataatgtaaatattaagaaaactgaaacatggaccttctcttgcaagaattattttgagggtctaaacaggaatcatctagctcaagatgttaaaagcatgccagatgtaaattaaagaacttttactttcaatagtggggtctttgctcatctctgaggctctgactacataaaccaatcctcaagcccataaacactccacagcatgcacctcaggtgtgtccaggaggctaatgggtagtacagacctctagacagaggatcagaggccacagaggacaatgggtcaagggagttcttcctaggggacagaactagagtctgtccggggcactctgtccaccgccatggctaatgtgctcatggggcttcccaggaattcagcaacgccctgaatgatggccgtgcatctccctttcccccttctaccaagtgggatgcttactgcatttatcctgtcccaattctaggaccgtgtctggtgtgctttgggagcatggactgcagacaaccgtgagcatcagtttgcttgtctaagctcctgagtcacagtacagcaaggagcccatcttaagctgatggagtccagaagttctgggcttttgaatggatctagaggctgggtgggatttgaaggttgtctgctttaaggacgaggtgtgcatgctctatgtgagcgaaaataaatgaaacatttggtaaacacaagggctaactatggaatagtgttttcactggttatcaagattccttttttttctctgagcacacaattggactgcattttcagcctcactttcctgtccccatggccatgtgactgagttctgctcaatgagatgtgacaggtgacacttctaagtctggctacacaattgcagaggagatccccgatgctctcccttgtatgtagatagcataatgtcacccagcatggcttctgaaccagtcatttgatctggggcctggcctgactgagaggcgcatgcacatgcacacacttgtgcaccctagcaatcaggaacactcattttggattttacacgaatgagaaataaactggaacgggatggaaatgcttttaaacttacaggctaaatattcaggtaaggaattcactatgctggtctctgaacactccaaaccttcactgaaattctgctgttgcagcagccctgtgttagaagctcctttacaaatcaaaggaaaagagtttggttccacagtggttcagagcaaagcagaggaaacagacccacagcaggaagcaaaataatcataagatgaattccacggacgcggaaagagacaagaaaagtggggactaggaaggggcttccctgagaatgaccacagctctgccgtggcaggctttgggttcccctccataagctggatgaaatctcaagctgtttttaaatattgaagggatcatgacttctggagtctaaggcttctaggctagactgaaatatctgtctcctccagtcgccaaggacaggcactgacttcctttttcagtgttccagggacctagtaaattcagtaaagcagcctcattggacttcatggtgaagccccggtaataaatggtttacacccaactttaccaccacagccatctccacccccagactcccaaacctgaaatcaggaactttatgtgactcaggataaaaccaaagacagattggctctcctccaccagaagaacaggcaacagcagcccaaagtgcattaaacaaatgcacacacacacatacccccacacccacacactacacacaccccacagacacacacacatcacacgcacacaccacatacacacacgtgtacataccatacccacacactacacagacacacacacgtacacatactatacacatacacatacacatgcacataccacagacacatacacaccatatacatacatatgcacacacaatctctagcccagctacatcatgctgtataaaatgaatttttttcatgatattcccccaagtagttatctttccaaattacagaggcagtgagacctgattcatgaagggaaagctgcctgaatcaatagccagcctaagtgacacgatatgattttagtgtgatttctacatcattcaccaagcactcattaggcaccaaccacacaccagacactgcacttggcatctgagaaactgggcgctgagggcatgatccctgttcccaaaagggtttgtagcagctgccatgctggctctaggattcaagataacctgttccgagggaagtcactaaactctagcattgatgtgacaacccctgctctttcctggttgctcagtggtccaccccctgcaggcatgccggactccacagggcagcagggtgcctcaggagggcagcaaagggctggagaggagcacattggaaccacgtgggcccgcaaggcatagctttctccccgacatccctcccaccctgctgcctcacccaggggcttatttctattggcaatctcagtagtgcacatccacatttagataagcggcactaaaataaaatggactgtaattattgttatagattacagtaattacagatgggaaagggccgattagattagcatgccccaccccccgccaggacccggctgataggaaggagatttgtgcagaaggcaatgaacctgctgcgagtgttgggtgtcactatggcctcccagggcccaggctgcaaagggcagggcgtggaggaggggtggtgggagggagaagctttcaacctgaaaataaaccagccattaagaaatggggcctctctccagcctgcctggaggtcacacctgtgagagctgggggcagagccatggctggggcttgccccagggctccccctctgcctcccagctgccatccaccatctcccatcaatgccttgcagccctggttagagcacagcacccatggaagacgactgtgacattgagtgagttacttatacactctctgagccttgttcccattggtagctgaagagaccattcccattcatgcagtgtggtggtgagatcacagacatagtgaatccaggacagtcctggaagggtttggtaaatgtgcctgcccctgccctggccactcccaggtatccagttgggcctactggtgctgacatcctcattgcctggatctgaacactctgtcctcaggtccatcttggccatgcactctgctttttcctctgagtctgctgtccacctggacccagttcataagaggtcctgtgggtgaagctagcggcctgagtagctcctgccatgtcctggggctgggcacccacctccctgctggatttgaaaaatgtaggcctcattcctctcactcatccctcccacaggaactggagctctgctttgaatcctgggagggaacaacaaggggctgatgtcgtgggtgtctcctgcccagccagctccatttcccttccaagagcctgcccagctctgtgacatccactgcttctgagacacacaggaccacccactcgtgtggaccacagtggagccaggtaaatcctcagctcagcacactgcccagttgcatccccaccatcacccagccggcctaaatgggtgggtctgctgccaagcccaccccgccttgcccctctctgctgctgtgccctgctgtcatctgacagccaggggcccccacaccaccagccactccctctctccggtttctttctactcccgatgcttctgctcctgggactgagaaggtccccagtggctcacagaatccatttccaaatccctccccagggtctggccctggttccgctctttgctcttgtctcctgttacccctgcaaaatactgagcacatcacaaggatctgctaactcatcggtcaccctctggagactataaacttcacaaaaaaaaaaagaaaagaaaagaaaaagaagttattttgccttttaattaccccttagcagaatgtctgacacacagcagacaccaattaagagctgatgaatgagggggaaaaaaaatcaggaattattgactgcctagatgcttgccagccttttcctttcatggtttgctctttctctgtgggagaaacttttcttataaaacatggccaaggcagggaggcgcagtgagcctggccagaagaggctcacggttgtccgcagtccatgctcccaaagcacactttggaagcccctctattcctacttagcacttaattattatgtttaggtgtgttctttcttatggtcttgtctcccctaaagagtggggtccccattaaagcagggatgagtctgtctgcccacggtcttatctgtaacatcaaccaatgtggctggcccacagtggggccagtgaagttttcttggccaacctcatgaatttactccacagtgacaggcaaaccctaattgtcccacacataagtcattacccacagactttttcaggcctgagtagaggtctgggaagtctcgtcatcttctgggtcactgatttattcttccgttaggaaagtcttgcactgtgaaatgggacctgtttgcctcctcactgtggctagttggaggtgcacaggcacatatggagtgtctggagctgacctctagcaactaatcaagtccttcgcagatgagttgctgagcaccagactgcaccagccaggagggctttcagctgctttggagatgtcagcccaagttaggacttggctgagaaataaaactaagctagagaactcggggtcagtgggaggtagggtgggtacatgcatttgtatacttagctttccaccagtttcatcttgcatctctgccctcattttctctttgccctaatttcccccatttcttgattaagagggaaaaaaaacaaaagatacctcccattgtacattaagtgtttctgtaaactgtcagaaatccttttcgggaaggaggcagaatataaataagtaaatataaataaataaatgagctttgtcttcttcccccagggtgccccctctgcttggattcaggtcatctacatgtctatttatgatctattttcaaatttcaggattgtgactgtgtaagcaggaaccacagagctggctctggagccaagacacctgccaaagctgacactgcacagagtaccgccatccgtgtgcaggctggtgcccacccagagggccctggggaagatgccagagcagccgcagtgtggagaggacctgtgagcactccagactgggcagcactatccaggagaatcatggataatatagaggtgtctctctccctgggtctcagcttgaatttatagaacatggcagcttggaagaaagaccacctcttagggtgaaaatgggtctcaaagctccctgtgcagtgcccagatccaagtatgcttcctattattaaacagcccctctggtgacacaggcaggcttcagaggatgccctttcagctgtagctttatgaattcctttgccacaattaaagcagcaaacactttcaggtttcacagctgagaggaaggaaccaggctggcttcagaactgcccatggatgggacaatcccccaggaacccaggagatttaggggcctcacagtcagggtagcagaggccaagagcagggggtgggtcctgaacatccccacactgtggcactgtgatctcattcaatgcaaacctacagtccaaacacaagtgcagtttgcaagtctgagtgatcaggccctgggaccctctggcttcccccaggctgaagagccccaagttctgcagtggcagcacccgccctcatggctcttggcatccacacctgctcttccatctccggagagccctctcccttttcctgactctgcctctggcctcagcttagatttactttgtctggaagcttttcccagtgggcaattcatcctcctccagccaggctgggaccactgctgcatgttcctgggtccacccacctctcctatcacagcgctccagcatgactgagcctgtccaccaaagcgggtgagggccagccccagatgtgggaggacaaggctgtgtttcccttcgtcccctgtcattccccagcacctgaatccatgactggcagataccaggaactcaataaatatagacggaacaagagaatgattaaatgagatgacacagaggctgccaagccccagcagtttgtcactaggcaattgtcctcaggggacctggctccacacccagaggccatttcaggccttgggaaagggaaactggaaagaaacaaacaaggtctgcatctgtgaggagactgcaggacaggcagatgatgaaggagattcagagtggggcaaaaggatgtttctatcaaaggaaggtcctgtctgggcagagggagtggggggaagggtgtggagttcaggccatgtcagtatggggcaccaggggatgctggggtcactaggtttggggcaggccctgtcctgagtcagaccaggagcctcctggcagggagcagccaggcccttggtcccctcgccttctgtctgggtcaggtgcatatgagaatggtcacctccctgctctatgattgggcatctgagacagagaacagcagtggctgactgtgcagggccacccggcttctcaaccacccgctcctcacaacctctcaagtgccttgaccaagcccttgtcctggctgcacaggaccctctctccccagctcctctgctctttagagaccaggcacagccccgctctctctgagcagagtagagaaacttgctgggatttggttctagccttcctgagggcctgggggcaacacactctactgcctccatggttatctactccccttctaatcctgcctttcccagagacaacgagtgacttcatccctagcgatggccacccatggtgacagaagcacaccagacaggcagtgacacccaatatcgatacccacctggcagctcaggtccgagcagaacacagatgtcctcagataagagcatttcagggagcccacagacgacgtgactgagtccaggttggcccccaaatccaacaggaggccaagcaaggcagaaactgtgttgtggtttccagccacacccaggccatgaaagatgccccatggcgagatggagcacaggacctgaaggcagaggccaaaaccctgactggcgcaatgcagatcttagaagaattttctgaaagttcccttccattttgaatcctgaaaattatggagagatacacatccaggacaaagtgaatcaaaaacttggaaagagagaactcaccaattctcacagaagccaaggacggccccagcaagctcctgaccctggtccccagtccctccctacactttctgaaacagggagccagctctctttgaaggtgaatgataaccagaaagaaagtgacaatatatatatgaacagaatgtccccaaatcatgagtaagggagggagaagccagcatggggagaaaagcagataaagaaaatgtaacaatcgatcacaaggaattatctcttaggggaaaaaagattaatagttcaggcaaatattctccccagtctcaaaaaagttacagagaacatggtctcttgaaggaaaaagaaatctaagaagagatacaagagttcaaagaagagattataaaacaacagacagagatgaaaagcaaatagttcagcttagggaagagacaaagccaggggaccctgggcttttgtgcagggggcatagggagagggctgggctgtggtccaatggggaagatgcagtgtcagaaataagagaagcagctgagtccctggggcccccaggcaggaggccagggagccagtccaaaagagtgtcctcaccttaggttctggaagcctaagtgtattcatgagctagtgcataacttaagttatctacccaagctggccaaaccacagagcatggctttccccaaatcctcctgccacaggcctgggacctcagcctccctgaaaccatcatctacaccattgaaggattatgcctcaactgccagtgccaccagagatccgccctgatgctcgaagctcctgacggtggcagcagtcgcagccacagcagcaggaagaaacaagttgtagctgtcagctctaaaatgcagacagtgttgtccccatctctggatgatgccacagcacttggggcctcaaataaatcctgtattcatatttccaccagtggagggagccctggcgaggtgcctttcaatatttttaaaatgattttcactcttggctgcacttcataagtcatcagacactggaagccagaatcctctttcttgctggaatgatttgttctctggcaggatatagggtttatgactctggaggaatccagcttgagatctgagctgagaggtgccgaaggcctcaggatcctggtctctctctttccactcctcacaatgctggctaaatgaagtgactgctgcagctctgtccaagcacccagatccatggggcaggttcaaaggcagggccactccagacctctcaggaagctgtgttcttcctctcaagctcgaagcctcttcctcctggtatcccagtggaatgatggaaatgacacccagagtcctgcagggagtaggccacaatgacccttattctgagttcccgtcagagtacttacagggctctgagaaggtgggccagcagagcagacagagaagtgtcagcaggagcacttgcctgtcacaatgatggcagtgaggaaggcatgaaacatttcagattaagtcagatgcctactccgatgtcatcagtacctgcttcagggctctgccacacccttgtcccatccctcccttagctttttcatgatacaacttctggcaagtgccacatattagctccagagtgcaggcatgcctcctttctggagctcaacactctcgatgggctttgaagcctttccacgtccaatttccatcttcctctcccaaagggttccatgatccagccatgcgaaatccactgcctcaaccagaagcaactcctggcacttccatgtgcactccttgagtggcatcctgcagggactctgctggtgcatcttctgctggatccttagcctgcccccacctagcagctgctgtccatccagcagcacaggtgtgctctccgcaatcaagctgcacttgaacctccactaagcaatcactttctcttctggagtctcttacccagctcctcttacatgcattgtctgtcagtgatctcaattttaagctcttggagacaaagaccatatttcttactcataactttatctgcataacccagcccaggcctggaagaaggtcaggaaagacatgactggaggaatccagttctgcccttggaccaacagctatcatgtgagttttccagcctcttcagggtctgatggtctctgcagggcttcaccatttggcatctctgctacgctcactgatagtaacatttacaaggtacggcacatacaaaatactccacaaatgatagctattactaccatggtaaaggtaatgaaaactatatgaaaaaataaaagcattattatagtgagaatcaatcaacagtgggaaggaaaactcactggtcttaggttgaatgatttaacctggcattttctaaaatgaactctgcagagcattcctgggatagtcctgggtcctaccaggaatgacaacaagaacaaaagccctgcattaaatgaatttaggaagaaaaactggaaacaacagaattaaacagatttctttactacagacttttaatatgctaatgtgtattgtgaatcatgataagatagatttaacatgcagcatttcccatacttagttctctccggggtctttccttcaagaagcatctccttgaaggacagcatctccgagcacacttttggaaatgctgaattaatctctctgtcagaacaggtgtttcaatggattgtttttacccaaatgaaggctgtagattttccactgctgaggttatttggttagcctctacccagcctgccataatgatttaaatatcaactctgttatccatcattttagctgcttaatatgatcagtaacctaatcatttatatgatttataacataggacaaaaacaagcacagctatttccgtccctgagattgaatctcagagcatcggtgctaaagagaaaatgtgtgtcaggcagtgaatgttttcaggatcatgttcacaataaagtcaataatgaattttataagtgtgtttctaatcatgctcttgaatgaaagccagtgacatcacaccaaaaatatttgattaaatggatcttcacagaggaaagcaattctccactggaagaatcttgctgattataaacgttagtgtccaaaggattgacagattgaatagctgtcaggtaatctactaaaagtgttgtttctctcaatctacctttgatgggggttaagtaatggcaatggcaaattcaaagttttacttctaagccagtgcctgcggtgcagccagtagtatttaccactgggtgctaatagacccaagtgatgtaaaggcagctgatgtggagataagaccctgcatttgcctcctgtaatcataagacagtatagccatgcccttgaggtcaaacactgatgtagaagtgtgaagctgacatactgccaagtgattgcttttcctgcctgaaagacacagcaaattcaaggtggattacttaccaacctcttgcactatttacataggtctccagttgaaaatggcagatgacacattctcccccaacttctaactaaatatttataaagacacagaaatgatgaaaatatagaaaaaagatgaagacaatactgacagtcatcccactgtaaatattaggaatttcccttgaatataggtagatggatatggatcgagaaatataatcactggactacctatgcttttgttcaaaagacaggacagcctcgccactctgaatcaccacagaaggatattctaacatcattcattccttctttgcttgttcttgaaattggaggcccaaggtttatgtcaaattgaatagtacatagcaattcctctactgtgtgcttcctgttcctggggcagccagaccattttctgcatctccccaaacatatgacagcaaaagattctaaaaggtgttctgcagcatgtcagtcttacaagacgcacctcagagagcttcatctagtcctatctcaaaaagccacagtcatcaaaggctctcagaagccatttagtaaacaatcctgtaatgattttgtttaattcaatatttcttaaatgcacttgaatacaaggcatttttatttttcatttatcatctatacacatcctgaagaactagtgttccctgaaacatattttcagaaaatgctctaaattaatttagggaaaacaattaccaggaaacaggaagacagaaaacaggaagtggaggagaaaggagacaggcaacggcacgtcgaatcctggcacccataatgcccaccagcaaagcacatttggccaagacagattacaaagaatctcaacatcttacagcagggcttgcagttgcttgctgagcaatctagagaaagtgaccatgggtagaacaatgcacacaacagtaaacaacatcttccaaatgattcagaggacatgtttataatgaaactgttatgaagaactgaaggaagaaaacagactgagatggagagtcacaggaagagacagaaaaaatgacaagctgagcttaaaaggggagctggggagttaagggagggttgcaaacaaaaccaaacctctaatcccagcattggaattgacgaagaaaagactggatcagtcatgggaagccttctcttcctgacaatgtgaaaggaatggtcagagatagcaatgacaaggacaaggggaatggtgtggagagaatagagaataaagatcaaagctggaatcacagataattctgggaaaactaatgcacaaaccagaaaacccacaaaactttgacaggctcaaagaagacaccattggagaaatacttttgaatttcaaaataatcaactgtaagccaaagggacttatcacactctaaacaaagttcttaaaataaacctagacatattgtgattaaaatattaattggacaaagaatacatactataacaaattcttacagagaaaaaatggtattaactaaaaatctgctttatttcagaccttccattttataccctagaaacaacaacagaaaggagtaaatgtctccaacttatgtaatgccacaagaagtgcattccggactaagaagcccattgcaagatataaaaggctcagaaataatcaaaagtggcttgcttggaaaaacagcgtgaatatataatctagccactctgaaaattaagagatctagatgggcaaatcatggtagaaaagcaatgactttgaacactgaaataatttaagctcatagttaaaatgatctaactcaaaaaaaaaaaagagcaaataacctttcagaacaatttgacatcagacttttcaagagcaacagaagcattagtttcaataagacaatggagtaaggtattttaaggcattttaagtaaaagaacattaaatctgaaattttatatccagacaaattgcctttcaaacgtcataaaaatattttcagacatacaaggaaggcttcattggttttgtctaacaatgacccattttagaaagactttgtgataaagtatccaaataagaaaagaaacaaacctaacaaatgctgcaggagatacatgaagtaggagtgataaaatacctggaaaattttattttgtcttttaaaaggctaagagcactcccaaatggaaaggataaagtgtatatataagaaaccaaaatgggaatgaaagagaatagcaggatgatatggtatgaagctgttaaatttcttattattgaaaaagagttttttaaaaaacctcaaaacactggataatttaaatcaaaatttcaaatttcctttttttttaatttcaacttttatttttagatatatggggtatgtgtgcaggtttgttacatgggtattgagctcactactcgggtactgagtatagtacacaattgttggtttttcaattcacatcctcttcaccacctaccaactctagtagtccacagtgtctattatttatttctgtacttatttttattttattttatttatttacttttttgagaccaagttttgctcttattgcccaggctggagtgcaatggtgcaatctcagctcactgcaacctccacctcccgtgttcaagtgattctcctgcctcagcctcctgagcagctgggattacaggcatatgccaccacacccactgggggctaaatctgtatttttttttttttttttttttagtagagatggggtttctccatgttggtcaggctggtctctaactcccaacctcaggtgatccacccgccttggcctctcagagtgctgggattacggtgtgagccaccacgcccagcccacagtgtctattacaacacatgtttctttccatctgtgctcaatgtttagctcccacttatacatgagaatatgcagtatttggttttctgttcctgtgttagttcacttagcattatagcctccagcttcatccatattgttgcaaatgacatgatttcattcttttttatagttgcatagcattccatggccaatgaaatactttttagtggtgcatagtattccacagtatatacatataccacgtttatccaatccaccattgatgggtacctggttgattccatgtcttttctgttgtgaatacatggtgatgaccatatgagtacgtgtcttttgagtacaatgatctattttcctttgcgtatatacccagcaatgggattgctgagttgaatggtagctctattttaagttcttaacaatcacaataaatattattgtcagtttgaaggcagtgattggaaaaaatatctgctatgtcttctttgcaaattttgctttaaggaggctgaggctttaagagtgaaggtaataagaagagatatgcaaagcaattctaataaaaagaaaaactaagtcactatcagacaatatagaaattaaggcaaaacagtatagagaatatatagacagtagtggaattgtcggattatatggtagttctatttgtagttttttgaggaaacaccaaactgttttccatagtggttgtactatttacctttccaccaacagggtaaaataatttcactttctactcatcctcaccagcatttgttatgttttttttgtaatagccattctaactggagtgaggtgatatctcactatggttttgatttgcatttccctggtgattagtgatgagcatttttcatatacatactgtctctttgcatatcttctgagaagttcatattaagatctcttgttcatttttaaatcagatttttttttgttattgagttgttgagcttcttgtatattctgcatattaaccccttgtcagatgcatagtttataaatatttattttctcctattctgcaggttgtctcttcactgttgattgtttcctttgctgtgcagctttttagtttgatttaatctcattagtctatttttgtatttgttgtcttttttttgaggtcttacataaaaagttattgcctagaccaatgtcatgaagtgtttctcccatatttttttctggtagtttcatagtttgggggtctaacattttagtatttaatctattttgagttgatttttataagagataagggtctattttcattcttctgcatgtagatattcaggttttccagcatcattattgagaagactactttttctaatgtctgctcttggcacctttatgaaaaccagttggctgtaaatgtgtgtatttatttctgggctctctcttttgtttaattggtctacatgtccatgtctacattggtaccaacctgtttggttactattgctttggggtatactttgaagtcagaaagtgtaatgcctccagctttgttctttttgtttaagattgcttttgctatctgggatcttttgtagctccatacaaagtttagaactgttttcttctatatatgaaaaatgattatgttgaaggaatatctgcactcctatgtttatctatgcttattacaacactactcacaataactaagatatagaatcaacctaagtgcctaccaatggatgaatagatttttaaaatgtgttatacatacaacacaacataatattacttagcgataaaaaagacttaaatcttgtcattttcaacaaaatggatgaacctagaggacattacgttaacccaaataagccaagcacaggaaaaatgtcacatggtctcactcgtggaatcttaaaaaagccaatctcataggagtagagagtagaatagtggttaccaaagttgggagagtagtggggaggtggagaagggcagaggttgtttattgggtataaaattagttaaagaggagtaatgacttctggtgctcagttgcatagtagggtgactacagttaaagatagtgtgttgtatatttcaaaatagctagaagagggaagtttgaatgttctcatcacaaagaaatgacaaatgtttgaggtaattaatatgctaattatgctgatttgattattatacaatgtatatatgtatcaaaacatcacactgtaccctataaacatgcacaattattatgtgtcaattaaaagacaaaattaaaaagtatagggaatatagaaaatcactacagaatgttgaaagcatttaatgaatcaaaaacacatatctaattcatgcatgtctaaacaagtatgtgcctaataaattagtcacaagatatacacatatagaattacaaaaaaaaaaactctaaaactctattaagtgagtaatttctaaggaacttcctcattggtcaagcaaaccaatggccaaaattatagaagatgtgaacaacacaatttaatgagcatatagttgcgtatcagacaatataaaaacacacatcattctcaggcatttataatacagtcccgaaactggattacatactaaacaagaacaaactatgttcttaaccaaaggttacaagatagaaacaaaaacataagatattgttacatagagaaaaattttaaagtacttgtaaataactccaagatcatagaaaaatccataatggatagttcaaaaccatctagaactataacaacaacaaaaccccaaaacgatgaccacatagctaaatttatagaatatagcaaaagtggtaattcgaggaaaatatttaacttccaattcttatattagaagagaagcaaaacctaagaatctataaagagagtaacattaatttcaaaaatatacaaggaaggagataaggacagaaattaacacaattatttatttacttaataaatctttatatattactttctatgtgtcaggcagcacgagtgctttgcagttattaactcttctaatcatcataacaacctatgaggtggatataattcccactttacagagatagaaacggaagcacagagagtttaagtaattaacacagaaccacacagctagtaattgctggagccagaatctggctacagagtttgagctgtttcgttaaaatagaaagactccaatatacataaaagtcaattatttaaaaagaataataaaataggcaaacctctgggattattgatttggagagagagagaaataaagagtgacaacaaacaaacaatattatgatttaaaaagtgacataattaacaacagagtaaaaactaaaatatgagagaatattattaattcctttatgctaataacttttagaagttagaaaatttgtttgttaaagttaatgtaaaataattcaataagaaataaaacatgaaaattctgttagcttttgaaaaaaattaaaagaattaaaggttttcccacaaagaagttcttaacattttcataggcaatttttactaaatttacaagatgcatgttctttttagaaatataagcaaaaggagcatactgtaactcgtcttataaatccactataattttgatctgaaaagaaataaaaattattcaagaagaaaattttacaggactattcattttatttgtcaatataaatgtaaaatgtctaaataaaagtgttaaaaatctttaaaacaaattctaaataactaaatacaacagaatttatgaattttgttaaacaaattaatagagaaaacccatgtcatcacctcacagagacaaagaaaactttccataatatttaatatcttatttatgataaaattatattaggaatggaaagaaagtgctttattttgataaaagggatctacaaagtacatttaataaacataaccataagtgggaaaatgtaaagcaactgctttaaaatcagaacataaaatgatgttcaatattaacaaatctattcaacattatactacatgttctagaatatacaattatagggaaaaaaacctaagaattagatatgtgaaattaagagatattattttcagattacgtgtttatatataaaacaaacaaaaataatcttgagaaaaactattagctataagagatgaatttagataaacaaatataaaatctctctataaatgttacttgtttttctatacaccaaacaattagagaaaacatctttaaaggacagcatttacaatagcaaataaatctaacaaaaatgtgcaacatctgtaagaggaagttataaaaattactgaaagtcattaaagaattttaaaatgaactgttaacccatgatcaaggaaaacaagacataatatggtaaggatatcaactgtcgctgaaattgttctatacagccaaagaaatgctaatcaaaaaagcaacatttcacaaggaacttggagggaataaagagccaagaatagctaagacatttctgaagaagaactgggagagagaacccaacttaacagataatatgatttatatgatttattattaagccatagaaattaagatagttcagtattggtacagtgatagatcaactgaccatcacaataaaatagagaacccagaagcagacccacatatatatgaatatgaaaatttgcctatagaaaacaggaggcatgataaatcattaggcaaaggactactggataaatagaactgtggtaaaatgcttattcgtaaccttttaaaaatgaaattgtatgccaactcatattatgcacaaaatttatctccacatagattcagatcttatctttaaaaggaaaaaaaattaaattttaataggaagaactcctaatcctggtcataacagaggaactggtactagcacttccaccaataaataacttaaaagcagaaataaatatacaaaaaaaaactgttttcaaacactggacaagaggcagggcagaactgtgaccgttgagagaagagagacagatgaagagagtcctgcaatctcaccagaactccaagcatccaagcagaataaacacacacacacacacacacacacacacacacacacacacacacacaccaaggaacattcaaatcaaattgcttatttgcaggatctaaaaatcaaaacaattgaactcatggagacagagagtaattggtactagcacttccaccataaataaaaacaggaataaatatacaataaaaattgttttccaacactggacaagaggttggttgccagaagggtggttaccagaggctgggaagggtagttggagggtaagtggaaggtggggatggttaatgggtacaaaacatatagttaaaagaatgagtaagagctattatttgatagcaaaacagtgtgactatagacaataataacttaactgtatatttaaaaataactaaaagagtataattggattgatttgtaacacaaaagataaatgtttgagaggatggatacattccccatgatgtaattatttcacagtgcatgcctgtatcaaaacatctcatgtatcctataaatatatacacctattatgtacccactaaaaatacgattaatttatttttaaaaaccccacatacaaacttaacctaactgacatttatggaacaccacatccaacaacttcagtgcaaatgaactactcacctagattaactattgtttttctatcagacaagtctcaataactttaaaacaactaaaatcaagcagaaaatattctgtgaccaaaacaaaattaattaataaattaataacaaaagcattttcaaaaaaaaagctctaaataaagaaatttaagcaacatatgtgaaaataaccaattggtcaaaaaactgtaatgaaaattagaaaatatatttttagattttaatttttgtgggtacatggtaagtgtatatatttgtgggttacatcagatgttttgatacaagcatcaatacataataatcacatcagagtcaatggggtatccatcacctcacacatttatactttttgttatattttgagctaaaaaataatgcacactcaaatagcaaagtttatgggacacagtcaaagcagtatttatttaaaaagttatagttctgaatatttatatttttttaaaagagaaaggtatacagtcactaacccaagctttcaattaaggagctaagaagaacaaagtaagcacaaaataaatagaattaatggaacactaaataggggatatcaatgaaattgaaaaaaaacagaaaatatataaagacaaaaattcattcttgacagtaacaataaaaattgataaaaccctatttagactagttaaggaagaaaaaaatgaaaaaaaagcataaattacccatctagggagtaaaagacagggtatcactactgattctacgaacatgaaaatgataataaaagactgctataaataatatgccaatgaatttgaaaaaataaagtgaaaaaaaaagttttgagatccaaatgaccaaaactgacattagaagaactaagaattctaaatagacctgtaacaattaaagatattgaattcataattcaaaagcctcatacaaagaaaatacaggtctacatggctttacacaaccatatgggaacaaacaataccaatttcacacaaacaacttcagacagaacaggggaaagggtacttcctaactcattttatatgaccaatgttatactcattcaaaatcaaagacattacaagaaaaaaatcatagattaatacccttcatcataataaatctaattcacttatatataaaaaagatatagcattatgactatgtacgtatttgtcatagaattgcaaggttgttttacctttcaaaaaaaatcagtcaatataattcactcctcattaacagaataaggcaacaaattaccataacaatcacagtaaaaattgtattacattcaaagctgaattatggtaaatgcctcagcaacaaaaaaactggataaagcccatgttcaaaaaaaccttcatttcacaacatgcttaataataaaacctgaatactttctaattaagtttggggacaaggatgtcagctcttaccacatctttccaacattatagtaaaggtacaaaagaaaaaaccacagaatgaaaagaaaagaaaatgaaggaaaaaagaggatgggaggagagagaagggagaaaaggaaggaagaagttgactgcccttttggtcatatatctaaaaaatgcaaagaagataagaaaaatatactagaatataggaacatactatacataatatataggaatataataataaaatatagaaataaaattctagatctaatacatatttaacaagttcacaggatacaaaaacctggtatctgtctacacaccattagttagccactgaaaaatgaaatttaaaacaacttttgaaacagtgtacaaaacataaactacataatactaaatttaataagatatatgcaagggctgtgtactaaaaaactattgatgagaaaaataaaataaaacctaaataaatgaaaagatttggcatgttcatgagtgaaagactcaatattgttaagatgtccaataaaccctaaattggtcaaaagatttaacaatcccccccaaaaaatcccagatgttttcagacaatttgactctaagaaattatgtgattctaaaaatttaaaggactaagaatagacaaaataatgtttaccaaggcagtaaaagtgaagaatttacatcatgtgactataaagcttcagtaatgaagaaggtgtggtattagcttaaagataagtgtattttaaaaactaaacagactagagagtctggaaaaagatccacatatacatgctgaatgcattttcaacaaagatcccaaagtaataaattagggcaagaaatgccttttcaataattagatatcatatgataaataaataggtaaataaataccttgatacctccctcacaacacatacaaaacaataattcaaaatcaatcatagccagaaaagtaaaacataaaactataaaattttagacaaaaacatagggaaaaatatttgtgactttgggatggacaaagtttttttaataggaaacaaaaagccataaaagaaagattgataaattggaccccataactatcatgctttaaaaaaaaaaaagtccattaaggaaaagacaagcaagctatggtctgggagaaaatattcacaatacatacacctaattaatgaatggtatccagaatattgaagaaattatataactcaatcaaagaagacaagcaatccaatgttttaaatgggcaaaagatttgaatagacacttcacaaaagaacacattaagagttaccaacaagcacatgaaatgatgctcaatattattagtctttatagaagaatttgaaaacacaaataccactatatgcccaccagaatgacaaaaattaacacagtcatgccaagtgttggtaagaaagtggagcaactggaaattccatatatttctggtgagaatacaaaaggatatagccaatttggaaaacagttcagcaatttcttagactgtgttcttagactatggctagacatttatcataaccctagatatttaattaagacaaattaaagcatacgtccccatccacacaaataattgcatgtgaatgttctcagaagctggatttatgataacccaagtttggaaaaaaaaacaaattttcataaaattgtgataatattcatataatgaaatgccactcaaataaaaaggaacaattcaataaaaaggaataaacaaaacaacgtggaaaactcaaaaacattaggctaattaaaagaaaattgatataaaagatgactgtgtactttatttgtatgttctagaatagataatatttatagtgacagaaatcaaaaacttgcctacaatgaagggggcattcaattcaaaaggggaatgggagaactttttagtgtcatggaaaggttctagtgcttaaatagggtggtggttacctgtatgaacatatttatcattactaatctaatcatgcaatcaaaatgggtgcactttaatatttgtaaattacatctcaacagatttttttaaactttacaaaatgtaagaatatatattttaccttggattcagacaaatagtactgcttttaaaagtaaaaaaaaaatcttggtttattaactgtaaagaaaaataatcttgggctgggcatagtggcttatgtttgtaatctcagcactttgggaggctgaggtgggtggatcatctgaggtcaggagtttgagaccagcctggccaacatggcaaaacaccatctctactaaaaatacaaaaattagccaggtgtggtggcgcgcacctgtagtctcagctactcgggaggcagaagcaggagaatcacttgaacccaggaggcagaggttgcagtgagctgagatcacgccactgcactctggtctggatggcagggcaagattccatctcctcaaataaaaaaaaaaaaggaaagaaaaagaatcttgatttattaagattaagaattagtaattttagacaccttaaaaatatggagggaagaatgatacgaatatatgaaagataatcatgtgacttaaaatcaaaaagttagaagtttcagaaactacatgaagaactctcattaatcagttagaaagagataaatattcccgtagaaaaaatgagaaatggaaatgaatattaactggaaaaaaacatatgttaaattaacatatgaagagctgctcagttttcatagtgatcagggatatgcaaaacatgatcaaaatgtgatactattttacattctctcgagtggcataaataagaagcctaaaaaatagtaaggggtgaagaagatgaggatcagtggaatattgtattcactgctggaagtataattaatataaccacattggaaaacaaatagatattataagttgattttttaagtttattattcacaagactcaggaattccatttctgtacatagtcaagagaaactcttgtacatcagtaatataaattaaacaacatagttgcacatataataaactttattaacataacagtgttgagtttaaaagtaaagcccaggagatacctttatttgaaagttcaaatctatttaaactgaacaacacttcagggaaatggcatgaataaatatataatagaatcataaaaataagggaagttcccatagtaaataattataaaatctatcaaaatgtagaaaataactgatttcaggccttagatataaacaattacaaggttactcctgcaataacaagaaaaacatggcaggaggcccatattcacaccagacattattacctgcagatatttttaaatcagttttgcatggaaatcaaacacaagcacggaatgagagtctcactaggtgaagggaatagaaataagagtttgtggtaccaaggtgagaaaaatttgtgaagtatgttaagagaaaggaacaatttgaaattaaaaagaagtccaaaatatctctgtaaaaattgcaaactcttggatgactcctatgacacgtaactagcttgcaaaaagtctaagatgatgtcactgaccaactaggaaaatggagaaattagcacatatttcagaggtcacaaagttctggaaatacgttaaactttaggcccaggcaaagtataaacatctcgatgaataaatgtcaatgacttttaagtgacacataagggaggttatgccttcagtgcaagcatgatctaagtaagagtgaggaaaaggctaaaatagaatcccacaacaaattgaaaatcatacctcaataggaccaagatgatttgttagcaacaaaaatgacttttagtatagcattttacaataatcagacaaaactaacataaaccaaagatggtacaacgtatctcccacaatgtccaggaaacgtaaaaatgtactattacacatattaaaaaacagaaaatgactgataatcaagagataaaatagtcaatagaattaagaccttaaaaggtaaagatattgagtgaacagaccagcatttaaaaataaatattatgtctatattatgcttgtatgtcaaagaaaacagaggaaatgagagacaacctgaatgaaaagttaaaaaatttgaacaaataatttaaatccacaaaaaattataaatacagtcgagaattgtaaaataaaatataaaatcgaatattcactaaatcagaataaaatggaccggacacagcagaagacgtgactcgttaacctataaatatgtttatacccaatattcaactgattcacagagaaaaaaataaaatgaggaaaaaaacagagcataaaagatacaagttcctgttaaaaatgtctaataaatgtttaattgttgtctcaaaagaagagaaagtatcacaacttaaattattaaatttaataaaacacatcaaaccaatccctcaataacttcagtaggataaaagtaataaaagccacacctacttaaacacattatagtcatactcccaaaaccacacctacctaaacacattataaacatactcccaaaactcaaacacagagaaaattttaaaagcagctagacaaaaaagtatgttcctttaaaaggagcagcaataggatggatgactttcagaacaaaaatctgcctagacaaaaggagtgctatcagcaagatgggtaattagaaagacctgccacacatttctccttataaaaaaggaccaagtaagtaaattaacaactaaaacttttactgaaacttcagagggaaagtgctgaagtgtaacaaaggagtagtgaagtcatttcagtgttcagagactcaagagggtagcagagaggggagcaaggcaccctccctctgctgaaccatctctcttattgagatcagctcagagtggagggacttcttcctgtgggaaagggaaagcagaggacctgcagcagccctcactgccactatagcccccctgtagtctttactacagaagaatcccacagtcttcacaatccctcagctcagtctgggagctgtctggaattcacatggctgcttttcactggattaggagcacaagttttgtacttccattatccaattacccaagctgctggggtgtggtgccatcttaaaaccagagccactactggagtgtgctctgccctgggggccagtagcaactttgggcctccaaccatgggattccaccatctttccacccacatgggtggctgtaacaccatgaccccagctgctggggtgtggtgccatcttaaaaccagagccactactggagtgtgctctgccctgggggccagtagcaactttgggcctccaaccatgggattccaccatctctccacccacatgggtggctgtaacaccatgaccccagctgctcagagcctgggcccaggaatggcccttgctcccttaccacactgcaggtaagccatcctgggtcagctgaactgctgtgcacccatgtccctggccagataaacagtccagcagacctgaccctggctagacacacccttgagctgctaagcagctgtggccagagttggagaaacagtctagcagacctgactctagcagagaaggccccaaagcagatgagcagctgtgtgcctgagtcatggtaagagaaacactccagcagacccattccaggcagacctggccttaagctgacctaactaccatgcaccctcactcccaactggagatgaagccaggcaaacctgccccggccgacatgcccctaagctcccaagcatctgcatcatcatattccccatcagaaaaacagcctggtggacctgccccaggcagacatatgcctgaactggcttagtggctatgcacccattaccctgaccacagaaatagctgagtagacccaaccctggcagacccactccaagccagccaaacaggcatgactcatgtctccagttggagtaataacccagagaccctgaccccggtgagccagtccccaagccagctgactcatcctgagcacctgcacccaaagtccaaaaaacatcctggtggcacaaaccttagtgaaccagccctcaagttggctgatccactgtgttcatgcatacaccctagcctgagaaacacttcagcaagcccacccctgaagaagctgtgtcatcaccaccacaaatcctcacaacctaggccactgaggcactatcaaacatcactaacatggattacatctgaagaaactgcactactttatgtaccaagaaccaaagtcagtacatcccagccaatcgacatataaaaacccatctataggaataaggcttttcctatgaaacctattctataaaattggaagaggctactattccctcaggtgcataaatatcaatgtaaggacacagcaaacttgagaaagcaaggaaacatgacacctccaaagtaacacaataattttgcagtaatagaccccaaatcaaaggaaatatacaaaatgccagtgagatacaagataatataaataaacgattcaattaaattaggaagccaacttagtatctgcattaaaaattaaacaagagatagatattatttttaaaaagaaccaaacaaaaattctagacctgaaaaacttaatgaatggaataaaaaatacaatcaagagcttcaacaacagacgagaccaagcaaaagaaagaatttctaaacttcaagacagatcttttgaaataacaaaagcagacaaaaaaagagaaagaacaaataaagaaagcctacagaatttatggaaaaccattaagtgaataactatttgcattatgagcaatcagaaggtgaagagaagggaagaggtgaggaaaacatttttgataaaataatagcagaaaacttcccaagtctagaaagagagagatggacatccaggtccagaaagctcaaaggaccccaaatagattaaacacaaacacatcctctcccacgtacattagagctaatcatcaatcaaagacaaagagagcattctaaaagcagcaagagaaaaacagcaagtcaggtataagagaattccaattagaccaacagtaggtttctcagaagaaatcttacaggccagaaaagaatggaataatttatagaaagtgctgaaagaaaaacatactgccagtcaagaactaggcaaaactgttatttagaaaggagggagaaataaagtctttcccagataagcaaaaactacaggaatgattcacaactttactggtgttaaaagaaatgattaagggagtcctacatctggaagtgaaaagatgataactaccatcatgaaaacacacaaaattacaaaaatcatagttagaacagatacacaaaggagaaagagaaaaaaaatcaaaccttactatgacatgagaataagattacatacataaagtattaaaataaagaaaattacaaacctggaacttgataacctgtggaaatgtgcttcaaaaaatgatgatcagggtgtatgtacaaaggtgacatatatgttgtgataatggcagtgatgtatagtggctgtaaaagccctcttggagatagcaatgattagcattttattattttttaaacctcttaatttacttaaaagacataactggaattccaattccgctaggctggtaggaatccattacagcccagcccttctgctagttggagctataatttctggaaaaaaatgcagaaaataattacctgaggactctaaagtgtgaggtaatgcaggcagattgtgaatgaaagtcaaaactaaacaagcaaacagaagttctctctctctctctctctctccctccccccaatctctctctttcactacatatttgtgtgtgtctatatatacatatatatgtgtatgtatgtgtattaatatgtgtatatctgtgtgtatattatatatatatacacacacatatgtgtgtatatatatattcccctgctctctttcaacttaagagggctcttgctgtgtatcagcatggtggtaatggcagcattggtacctaaagttagcatggaaactcatgtattgctttatatttggtgaacttgaatagaacaatagaaacaattcaatctgaagagaaaagaagggggaaaagattgaaaaagaaagatcagagcctctaggactctacattaaatggtttaattgatgtgccattggagccccagaagaagagaaaaacattttcatgcaaaaatatttaaagcagtaattatagaaaacattccaaatttgataaaatatatatatatataaattacggattcaagacagtcagtgaactccaaaaagtataagcacaaagaaaaccatgtctacatacatcttaatcaaattgctgaaaacaaaataaaaggaaaaatcctgaaagcagccagaagaaaacaacacattatacacaggggaagcaggattggaatcaccattgatttctcatcagaggatatggaagtcagaataaagtggaacaacatctttaaaatgtgaaacgctgaaaaaaaaaaaagaactgtcaaaccagaattttatatcctataaaaatatccttcaagaacaaatgaaacttacaatcttctcacaagaagaaaaacaaatagaagttttacagcaggcctacaatattaaaaatgttttttaaaatttgctttaaaacattttttaaaaacttatgtttaaaaaaattcaaggtaaacaataccagagggaaacttgcatcttcagaaattaaagaataaaataaatagtaaatatctaggctattttcttatatcttaagtacttttaaatgtgtgcaactgaatgttgaaataaaaaattatatcatctgttagatctttcagtgtatgcagatatatatgacatctataatgcaaaatagcataggggtaagggaggagagttatagggacctccatgctagaaattttctaaagtttacataaagtgatacaatattaatgctacgtaaatcccttaaatattgacagaaaatacatacccaaaatgtaaataaataaaatgaaatatttttaaaaatttaaataattcaaaaaaggcaagaaaaaggatatggagactgaacaaccaaaaaattaataagaaaattgtagacataaacccaactctatcaataattacacaaaattatacaatgtgccaaacactccaatttaaaggcagatattgatagagtggacaaaaagcaataccctgccatgggctgcatatacaagcaacaatttaaatataaatgccaggcagattgaaaataaatggatggataattatgcaacttatgtaatgttgtgaaatgtagccaaagcaggacttagagggaaatgtgtagaattaaatgctatgttaaagaaagaataaagatataaaataaataacctaagtttctaacttaagtaattagagaaagaataaattaaagctaaaacaagcaatagaaggaaaataataaaggtaaaagcagaaatgattgaagttaaaaacagaaaaacaacagagaaaaatcaatgaaactaaaagatagtgtctttgaaaagatgagtaagattgataaacctctagtcagtctgtccaagtaatgaatagaaataacacaaactactaacatctggaattaaaataggacattactacatacttttaaatgatattaacggaataccattaataattctatgtctataaattaaacaactttgatgaaaataatcaataccttgaaacatacaaactactataaactacttaagaagaaatagataatgagataaccctcatatctattaaagttattaaatttgtagttaaaaacctttcaaaaggcccttatagtttcactgatggatcaggaagaaataataccaattctgcacaatttcttctagaaaacagaagaggagagaatatttaccaactctttttatgaggtcagcattatgctcataccaaaaccaaatggtcattacagaaaaactggagaccaacagttcatgtgaacatagatgcaaaattgtcagcaaaataccagcaaactgaaaggagccacatataaaaaagataatacatcatgaccaagtgatgttcatgcccaaaatgcaaaactgctttcacatacaaaaatcaattgctggaattcgccatatgatcacactgaaaacctgagagaaaaaaatcataatcatctccatgaaccattcaacaaaattcaacatctattcatgataaaaactctcaaggaactaagaacagaaggaaacttccacgacttaataaaagacatctttttaaaaatctgcaataatatctcatttaatgaaagacactgaatgctttctccctaagagtgggaacgaggaaggaatgccttatttcacaattcctaatcaccatcatattggaaggcatgtaataagacaataaaaataaacaaaagaaatacaagaaatatagattggaaagaaataaatagaactgtctttattcacagataaaatgattctctatgtagaaaaaactaaacaattatattaaaatctactagtaagtagtaagttagtaaactaataagtaagtttaacaaggtcaccagatacaaactcaaattggaccacagacttaaatgtaaaactttaaaacttctagaataaaacataaagagaaaaatcttcttgaacttaggtttctagaaggtttacatatgacaccaaaatcacaatacaccaaaaaaatgtaatttgaaatttatcaaaatttaagtactgattcttctgcaaaaatacactattaagtaatgaaaaggcaagtcagagatggggaaagatattttaaaactcttatctaatgaacaccttctattaagaatacatctatagaaaattaatacttcaacaataaagcaaaacaactccttttttgtaaaaaaaagcttacatcattagtcattagttaaatgcaaattaacacctcaattaggtactactatatatttattagaatggctaaatttaaaaaaatatatattatgataataaattggcagcaccaaatgctggcaaaaatgtggagcaaaaagaacatgaattcattgttggtggaaatgcaaaattatacagccactttgataaaaagtttggcagtttcttatgaaaataaattatctacttatgacatgacccatcaattctacttcaaggtatacatccaaatgaattaaaacttacttttacataaatatctttacaaaaattttgataatgcccttattcagaattgccaaaaagtgaaaataatcaagatgtccttcaagagttgaatggataaacaaaccctggtacatccaatgatggaatactatttagcaagaaaatgaagaaacaaattacagaacagcataaatgaatcttaaatagattttgctaagtgaaagaagacagaccccaaaggctacatacatatcatgtaactcacttataaaattcttgtaaagtcaacctatagagacaaaaatttgactagtggttggttgcctggctggtttttaaggatgtggggttgaatagaaagaagccacacaagacaatttttagggtgatggaactattccacatgttaccatgttggtggatacatgacactgtgcatttgtcaaaatctataaaaccgcacaccacaaaagtaaactttattgtataattttttcatgctttttgttatcattattattttaacgtttatttgaggttcgggtgtacatgtgcaggtttgttatataggtaaactgtgtgtcaaagggatttggtgttcaaataatttcatcatccaggtaataagtatagtacctgataggtatttttctctgatcctctccctccttccactcttcaccctcaagtagaccccagaatctgttgttcccctcctagcagccatgtgttctcattgtttagctcccacttataactgagaacatgcagcatttgatattctatttctgtgttagtttccttaggacaatggcttccagctctatgttgctgcaaaggacctgatctcattattttttatggctggatagtatttcatggtatatatgtaccacatttactttatccagtctgccattgatgggcatttaggttgattccatgtctttgctattttgaatggtgctgcaacaaacacacacatgcatgcatctttatggtagaatgatttatattcctctgggtatatatccagtaatgggattgccgggtcgaatggtaattctgttttaagttctatgcctgtaatcccagcactttgggaggccaaagtgagagaactgcttgggtccaggagttccagaccagcctgggaaacacagtgagacccatctctacaaaaaatacaaaattagcccagcatggtggcatgtccctatggtcccagctactcaagaggctgaggtaggaggagagcctgagcccaagaggtcaaggctgcagtgggccatatttgtgccactgcactccagcctggatgacagagcaagactctatctcaataataacaacattaaaaaaaattatagccagaatgtcaaaagattccaggatggaaagttggctataaaaaataaatttcagaaggccaggtgcagtggctcacgcctgtaatcccagcactttgggaggccgaggcagatggatcacgaggtcaagagatcaagaccagcctggccaacatggtgaaaccccatctctactaaaaatacaaaaattagccaggagtgtggcatgtgcctgtaatcccagctacttaggaggctgaggcaggagaatcgcttgaacccaggaggcagaggttgcagtgagccgagatcttgccactgccctccagcctgagtgacaaaacaagactccgtctcagaaaaaaaaaagaatttcattgtagcacaaatgaaaggcataacctcactgaaggcagtgggggaaagggagttgacctaagtagcttttggaaacagtgatttgcttggatactctgaacctaaataccaaaagaattgtatttaaatgctgttctttagttggtaaatttggttctcacatgcatgctgattagcagttctgatactccatgtatccaaaggttggacaaataagtaaataatttgtagataatggaagccaactttctcactgtcaaagagtgaagtaacaaataagtaaaaagagaagactagaatgaatccttcctgatggatgagttagaaatcatgattatttatacatacatgtatgtgtgtttatatctacctatgtttccatctatttgtatctacaaatatacatctacacacacacatggatggatgaatggatagatagacagacagacagaaatagagatgtgtgtgcatacatgagttaatacacatgcatatacttcctcactttgtccattaaaaggtccaagaagcagtgatagctcagtaaaagcagatacattaatcacccatattttagtttctaaataccactgaaataagccagataccaataaaataagccagagctccttggagacatggctaattctaggtcagaggcaaggaaaatacaagatgggaacagagcatcttatagcatgagaaaataaagaagtcctcaaaaaggatgagggaggcatgtccaaaggagataggaggctacttgacacagttcccagtaaccaaagccagaaaaatgtagcaatagtaattttttttttttgacagagtctcattttgtcgcccaggctggagtgcagtggcacaatcttggctcactgcaacctctgcctcccctgttcaagcgagtctcgtgcctcagcctcctgagtagctgggactataggcacatgccaccacacctggataatttttttgtattttttagcaaagacaggggttcgccatgttgaccaggctggtctcaaactcctgagcttgagtgatccgcccgcctcagcctcccaaagtgctgggattacaggagtgagccaccatgtcctgcacaatagtatttgattataactcaaagattggcataaaaaaatccatgagttcatactgatataatgcatgtttgaacaaataaataaatgggagggaggggaagagtcaaatcctcattacgtaagaattccaagtaaagtaagaggaacaagggaaacatcaaatcaccacaaaaagcacaacagcaacaattgctgcatgcaggattcgctgataaacgctaaaattagtgggaaaaaattaaaggagaaataagatatttgcaccgtttcaaagcatattcccccagaagtttattaattattgtgattttgacaagtacccacaactttttgttactccccacaccaagtgatgaatgttaactcccctttcctcaacatctcaacatgatctggacttagtaacttgcttctaataaatatcatatgacaaaaactagtaactttacattggggaaacctcacagacaccaccttaaacaggcaatcaaggttaacatcatatggatatcatgtatcccctgatatgatacaatgagaagggtaccaggtggtgttcttccccaaaattcataacctccgtctaatcataagaaaacttctggccagacatggtggttcatgcatgtaatctaatcctagcactttgggaggcagaggcaggcggatcacttgaggtcaagagttcgagaccagcctggccaacacggtgaaaccctgtctctactaaaaatacaaaaattagccagccatggtggtgggcacctgtaatcccagctactcgagaggctgaggcaggagaatcacttgaacccaggaggtgaaggttgcagtgagccaagatcacaccattgcactctagcctgggcgaaaagagcaaaactgtcaagaaagaaagagagaatgagagagagagagggagggaggaagggagagaaagagagaggaaggaaggaaggaaggaaggaaggaaggaaggaaggaaggaaggaaggaaggaaggaaggcaggcaggcaggcaggcaggcaggcaggcaggcaggcaggaaggcaggtaggcaggcaggcaggcaggaaggaagggaggaaggaaagaaagaagggagaaagaaagaaacagaaagaaagaaagaaagaaagaaagaaagagaaaagaaaagaaaacttctgatacactcaaaatgaggagctttctacaaaatacctgataaatactcttcaaaattgacaaggtctttaaaaaaagaaagaaactaacaatttgttatagattggaggaggaaagagccacgatgactaactgctatgtggattcctggaaaagatcctgaaaaaggaaaagaacattagtaggaaaacaggcaaaatcataataaagtccatagtttacttcatatgtctagtgttccactattgggacgctaaggatgtgggagttcttcatatcctactgctcaaggtcatcgccaaggtctgatttttcaaattcaaaaaactgcaacctcaggaataaatgggttaatatattattccaaggttaatttcccagattcgatatatttataattattgtgtgagatgttaaaaataaaggaatttgagggaagtacatcaaataattatttgtgctgtcttttcaaattctaaaattatttttttaattataaaagccacaacaagataccactattataccattataccatttataatggctaaaaatttttaaacttatctatactacacggaggcaaggctgtagaagaattgaaatgttaatacattgctgaaggaaattaaaaatcaaatatgcagtgtggaaaacagcatggacgtttctttaaaaattaagcatcaacaatatgacccaaccattctgcctttttgatattcattcaagggaaatataaatatatatccacatgaagacattttttacacaaatgcttgtatcagctttattaaaaatagccaaaatctagaaacaatgcaaatgctcatcaacggataagcagataaagaaatatggttttcccatataatgaaattactcaacaataaaaagaaaagacctcttaacaaacattaacagtgtagattagtctcaaaatcacattctagaagaaagagtaaaaaaaaagcaaattatatattatatttacataaaattataggaaacaccaaataaaccattgtaacagaaaacagatcaggctgggcacggtggctcatgcctgtaatcccagcactttgggaggccgaaatgggcagatcatttgaggtcaggagttggagcccagcagaccaacatggtgaaaccccatctctactaaaaatacaaaaattagctgggcatggtggcaggtgcgtgtaatcccagctactcaggaggctgaggcagaagaatcacttgaacccgggaggcagaggttgcagtgagctgagattgtgccactgcactccagcctgggtgacagagcaagacttcatctcaaaaaaaaaaaaaaaaaaaaaaaaaaaaagaaaacagatcaatagttgactgtgggtggtgttagagggagacatggattgcaaagaagtacaggcaaatttgagggtgatccaaataattgtttatcttgatcgtaacaaaaatttgggtgtctgtatgcatatatatatgtatatgtgtatatatcctgaaaattattaaaatgtgccaagtcaatcctaagccaaaagaacaaagctggaggcatcacgctacctgacttcaaactttactacaaggctacagtaaccaaaacagcatggtactggtaccaaaacagacatgtagaccaatggaacagaacagagccctcagaaataataccacacatctacaaccatctgatctttgacaaacctgacaaaaacaagaaatggggaaaggattccctatttaataaatggtgctgggaacactggctagccataagtagaaagctgaaactggatcccttccttacaccttatacaaaaattaattcaagatggatcaaagacttaaacgttagacctaaaaccataaaaaccctagaagaaaacctaggcattaccattcaggacataggcatgggcaaggacttcatgtctaaaacaccaaaagcaatggcaacaaaagccaaaattgacaaatgggatctaattaaactaaagagcttctgcacagcaaaacaaactaccatcagagtgaacaggcaacctacagaatgggagaaaatttttgcaatctactcatctgacaaagggctactatccagaatctacaaagaactcaaacaaatttacaagaaaaaaacaaacaaccccatcaaaaagtgggctaaggatatgaacagacacttctcaaaagaagacatttatgcagccaacagacacatgaaaaaatgctcatcatcactggccatcagagaaatgcaaatcaaaaccacaatgagataccatctcacaccagttagaatggcaatcattaaaaagtcaggaaacaacaagtgctggagaggatgtggagaaataggaacacttttacaccattggtgggactgtaaactagttcaaccattgtggaagtcggtgtggcgattcctcagggatctggaactagaaataccatttgacccagccatcccattactgggtatatacccaaaagattataaatcatgctgctataaagacacatgcacacgtatgtttattgcggcactattcacaatagcaaagacttggaaacaacccaaatgtccaacaatgatagattggattaagaaaatgtggcacatatacaccatggaataccatgcagccataaaaaatgttgtgttcacatcctttgtagggacatggatgaagctagaaaccatcattctcagcaaactattgcaaggacaaaaaaccaaacaccatatgttctcactcataggtgggaactgaataatgagaacacctggacacaggaaggggaacatcacacaccagggcctgtcatgagttgcggggagggggtagggatagcattaggagatatacctaatgtaaatgacaagttaatgggtgcagcacaccaacatggcacatgtatacatatgtaacaaatctgcacgttgtgcaaatgtaccctagaacttaaagtataataaaaaaagaaaaaaaaagtacattgtcaaaatctcaattattttacttcaatcatctctcagtaaagttgctaaaagtcactgaaatatacacttgaaatgggtgcattgtgatttgtaaaatatgactcaatcaagttattgaaaaatccatgatatgttcaagaaacttttttaaattacaaaaaagagaaaaataaagataatttgagaaataattagaatctaattaaaatatatataaacaaaaataaacagaaaattaaaaatgcataatgactaaaaccaaagagggggtaaaacagtaacatgtgggtcatgcttaaaagctccaatgtgtataattagcatttcagagagaagagagggaattcaccaaaagcaatataagattaaatacaaactgagaattgtccaatactgataatatatttaaatgcaaataattaaataattctgtgaatatcaagcttgagaaatgaaaaaaaactatatctaaatacagtaagactactgaaaactttaaaacagtcaggggaaaaaatgttaccattttactttcaaatgagaaatgataagactgacagtcccaggaatgatggaatcaagaagaaagtagaataataccttttaaagttataaaagaaaaataactactagcttaaaattccacacccagtaaaaataaccatcatcaatgagtgctggaaaaaatatattttcaaaagaatactgagagaatccactgggcaccaataaacctgcattgaaagaaacactaaagaaagttccttgggtaggaaaggatcccagagaaaagtagaaaggactaagaacaattgaaaaattaagtgtgtgaataagtataactaaatagtgattaaatgatcattattcaaaaaatagcaatgtattaagggttttaaaatatgcacaatgaaagtatattacaacaataaagcaaaagaggaaaagacttaaaaagagttgattttgtttgtttgtttgtttgtttgtttgttttttgagatggagtcttgccttgtcgcaagagtacgatccggcgagagactggagtgcagtggtgcgatcttggctcactgcaacctccacctcccgggttcaagtgattctcttgcctcagcttcccatgtagctgggattacagactcacaccaccacacctagttaatttttgtatttctagtagagatggtgcttcaccatgttggccaggctagtctcgaattcctggccttaagtgatctgcccgccttggcctcccaaggtgctggcattacaggcatgtgccaccatgcccagccctttttggttgttttttaattcattttttcacatttttgaaaattgcaatagcttttcaggtacaagtggtttctggttacatggagaattgtatagctgtgaatctcagattttagtgcatctgttacccaagtagtgtacattgtacccaatatatagttttttatccctcaccacccccccaccaccaaccttccagtcttctgagtctccaatatctattatacctctctgtatgcctttgcatacacatagtttagctcccacttataattgagaatgtatatttggttttccatttctgagttaacttcacttagaataatgtcatccagatccattgaagttgctgcaaaagacattattttattctcttttatggctcagtagtatgccacactatatatataccacattttctttacccactcatcagttgatggatacttaggttggttccatatctttgcaaattgtgttgcaataaacatgtgtgaaggtgtctttttgatgtgatgacttctttccctttggaaaaaaaatccagacatgggattgctagattgaatgataggtctacttttagttttttgagaaatgcccatattgttttccatataggttgtactaatttacattcccaccagcagtgtgtgtttccttttcaccacatccatgccaacatctgttgcttttgactttttaataacagccattctggctggggtaaggtgatatttcgctgtggttttaatttgcatttctctgatgattagtgatgttgagcattttttcatgtttgttggccatttgtgtatcttcttttgaaaagtgtctattcatgtcatttgtccattttctgatgggattgtttttttttttcttgctgatttatttgagcttcttgtagattctggatattagtcatttgtcagatgcatcatttgcaaatattttctcccattctgtggtttgtgtgtttactctgattattcttttgctgtgcagaagcatttgaatttaattatgttaaaataggctaatactgaaacttttcagtgttagtgtggaaaaggtaaaagaataatttatgctagattgtaatgagtcaaatgtattagttaatctctagggaattcactaaaggaatagcaaaaggtaacaagttaatacagggggcaaaagaactaattttttaaatggtcaatcaaaaatatggtaagagagaaatgcaatagaaaacataatcacaaaaagagaatggaaaaaatagtaaaaaacaactggacaaaaaatatgtgtgtaatgcacagaatattgattcacaaactgattatcaataacttatattttcaaatatatataaatttaagttatgaaagagaaaacagaataatattcttcaataaattaaggtaaaaaagaagaggaaaaaaagataaaataacaaataaaaaagagaaaagtgataaccataaacccaaataaatcagtcactatattgactgtaagtagataaatacccgcaatcaggctaggcgcgttggctcacgcctgtaatcccaacaatttaggaggctgaggcgggtggatcacctgaggtcgggtgttccagaccagcctgaccaacatggagaaaccaccctcatctctactaaaaaaaaaatacaaaattagctgggcatggtggcacatgcctgcaatcccagctactcgggaggctaaggcaggagaatcgcttgaaccctggaggcgaaggttgcggtgagccgagatcgcgccactgcactccagcctgggcgacagagcgagactccgtcaaaaacaaaacaaaacaaaacaaaacccaagcaaaagtctagaattgtcagattagatttgatttttaaaaaccaataaaatgactagcatccccaatgacataacttcagactaaaaagaagggaaaatccctgtgaacatgttcacagatgccagcaactgtgaccctcccccgtcccccaccctgttgttgcgggcgtaagcatgtgccggaatgctgttactccatttgtgccagtgccccacacttgccaacacatgcaccctgccacattcaccctgccacactgcaccctacaccctgccacactgctgtggctactggcaggcacaagtgagcaaggatcctgctgccaccatttaaatgaagcactctggccagcatctcccatcagatcattgggccaacagaatgggaacacctcagttcctccagcacagcaggttcctaacttcaaggggccagagaacaaagctgggggcctggcaccaagcctcaagagttagagcaggcagcccaggagtgctgagctggggcttgatcccctaaaatcttcccgaaataaagctagttgactgaacccacattatgccacaatcaaacccccaagggcatcaaagaaaatgaaagcaaaaaatctcattcaaaggacaacttcaaagattgaaggaatatgagtccacacagttgagaaagaaccagtgcaagaactctagcaactcaaaaagccagagtatcctcttacctcttaatgactgcactggttcgccagcaatggttcttaatgaggctgtaatggctgaaatgacagacatagaattcagaatatggataggaatgaagattattgagattcaggagaaagctgaaacccaattcaaggagtctaaggaatacaatagaatgatatgggagctgaaaaatgaagtggccatttgaagaagaaccaaattcatcagatagagctaaaaaactcactttgagaatttcataataccatcacaagtatcaacagcagaattgaccaagctgaggaaagaatctcagagctcgaaaaaaaaacaattctcttaattaaatcagtcagacaaagacagacagacagagagagaattaaaaagaatgaacaaaacctctgataaatatgagaaaatgtgaagagaccaaatctatgactcataggccaaatctatgacttggagtcactgaaagagaggaagagaaagcaagcaacttggaaagcgaatttgaggatactgtccatgaaggtatctaaccttgctagaaaaatgcagggactgcgattttaacttcagaccaaacagactaagccaacaatggttaaaaaaaaaaaaaagatgaagaacggcattacataaatggtaaggggttcgattcaacaagaagacctaactattctaaatatatatgcatcaaacccagaagcaccaaggtcttctaagaccttgaaaagagactgagataatcacataataataatgggatagatcaacagcccacttatagtattcgacagatcgtcaaggcagaaaactaatgaagacattcaggacttgaacttggcactcaacaaaatggacctaacagatatctacagaaatctccattcaaaaacaaaagaatatacatacttctcatttgcacatggcacatactctgaaattgactacacaatcagctataaaacaattctcagcaaattaaaaaaaaatgaaatcataccaaacacaacattcaaccacagtgcaataaaaatagaaatcaatactaagaaaatcattcaaaaaccatacaattacatggaatttaaacaacctgctcccgaatgccatttgggcaaacaatgaaattaagcaacaaatcaagaaatgatttgaaactaatgaaaataaatatataacatagcagacagaatctctgggacacagctaaagcagtggtaagaggaaaatttatagtgctgaatcccacatcaaaaagttagaaagatctcgaatgaacaacctaacatcatacctagagaaatgagaaaagaaaagagatcaaaacaactccaaagggagtagtaaacaagaaataaccaaaatcagagctgcactgaatgaaaccgagatgtgaaaaaccatacagaagatcaacaaatccaggagttcattatttcaaagaataaataagattgatagatcactatctagtctaataaaggaaaaaagagagaagagccaaataaacacagtcagaaatgacaaagagaacattactactgaactgaaatgcaaaaaaaaacccagtgacaacaacccttagagactactctgaacacctctgtgcacacaaactagaaaacctagaaaaaaatgaataaattcctggaaacatacaacctcccaaaattgaaccaggaagtaatggaatccttgaacagactaaaaattagttacaaaattgaatcagtaataaaaagcctaccaaccagaaaaagcccaggactagatggattaacagctgaattccaccaggtgtataaagaagagctggtaatattgctactgaaactattccaaaaaattgaggaggagggactctttcctaacttattctatgaggctggcatcattctaataccaaaacctagcagagacacaacaaaaacagaaaacatcaggccaatatcattgatgaacatagatgcaaaaatcctcagcaaaatactagcaaactgaatccagcaacatatcaaaaagcgaatccaccacaaatgggtaggctttatctctgggatgccaggttagttcagcatatacaaattaatgtgattcgtcacataaacagaactaaaaacaaaagccacatgattatctcaataaatgtagaaaaggttttgataaaatggaacattccttaatgttaaaaaccctcaacaaactaggcattaaaataacatacctcaaaaaaaaaagtcatatataacaaacccagggccaacatcatactgaacaggcaaaagctggaagcattccgctgagaaccaaaacaagacaaggatgcccattatcatgactcctattcaacacagtattggaaatcctagccagagcaatcagcaagagaaagaaataaagggcatcccaatagcaagagattggaagtcaaactatctctgtttgtggatgattaattctatacctagaaaaccccatagtctctcccaaatgttccttgatctgatagtcaatttctgcaaagttttaggatacaaaatcaatacacaaaaatccgtagcatttctatacaacaacaatgtccaagtggagagccaaattaagaacacaattccattcaaaatatcccccaaaagaataaaatacctagaaataaagctaactaaagaggtgaaagatttctacaatgagaattataaaacacaacccaaagaaatccaagatgacacaaacaaacagaaaaatatcctatgctcatagataggaagaatcaatattgttaaaatggccatactgatgccatgctactgtgcaatttacagatgcaatgctatccctattgaactaccaatggcattcttcacagaattggaaaaaactattttacaattcatatggaaccaaaaagagcccaaataaccaaagcaatcctaagcaaaaagaacaaagctggaggcatcacattacctgacttcaaactatactacaaggctacagtagccagaacagcatggtactcaaacaaaaagagacacatagaccaatggaacagaataaagagcccagaaagaaagccatacacctgcaactatctgatctttgacaaagtaaacagaaacaagcaatgggggagggccttcctattcaataaatggtgctgggataactggctagtcataggcagaagactgaaactggaccccttccttacatcatatttaaaaaattaactcaagatgaattaaagacttaaatgtaaaaccaaaaactaaaatcactggaaaacaacctaggaaatacaattctggacatagaccctggcaaagatttcacaaaaaagacaccaaaagcaattgcaacataaacaaaaattgacaaaggagacctcagtaaactaaggagcttctgcacagcaaaagaaactatcaacagagtaaacagacaacttacagagtgggagaaaaattttgcaaactatgcaaactatgcatccaataaaggtctaatatccagaatctgtaaggaacttaaatgaatttacaagcaaaagacaaccccattaaaaagtgggaaaaggacatgaacagacacttcaaaagatgatatgcacatagctaacaagcatatgaaaaagtgttacatatcactaatcatttaaaaaatgcaaatcaaaactataatgatgtaccacctcacaccagtcagaatagctattattaaaaaataaaataataacagatgttcgtgaggttgtggagaaaaacaaatgcttctacactgctggtgtaatgtaaattagctcagccattgcggaaagtagtgtggcgacttctcaaaaattaaaacaaaattactatttcacccagcaatttcgttattgggtatatatccaaaggaatataaatcattctattataaagacacatacacatgtaggttcactgctgaactatttacaatggcagacatgaagtcaacattaatgcccatcaatggtaaactggataaagtaaatgtggtacatatacaccatggaatactatgtagctataaaaaaaaaatgagatcatgtcctttgcagaaaattagatggagatggaggccattttcctaagcaaactaacacaagaacagaaaacaaaatactatgtgttctcacttataagtggaagctaaacattgagtacaaatggacacttgagtacatgagggtggagggtgggagggagaggattgaaaagctacctatcaggtactatgctaattacctgggtgatgaaataatctgtacaccaaacccccatgacatgcaacttacctatataacaaacctgcatatatacccctgaagctaaaataagttttataagatataaaataaaaataagaaaaaaataggtaaatccacaaccacaatatgaaacaataaaatgagataccgtcttttcaagggcacatgaaatatttacctctatggtggtcatatagtaagccaagataatatttaaagagccaaaatcatttacaaatttgctgatcacagtgaaaataagttagaaactattaaatgactaaccaaaaaaacgactagaaaaacttctatgcttggaaaataagcaatatgcctctaataaaccctgggtcaaaaacaattttgtttagtaaatgaaataatgtttgagctggataacattgaaagtaaaatatgtcaaaatatacggaattcagctaaaacagtactgtaaagtaaattcatagctttaaatgaaagaaaaataaacacaaaaataaattatctaaccacacatagcaagaagccagaaaaaagaacaaatcataataaaatatattggaaaataaaataaataagaacaaagattaataaaaattttaaacaaaacaaagtaataaggccaaaatttgttttttgaaaagaataaagggatgaaaacaacaaaaatcagggtaagaaaacaattttttttgtgccatgatatttgacaatttagatgaagtggaaatacttattgaaaatcacatcttaacaaactgactcaagaaataatataaaatctaaatgtatatactagcatgtgtgtgtaaatatacatattcaatgacagtttgcttcactagtgaattattctgaacatttaagaaagaagttgcagcaacttcatacaaactcgttcagaaatagagaaaaatacacactttttatctcattataagagccccagcattcaatagtcttaataataagactattgaatactaaaactgaaaaggacattgccacataagaaaatttcagacaaattctccatgaacataaagaaattattaacaaaatgttagaaaatcaaatgtgatacacaacaaggataataaattattactaagcataatttgagcaatgaaaaatggctcaacttccaaaaacccatcagtgtgagagtttctgaagaagatgatgtagactcatttctccctgctcttctctgctatgtacaactacaaacactggaaataatgcaaaaggcaatgaaaggagaattctgaaagatgggaagaggaagacaaaatagtaatggaactcagcgctagaggaaaaacatagtgacagggtgtcttacggcccccaacaacataaaaaatgcaacaaacacagacctagaattttctaaattccaaccaagcaacagaagatggtccgggtaggctcattcttctcccagccagaccagacaagcaataccaaaaggacaatcaatcagaagtcctgctgaaaagaaatggcccagccctagaagcactacccttccacactaactaccctccacaccaacctgggactcccctgaaccaccatgagaaaccaggcaccaagagcagcactggcaaggagatctcatcattattggacacagcccaggaatcctctctgtcattgagggtccaagactccacacccccactgagagatactcaggcagctgggcaggaccagcaagggtgattccacctagcccataaaaactcttcatccctataggctggaatcttttctcctccacccagtgtcagcaggtggcattggcaagggggatcctgccacaagcagtccccagccagggaagtgccctcctttccctagaggcaggatagtcttgtcacaagtgccctgcctgggaagtgttcctcattctcacaggccattcttcaactacagaaaccaggcggcccagcctggaaaatccctgtcatacttcttgggaatcacaaagaaagatcagaggaagccccaacagcaccagataaactaagtagaccaaaatagtaccacaaaataacaccagctcctaaaattaagtagtcactgaaagcacagcagataaaagtaggccagacatgtgtgctaaaactaaccaggatataactcccaacaaaaaaaaaaaaaaaagatttaagcagaacacacagcttcctaagacaatatcacaatgttcaagatataatcaagaactaggaaaaccacaacttgaataagaaaaaatgatcaactgatgctaagaccaggatggatcagatgttttaattatctgactataattttaaataaataatcataaaaatgcttcaacaagcaattacaaattctcttgaaacaaaaggtagaaaatctcatcaaaggacaagaagatatagaatagaactaaatggaaattatggaattgaaatatagaataactaaaacgaaacactcactggatgaaatcaatcatagtgtttagataatagaggatacagtcagcaaactggagaacagatgaataaaatgtacccaatgtgacaaacagagagaaaacagattgataaagaaatgaacagagcctcaagggtgtatgggacaataacaagagatccaacgccaacattaattccactgaaattccagaaagcgaagagaaagagactgaggctgaaagactattcaaataaataatgattagcagtttgacaaatttcgtggaagatgtaaacctggaaattcaagaagaattcaaacaagataagcccaaataaatccatgtcaagacatatcataataaaacttctgaaaactaaattttttaaaagaaatcttgaaagcacctagaaagaaactacccagaagaatacaaaactacagtgaattgagaatatgaaactatggtaatcagtagaaaatggcataacacatttaaattcctgaaagaaaagaactctcaaccataaattctgtctgtctttctgacataaagaggaaataaagacattctcagatgaaggaagaccaaaagaatatgtgcctagaagaccaatccttcgagactggataaataacatttactaagcaaaaagaaaataaaagcattattggagctttaggaagtaaaaacaacagaaatatgagtatatactatccttcttcttctgagttttataaatttatttgataattgaaacagaaactataacaccatttgatactcaggacaatgacatttaaaagtatgaaaggtaaaggtacctaaatggaagtaagatttctacacttcactcaaagtggcaaaatgttaacaccaataaactgataagtcacatatgtgtattgtaatagtcagagcaaccactaagaaaactacacagagatatacactaagagaaacagaaaaattaaaaacagaggaaataaacaattatgatttagcacttacttaaatgctaaaacaacaatacttatcttaaggatgtaaatatgccaattaaaaggcaaaaatgggaagaatagattttttaaaaatccaactaaatgctgtttgcaaaaaaaaagttacttcaaaggcaataacatggtgggttaatgtcaaaaaattcaaaaatataccatgcagacattaatttttaaaaagtaggagtgactatattaatatcaggtaaataaaatcaacagagataaagagggacattacaaaattttaaaaggaaaaatccatcaggaagacataatgatcctaaatgtgtatgctccaaacaacagatcttcaaaatgcatgaagaaaaaactgataaagctgagaagaaaaatagacaagtccataattatagttggggacatcaacaaccccatctcggcatctgatagaaccaatagattaacaaggatattgaaactctgaacaacacaattgatatggtttggctgtgtccccacccaaatctcaccttgaattgtaataatccccacatgccaagggtggggccaggtgaagataattgaacgatgggggcaatttccccatactgttctcatggtagtgagtaagtctcatgagatctgatgattttataaatgggacttcccctgcacaatctcccttgctgaccgccaggtaagacgtgatattgctcctcctttgccttccatcatgattgtgaggcctacccagtcatgtggaactgtgagtcaatcaattaaacctctttcctttaaaaattactcagtcttgggtatgtctttattagcagtgtgagaacagactaatacaacaatcaaccaataatatctaattgacacatatagaacatttatcccaatatcagcagaatatacatcttttcaagttccactgattattcacaaagatagatcatatcctaaacaataaagagacttcaatgaattttaaagaactgatatcatacagagtatgttatctgattataatggaatcagactagaattcaataagagaaaaacaaaaggatgatccttaaacatgtggaaagtaacaataaagttttaacctaagccataaatcaaatagtaaatttcaaaggaaattcttagaaaatatatagaactgaatataaatgaaatgcaacatattaaattatgtaaaatgcagccaaaatagttctaataggaaaatttatagcactaaaagcttatattagaaaaacataaatgtctcaaataatctaaggttctacttcaaggagtaaaaaaaagcaaaataaattcaaagcaagcagaaataaaagatgagagcagaaattaataaaattgaaaatagaaatataatttttaaaatgaaacaaaatattgttcttcaaaaaatcaataaaggaggggaggacaagatgaccaactagatgtagacaagtggaatagctcccatggagggatggaaatgactggtatgcttttaacagatcttcagagggaaggcaccgagagtggatggaggaaagacacacaagctagattgaagagggagaaaactgttaaccccacaagggctactgagccctgggattcatttttgacctacaacagctctaggggaatggatgaattgaactggcaagaagcaacccactctcaccacaggcctctggattccaggcaggagaggaccccttgaccatcacggacacttgagatagcagggatagctgattagagaagtggtggggcagcagccagctgatgtagagtatagaggctttggtataggtgcagctgtagtggagcatggccaggtacagctatctccctaggctcaacttcctcctaaataagagactttagctttaggggaactgtcagacttgatctctgtagggtggtcttgcacatcaaacaggactggtccaacctgagcactccttggcctgcttacctctcctggggccccagcatcaccatgcctgcttataaggcagcgtcaggtgccctggtggcacacaccatagcttctgcaccagaggaccaagcccgacaggtggagagctccaatgaagtggctcctgtggctgcacaccagcccacatgccacctccccatattgcagcttcccctgagcccacagcaactccacacatcacattgttagcatgtgtctgcacaggtgggttttgctttacttgccctgccagcatgtgggagtgcagtttgtctccccacccccaccaccgactgtcactgcagacagagccttcgtggcacacagccaggaagccctgcctccactagtgtcccatacttgtgctaatgctgcacagagaacaaaggatcctcccacaacctgagcaatcactagcttatgggggcacagagaaagcacccagacctatgccagccagcaccttgtcccaaaccaactccacctccagcacaacagtgcacatagtctccatcagggttcctcctactaccagctgccttgcctctgccactatggtgaatgcccacagtgaggctggcacccctgcccatgctaacactctgttgcagctgtcgcaccttggcatccccagcacagtggactccaaacctctaggagtcagagaacaaagttggggcccaatacaagttctccagagttagagcatgcagtccaggagttgggagctgagcactggcccctgaaaatctcccagaaataaagcaagttagtgaatccaccttatactacaatcaagtcctcagagtcatcgaataggacaaaaggagaaaaaaaaaaaaccatccagaggtcagcaacctcaaagattgaagttagataagcccacaaagatgagaaagaatcagcacaagaatgctgaaaactcaaagccagagtgtcttctttcctccaaatgaccgcatcatctctccagcaagggttcagaaccagactgaggctaaggtgactgaaatgacagaaatagaattcagaatatggataagaacaaagctcacgaagctacaggagtaggttgaaacccaacgtaaggaaggtaaaaatcatgataatatattgcaggaactgacagacaaaataaccagtttacagaagaacataactgaccttatagagctgaaaaaacactacaagaatttcataatgcaatcacaagtattaatagcagaagacaaaaggtggaaagaatctcaaagtctaaagactgcctttctgaaataagacaggcagacaaaaacagagaaaaatgaataaaaagaaatgaacaaaaccatcaagaaatatgggattatgtaaagagaccaaacctatgactgacttgtgtacctgaaagagatgcagagaatggaaccaacttggtaaatatattccaggatatcatccatgagaacttccccaacctagctagagaggttaacattcaaattcaggaaatgtagagaaccccagtcagatagttcacaagaagatcatccccaatacacataatcatcagattctccaaggttaaaatgaaagaaaaaatgttaaaggtagctagaggaacagaccaggtcaccaacaagggaagctcatcaaactaactacagacctctcagctgaaatcctacaagccagaagaaattgagcactgatattcaacattcttaaagaaagaaattccaacccagaatttcatatccagccaaactaagcttcattagcaaaggagcattttcagataagaaaatgctgagggaatttgttaccaccagaacttccttacaagagctcttgaaggaagcactaaatatggaaaaaaatacttaccagctactacaaaaatacactgaagtacacagaccagtgacactataaagcaaccacacaaacaagtctgcataataaccagctaacataatgatgacaagatcaaatccacacatatcaataataaccttaaatataaatgatctaaatgcccacaattaagcacaagtggcaagctggataaagaaccaagatccattgttatgctgtcttcaagagacccatctcacatgcagtgacacacataggctcaaaataaagaaaggaaaaaaatctaccaagcaaatgggaaacagaaaaaagcagaggttgtaatccttgtctctgacaaaacagactttaaatcaataaagataaaaaaagacaaagaagtacattgcataatggtaaagtgttcaattcggtgagaagatctaactatcctaaatatatatccatccaacacaggatcaccaagattcataaagcaagttcttagagacattcaaagagactcagactcccacacaataatagtgggagactttaacaccccactgacaatattagacagagcactgagagaggaaattaagatattcaagacctgaactcagcactggatcaaatagaacttatggatatctacagacctctctacccaaaaacaacagaataaacatcttctcattgccacatggcacatattttacaattgatcacataatccaaagtaaaacactcatcagccaatgcaaaagaaccaaaattataacagtctctcataccacagtgtaattaaattagaaatcaagacaaagaaattcactccaaagcctccaattacatggatcatatgaatgactttctggtaaataataatattaaagcagaaatcaagaagttatttgaagctaataaaacaaagacacaatgtaccagaatctctcagacataactaaggcagtgttaacgtgaaatttatagcactaaatgcccacatgaaaaggttagaaagatctcaagttaacaacctaacatcacaactaaaagaactagagaaccaaaagcaaacagatctcaaagctagcagaaggaaagaaataaccaaaatcaaagctaaactgaaggaaaaccattcaaaagatcaatgaatccaggagctggttttgtgaaaaaaataaaataaaatagatagactgccagttagacaaataagaaaacagagaaaattcaaataaacacaaccagaaataaaagcagcatattaccattgactccacagaaatacaaacaaccatcagagaatattatgaatatttctaggcatataagctagaaaatctagaagaaattgataaattcgtgtcacatacaccctcccaagactgcaccacgaagaaactgaaaccctgaacagactaataatgagctctgaaattgaggccataataaatagcctaccgaccccaaaagcctaagaccagagagattcacagctgaattctacctgaggtactaagaagagctggtactattcctactgaaactgttctaaaaaattgaggaggagaagggactcctccctatctcattctatgaggccagcatcatcttgataccaaaacctggcagagatacaaccaaataagaaaagttgagaccaatatccttgaacctcaaaataataagagccatatgtaaaaaacccacagccatcatcatactgaataggcaaaggctggaagcattccccttgaaaactggcacaagacaaggatgcgctctctcaccacttctattcaacatagtattagaatccctggccagggcaatcagacaagagaaagaaataaagtgcatccaaataggaggaggagaagttaaactatccctgtttgcagatgatatgatcctatatttagaaaaccacatagactctgatcaaaagtttcttaaactgataaagaacttcagcaaagtcttagggtacaaaaatcaatgtgcaaaaatcactagcattcttatacatcaaccactgtaaagcagagagcacaatcaagaacatactcccattcacaattgccacaaaaagaataaaataccaaggaatacagctaaccaaggaagtgaaagatctctacaaagagaactacaaaacacttctcacagaaatcagagatgacattaacaaatgaaaaaaacattcatgctcatggatagaaagaatcaatattgttaaaatggccatactggccaaagcaatttatagattcaatgttattcctattaacctactattgagattcttcacagaactagaagaaaacattttaaaattcatatggaaccaaaaaatagcctgaatagccaaggcaatcctaagcaaaaagaacaaagctggaggtatcagggtaccctacttcaaaccatactatacagctacagtaaccaaatcagcatggtactggtacaaaaacagacatctataccaaaagaacagaaaagaaaacccacaaataagtccacacacatacaactacctgatcttcaacaaacctgacaaaaacaagcaatagggaaaattccctcttcaataaatggtgctggaataactggctagccatatgcagattgaaactggactccttcctttcaccatacacaaaaattaactcaatatggattaaaaatttatatgtaaagccccaaactacaaaaactctctaagacaacctaggcaatatcattcaggacataggtatgaacaaagatttcatgacaaagaggccaaaagcaattgcaacaaaagcaaaaattgacaaatgggatctaattaaactaaagagctcctgcaaagcaaaagaaactaccaatagggtaaactgacaacctacagaatgagataaaatttttgcaaactatgcatctcacaaaggcctaatatttagtatctataaggaacttaaacaaatttatcaaaaagaaaacattaaaaagtgggcaaagaacatgaacagatgcttttcaaaagaagacatacaggtagccaaaaataatatgaaaaaaagctcaacatcactgatcattaaagaaatgcaaattaaaagcacaatgagataccatctcacaccaatcaaaatggctattatgaaaaagtcaaaaataacagatgatggcaaggttatggagaaaagggaacacttatatactgttagtaggggtgtaaattagttcaaccattgtggaagacagtgtagcaattcttcaaagacttaaagaaagacatactattcaacccagtaatcccattactgggtatataccccaagagtataaattgtcctattgtaaaaacacatgcatgtgtatgttcactacagcacaattcacaatatcaaagacatggaattaacctaaatgcccatcaatgctagactggataaagaaaatgtggtacatatataccctagaatactatgcagccacaaaaaagaacaagatcatgtcccttgcaaggacatggttggagctggaggccattatccttagcagaatagaaacagaaaatcaaatactgcatgttctcacttataagtggcagtcaaatgatgagaacacatggacacatagatggaaacacacactgaggcctattggagagcagaggatgggatgagggagaagagcagaaaaatatctaatgggtactaggcttaatacctgggtgatgagataatctgtacaacaaacccccatgacacacatttacgtatgtaacaagcctaaacatgtattcctgaacttaaaataaaaatttaaaaaatcaataaaagtgataaacctctaacaagactaacaaaaataataataaagaaaagacaaatcacaaatgtcaggaataacacaagagatactattacagatgctatagccatttgaacaataaaagaaaatacaaacaacattacactcataaatttgacaagttagaagaaatgaccaattatttcctacaaactaccagaagtcaaccatgatgaaatagataatctgaatatcccaataaccgttagagaaatttaatttgtaatttaagagctcctgtaaaagaaatccccagactataatgattttactagaggattatatcaaacatttaaacaattaaaaccaaattctacaaatctcttccaaaagatgaaaaacaagtgtgttcctacatattttatgaggctaatactaccctgatgcctaaagcagatatgatagtacaacagcgaaaaaacaaaaacaaaaacaaaacaaaaaaaacccctacacctcaatattctcatgaactcagaatagcaatatcccccataacgccttagcaaatacaatccaacaatgtgtaaaacgttttggtaatcaagacagggtcataaagataggcacattgatcaatgggatagactagagaacccagaaatagacccacacaaatatgccaaaatgatttatggcaaaggtccaaaagcaattcaatggaggatggactgtcttttaaacaaatggtgatgaggcaattggatacctatagggaaaaaaaaatgaacttcaacctaaacttcacaatgtctaaaataattaattcaaaatggattatagacttaaatataaaatatgaaaatatcaaactttaaaaaaataggaaaaaatctttggaatatagggataggcaaagaattcttagacttgacaccaaaatcatgatatataaaaggaaaaattgatacacttagcctcattaaaatgtaaaactttagctttgcaaaaaatcctcaacagaaaaggaaaagccaaatacaaattgcaataaaatgattgcaaactatatatccaataagagactagtatctagaatatataaagaattctcaaaactcaacagtacaatataagcaatcgtcttagaaaaacaggcaaaagacttggacagacatttcactgaagagggtatccagatggcaaataggcaaacatgcacataaaaaacattcaacaccactgaccatcagtgaagtgcaaattaaagccacaataagatatctccatgcaattattaaataaaaaatagtgatatcacaaaatgcaggtgaggatgtagaggcattttcttatgcatttcatggctgaagtataaaatggtacagctactctggaaaacagtttggctgtaatttttttttaacactacacatgtaattaccatatgacacagcaattgcactcttgggcatttatcccagaaaacctgtacacaaatgctcatagtggctttattcataactgccctaactgcaaataattcagatgttcttcagtgggtgaatggttaaacaaatagtgaggcatccattcttcgaaataatactcaactataaaagagagaaactcttgacacatgcaacaacttggatggaacctctagaaaattgtgccatttttttctagagttagaaaaagccaataaaaattataatactgtgtgattcaacatatataatattttttaaatgacaaaattttagaaatgtagaatagaaaatattatggttatcaggaggtaggaacaagaagggcagggaggtatgagttaggtccatgtggtcataaaagagaaaatggggaaggaatcttcttggtaacaaaactattctgtgtgttggatgtggtaggggatatatcagctcagacaggaaaatactgaatacaactaaatacacacacacacacacacacacacacacacacacacacacacacacaaatgaaactgggaaaatgtggatctgaatgagatccatagcttgtatcaatgtcagtatccttattgtgttattgcataacagtatcgcaagatgttatcattggggaaactaaataaagggtatgctggatctctctatactatttattaaaactgcatgtaaatctataccaactcaaaataaaaatttaattataaaatattctgaaaaggaagagaaattagatggtatcaaacttagcaaatattggaatatactataaaataataataacagcatggtatggtattggtgcaataaagagaaatgagcaccaacaaaaaggaatacatcaacataatttatcatattaacaggaaagagcaagaataaaaattatataattatcttgatagatgcaaaatagcctttaaataaatgtaacactcattcttgataacactattagtagactaggaattcaagggaattgtcttaatctgaaaaaagaacatcaaccaaaattatgtagtaaacatattaaagaataaattattataaattatcttctgatatcaagaacaaaataaagatgtccactgttattacatctatttaacttgaactaaagaccctaactaatgcaacaagacaggagaaagaaataaaaaaaaaacaattagaaatgcaaatatagaagttttattagtcatagatgacatgattgtgtatacagaaaatctaaaataatctaaactagcaaatacagttagttcactagaaataagtttgatatgcaaacccaattctatttctatatacacacagtaacaagtagaaaaatcaatttgaaatttactacatataataataaatcaatatccaggaataaatcaaacaaaagttattcaaatctctacagtgaaagctacaaaactttactgagagaaattgaagaagccataaataaattgaggggtatactatattcatgaattaggttactcaatattggtaagacattaacacttcccaaattgatcaagagtcaaggcaatctcagtcaaaatcccaaatttttttgtggaaaataaaaatctaattttaaaatgtataagaaaatacaaagagtcaagaatcaccaagtctgtcttgaaaaataagtatgaagcttgctcaggttttcctccacctcctgactgaccctgtggccctgtctagtgtgcttcgcatgcccctctggggaactgtaacaacctatcttttcaatggcagtcgtcccctgatttgttggcctctctatacctgtatgataataaaactttccttgtaaaacccaataatgaattatctaaaactacatacaacaataatgatgaatcttactaacataatgttgagcaaaagaagtacgatacaaaagagtatggaacatttgatatcactgatatcaagttaaaaacaggaaaaacctaattaagggcattagatatcaaaactggttccatttggtgggtgtggtgatgaaaggggtgcacaggggagagctctgagggtgctggtgatgttctttgatgtgagtgttgtctgtatgtacatgttcacttttgaaaattcactgtgattcacgtaagatttagaaatttttctgtataagggttacacttcagtttatattagtaaaaccactaagaattcagtcacaactatattcagaataaaacaaggcattccaaaacaagaaagaataaaaataaaatctaccacctcatataaaaagttttttaaaatagcaataaaattggccaggtgcagtagctcacacctataatcccagtactttgggagactgagggggcagatcacttgaggctaggagtttgaaatcagcgtcaccaggatggtgaaactccatctctactaaaatcagccaggcatagtggcatgtgcctatagtcccagctactcgtgggcctgcggcacaagaatcacttgaacacaggaggcagaggttgcagtgagccatgattgtgccactgcactccagcctgggcaacagagtgagactgtgtctcgaaaagtaataaataaataagaataaaacaattattatgcagcaggcagacagaaaaaaaatacaaaacatgattaaacaaattagacctagttctttgaaaaaaaatcaatagaaaaaactgctgtcaagtctaatcaaaaaataaagcaagacaacacaaatatgtaataataggaatgaagagggagatatgtcaacagctcagtattttttaaattgtttacaagtactatatagagctgtaagtaatgaatttgaaaattccagtgaactgcaagattttcagtgaagcagattgctaaaaatgattaaatgaaatgtagaaaccaggaaataaagtttccaagatacaaaagtaatatctccaaaaccagcagctagcccagaaaattgtacagtcaaattctttccagcgttcaagagctctgcctatgcaagtacaaaagaatgagcaatttctttcccatgttatgaaaagagcacaagcctaacacaagctgaacacaagcatctgagagagaaattctgccaatgttacctacgcatctagcaggaaaccctcacctgctataacaaaaaaacaaaatgatataaaataacacagtaagccaggaccaatttctaggaaagggctcttcacttacagaatggagacacacagaaaagatactcttcttctacttactgctatctttctgggtatgacagtttgaactgccatagtcattctgaaattatgagaaaaattaagactatgccctgagaatagccaagttgagatatgaaaaagacctgggcctttgggctcagcaggagtgtctgaattggccaaccctgaagccttcctagttgcagtcctctttaatgtgaaatagtaagtcttccttattgtttaatccacttaaggtggacattctgttatctgaagccaccacattctgaaaatgtacaaatgtgaattaaattaaagctcagagaaaaaagaaaaatgattaataatttctaaaaatcaatgaggagatatgcaaatttatatagcttataataaaatgtgatattcaagtcaatagggaaatgaaggtctgctgtataaatggtagtagaaagcatttagtggaaaaatgtaaaagctaggccatcatgtcacaatttatcccaaatccatcccagttagatggtagattttgttgaaaaaaaaaaatcaagccacaaaaataactggaagaaagtatgagtaaacagtatctactttgtgaattgggtataagttcctaaaaaacacaaatataagaaaatgcaaatgaataatctaattatttgaccacatatattttttaatgtctgtatgtgaaaatatttttaaattcaaaggcaaactatttattggaacaaaatattgaacacaaataactatcaattcctttctgaaagagaggttatataagtttacaatgtgcaaagaacctgaggtataatttacaaaaatgtgaaatacaaatgaccaataattatactttaaaatgtacaatctcacaagaaatgcaaatttagtatatcactttttcatcttgctgccaaactagcaaaaatgtttaatatatatcaaccatattttttagcatgtgatataacatagactttatatactactcatggatgtgaaagttattaggcctttctataatcaatttgaaaatatgtatcatgtacatcaggagcctaaaagaattattattcttgttctggtaattctacttcttaaaaaatatagtatggaaataaatatagatataattaaaattgtatgtattttagatgtttatgacagcactattctataataatgtggtgaaaatacctaaatattcatcagataggaagatgaaataaatgatggctgcctgtaagttgagtaatgtatttccactgaaaaaatcatagttgtaaagcatagttaaagaaatgaggagatattcccaatataacatttagtaggaaggtcaggatataaaatgtattacaataaagagcaatttgataaatatacatatcatgatctctatgtatgaagggagaagaaacaacaagaaaatacaacagaaacattaacagtatttaattcttggtttaaagattgtagctgacttttacgttcttcttttcatttatctgtgtttcctgaacattctacccttaatgggtatgtattgataaaaacactacctaaaatgaaatacttgattgcatcttttccttattcctttactgggatgaagcagcagtgtttgtttcagttctcggctctgtcaaaaatagttctgcacaagggttcagaacggttgacattttactttgaaaatacactggaagaatgttaatccatgaagagactcaagtttatttctcttctgcgactcactgtgcacagctggaagtctctatgggagcagcttaatagagacactgcacagtcctcagactagatcctcccagccccacctccacccatatccccctcctcactgctgtgcccacttcccaggctcctagcaccaactgctggagccaccaggtaaaggtagcttctacttcattacgagttagccttttcaacctggcttcacctcttacaacttctgaacccgagaatttggggcaatttgtaacactgcatagcagatctgcacgaggatgttaatgatgcactttcaagctcagggaggactggggtcctatggcgtggcaatccctgcacaaagagcagttattactcagtgaattatcagcagacacaaggctctcccagggatgcaacatcaaggggggcatttgattcccatccaaagccagcttttatgaagaatcaaaattgacagagaagttagaagaagcgtcttaaactagtaaaggagaatgaggcccttccatttccctgggaaatcgctggaacagggaggctgagccaagggcagtggtggaaatttcaattcagcaggctcccagccaacaggaagggactgtgatgccctaatgctggctggggaaggttggagcagaaagtgagctgaagaggagacagggagtcacagaactgcatcgcctcaagttcagaaatgatgttctgggtcctctgccaagccccctcactcccaggaaatctgccttccaagcccagcacagcatcatgcttgctggtgctatgcatctccccagtctctgggcctctgtttcctaaacttagctgtgcagaccccaattccccacctattgcaaccagcacatgtgcttctatgactgtttaatacatttgggtcccagcaagatcctgcttgaccagactttgtagggccagagtaaagcttgaccccctggacaaaatactccttcagcctctcttggtcctaacttgattctagaaaggagaagaaaacagctgtgttgtctcacaccacatcagggtctccctcatccaggatgcaaggcataaaacaaagccacaggctgcccagatgctcctgtctacctcccccaccctcctgcccaaggacagctgctgccctccactgagccactgaatcgggtggatgccacccacggaaaatgaggttcaaagggcctgcgagcagttggcaattctcccagggttttcctgcacaagggacccggagatagtggaagagaatgagttgcctacaccagtgccattaggatggagaaaggcgaacagcttcagcaatcaggtcatggagaaatgtttcctctgggctataactagtgctcctatccaggcaagtcatgcttgtggaggaaaaaaaagacaaccatgtttttcttcttgcaatgattacaccaacaccaaaacagccctgaaaataaaatcttatcagaggtgaagttccacagatccctctcagcccttggtctttatatggagtggacatctgctgccaggcatagaaggggagtttggcactgccctggcacacagggctgagtgatcccagctgcaccagctcaaggctgcaagagggagcctcccatctctggccttggctttggagctatagtctagggcactgtcaggctggaggctgtgttttaggccttcctgtgcctctctgctcttgtggagtctgagatagatacgctcagagaaaacacacagtcccatttgcccaaagctgatgccctgtgccatatgagcatgctctcactgccaagtgctgcacagtgtcattacactgactgacccctccatccaacaattaggctcatattacctgtaactttcctctgaagaaacaaaggttcagaaaagggaagttgtgcaaaaactcaggagaggcagagccaggagcaaagcaaaggcccaggtcaatgagacaacatacgtacaatgcacttttggatactgtggatgcttaacagttcctgcccgctccctacacccagcagcttcccacacacaccacctttggaaacttaactacaggtggccctgacagatctgtcagagctcaatcatgagctaaggacatttacatggacacgttcatggaatcctcttttggagattcctgtctgaacaaagagaaacaaagccaagtagaaatttgtggaggtcctgttacagttctgagccctgaaaaaaacatgacaccaacaggataaaagaagcatataccaccccccacccccaagacaaatgtcaggccaatgcctgtgagagctggaagagtttccagcaaacctttcccctggtggcagacccatgccagacagctccaagtacaaaacagacaattaatattttgcttgtagttacacagcaagctgatgatatagacctttgatttttccatacaaagctcactcactaaaaacgcacttcctggatgagataattgaattagtatttgtccagcaccctgcagttgaaaggcgatcacccactccttccctccaatgaaggggctgagtaatctacagtctcttgatgccacttaatctaaaatgtctgggtgactcaccatccctgagatttccctccagggtatttaagaaaatatcttgctacttaatttaaatgattcctcttggtttaagtctgaaagaaactgttttgtctgtgtctggttttgttcatatatgacatatataatctttgcagggaatgctgcccctgcccagcatcacaggatctaggagtctgcccagtcggctcctctagcagctgtgtaccttgcatggccaagagagctgcgactccttggactctgaccttgggcactccttagatgactgatcttggcactgttttggtgtggctcaggaccctaccctcaaatttgccacccatcctcaatttttttctcccttatgtgaatgtcctttatttttaagttaccccgatttcccagccccacccttcacagccccgtctcccacccgaaactaccactcagctctgcctccaaatgctgccctacccccatgatacggtcctaatcccttctccttggttcatctgaaactccctggacttgctttaatgcaccctaggcctgaatcacaaacatttgctacagtaaatcccactccctgctttccagataacttccccttagcagcgataagctgctaggcagacagataacaaccaggatatgcagttattaagggcagattttaaaatgacaaaaagatacattttaaaataaagccgacttgaaaatcagcttcccttccaactcaattacattcaggcctcctgctcaaagcttcttatattgagagatgccagctcccactggcttcagggtttttgaggcgcattgccttggcaacgtggaaggtccagacacctgaaacaggaagtggaggacatagtgcctccccctctctcaggcacctgaggtggccagcctggcgccaggcacaggactggagggtcagctgcttgagacaaggcagggacctccacagccagcattcccaccaaaagaagtaggtgggagacggaaggagctggcaggcaggacctaacttcaaaataagacttggggatgaaggcaagtgcgccaggaccgtggtcgatgtgaacagttattttggcagccagctacacttggcaagctttttcacaccagagtgattgaaagagccctccttacctggtgggagtcccaatgcaagcccatatctcttgtggtcatgacccagaccaatgctgaccactcatgcccatcccctcaccaagtctcacagctttgggcattcctaacagacatcataggccagccctggcttcctggacattgcaggtcacaccctggccctacatgggaagtcacagaatagttgctagccgactccctctaggatgccaccaacaaacctctgagctccaaaatgccatcaagccatgtatgtcagatattgtgtcacaacaaattattgaaacttcaattatttatatgaccaatccatgactctctcctccatcagagtgggctaaaaatcccccgcaccatcccccacatcacacatggacccaggccatcccagtctctccctggggagcttgtcttctgccccatctgtcactgatgagctctacacggctccctccctgttccccagctctcacaccctccaccagtccacacatgcatctttctaccctggccctcaggagcaaaaccaaagaattcccccacccagattctcagtaccccaacatcatttagcccttgcctctccctccactgcttctagccaatggtgacatcaggctagagggctctttgctgagggcttatccagcccctgctgagagcttattacttgcgaggactgtccttcatgctccaggcaccatcattagtagagacatcttccttcgaagtgtgtgaagtgtgtacgtgtgtgtgtgtgagcatgtctgtgaatacatgaggctgtgcctgagtacatgccaatcagtcaatgctttcattatttccggagaagaccaagccactgtggcccatctacaccatgagtagtcccatctctggcctctcctgtacaggctatttctggaagtgcatccaagccagtagagttgggctggcccaggacagccagccactgaccacaccaggatacccaccatcagctccacattggctcacagtgaccacatccaaggtccttcacttggataattgttctaagcccttacttgccatgtcggcctctttgtcctagccctgttagactctttgtgtcatgagtccacttaactttggggatccccaccctggataaaaggccactctccactatccacagtcctgaaaactgttctctatcacccataagaggtggaagaagaggaaaagtatcactgggaagacccaggctgccacctgcaccagcaccagcaccaaataaaaaagccaaacctcagtctgagttgttcaactcctctgtctctcatttatctttccgctggcctctggcattttccaatttccaccctccttgcagctccattttctgtttgtggccttgtctcactcctggatctggaggacactcaggctgtaacctctgcctcctgcctcaaccacaattcacacttgtccctgtggtcgggctgatttcactgctctgagaaaacacattgtcctttatagcctccatgcagccccctgatccaagcagtaggacccagttgttaccaggtacccctgctctactcaaagagactccattagaggcaatttctgtttggaaacctctctgcacctactccctagcatgccctataaacaccagccaatggtagcatcagcagagagagactaggagggaggatatctgtgctagttaacagttgctgggagctcagggaccctgtagctgttgctgtctttggtggcaccatagcaggaagattggaagacagggagcctgaggcttaccttgcgcatgtctttgccaaaagtctcactataggtagtgccaaggatttcaaactggacatagggattcgaactgtcctcccgaaactccatcaccccagtgaggccagtgatgtggccctgcagaagaggagaaaaacccattggaaaatctggttaaggtagaggatggagtcccaaaggctaagaggagcaaggaagtggtcaccaagaacggagcaatcagttttgagaccatggacaggctgtaatgaggacaagatgggctagtggtcctaggccctcagagcaggatcagtactttctaggatatttgcttatgggagaaatccctaaggcttgcacctgtcattcataccatctatatgcttagagtccctgctatgtgccaggcaccatgctagccatgagattaaacattggtagcttttgttcctgccctcttgaagcttagtcctccccttgcaatcagttccaggggctcaccttagcctaacccaagagaaaattcaaaggtcaacaggagacatatcagacacatgatggtaagttgcagggcagcaaacatgtgcattggagggcacagcaagatccctagcttggatcctggctttgccacctgtgccaccttgggcacattgcccatctcccagctttggcctgaagttaattaactccacatcatagaacccacaaagactaaaggagaaaatatgtacaaagcacagcatccagcatagactggctgtggtctccatgcctctctctactggctcagtgggcttcataggagaaggaggcagcaggaggctgagggagccgtggtgagcccctttctctctccaagcccagggtgagattctcatcaagatttatctctcatagtccctgtgaccctacagagtcccagaaacacctggcccagaaggggccctggctctgccctgggctgtagtagattctcacctacactaaagcatgttccctgctactgaaaccacatgcaattcattgtgactaaattcctaacgctatggatttccctaaatgctcttttgaagcctctaaaagtgaattcactctaacaaatcatccatagattactcaattcacttcaaatccagctttctaattcagtatccctcctcagcacatgagatacatcacaagcgcacatacaggtgcactcgtttcttggggagtggtgttctgcatagaggggtaccttgcagacacgggataggcagctgcctccatttcatacctacttgcagccaagggcaagttgcttaacctctcagaagttcttatattaaattgaagacagtaatgatagtatgtattcatggaccacagctcacctggcctgcagatgctgggacaggaagagtgacaaggagagaggaatggggaggggcctactggggcagccacacagagcctagcttcaggccagctactagaggggaacacagtggaggtataagaaggggcctgtctttggccaggttgggggtgccccctcacacgtacctttttgatggtatccagcatggacctcccaccattccatggcttagtggatttccgtatgcagttgaggctcgccatgctatgccacttccggtcctccagcttcctgtgaaaggcgttggccagcatcagaacactgtcatacagatagaggttggagatctgcaaagacagaggcagtgaaaccctttccacaggtgcatttctagagagctttggagaaacccacagaaaggaggaggaatgcaggatgccaacattaagctgtggtgcccagtatctatgccaagatcctcggcttttaggtgtactttcaaaaacccagccagcttctagagtcctgaatggaataagaccttgccctgcctcaggaactagagtgggatgtgcatgtgtacatcaacaaggagaacccttatctgtagctgattgagatgtgcacacaggtaagttacctactcaggtaagggaggatggagggaaggataagcagaaagctcagcgttgaaggattagtaggataaagggagggcacagcatttgcaagggcatgaaggtgtcaagagacagggccaggtacagcacagtccaccagagttttttgtaaaggaccagctcataaagattttgggcttagtagtctcttttgcaactgctcaaccctactgttataacttgaaagcagccatagacaatatataaacatatgggtgctgccatgtgcaataaaacattattttccaaaagaggcaatatactggatttgctctattggccaccgctggcggatccttgggttaaaggaactgaaagcagttcaagacgactgtgtcaatgggtacaatacagagggagcaggatcaagagagaagcagggattgagccctgcaaagacttagggacttactaaggaggactagcaacagaggtgactgtagggagaaggacgcctttgttgggtcagtgtacaggaagctggagatcagatctgggcctcagaaagaccactctggtcgccggacacgcctagggtgaatggtggcctgagtgacgaggtaacagtgaggacggtggtaacaagagatgaggattctggtgcctgctctgcagtggagtcactgccacccagggaacacatttgggatttgcaactgtgcccatctgaggaccacccttctgcttagttgtctgatgtgagctcagtggtagaggagacacatccctgtctcagtgctctggagggcaaggccatgactgagaatctagggtagaagtgtgaagaacgacactacagcattggggcccaacccatgtgtggggtccagggtgggcaggccaggctcagcctcctgagtgtggctatagaccccgatctggatgtggaggagctagaaaatggcacccaccctcccaggggcccagcgggagcccaatgggggagaaggacagctctgttctcggatgtcaccttcacaccaccccagccctccatggggacattggagcacaaaggagaagaggaggagaagggaaggcggtgagggcgaggtagcgtccaccctcagtcaggtttgtggccccccactgataactgttgcacaaacaaccctcagccaaagtgggtcaaggggaccattctctgaacgcctaagcagcaagtcgtctgctaaaaatattttagaaaaacaaaatcaccagataaaaataggagatcatgtcagcctcacaggactcctgggaagatcaaataggctccttgggctgcaaaaagaacccctcctcccccagcctcacccctactctcctcaatatgtccctgtaccacaacacctctgtgccttgttctctgcctgcaatttacttcctcatgtttcttagtccaggtgctccaaaagcagaaccttagatcagaagttaggtggcgcgaactctccagcaactgaagctgaagtctgagatgagccaataggaggtgcaaggcatcacaaacatctgccccgtcatgcctgtccagccctcaagggccattcccagcatgtcacatccaggcagagctgactgcctcccctgtaggtatccttgtgcacagaccattgctgaagagctctgtcctgtctgccactgtcctgtcccccagctctgaccattgtgggctgtatgcctagggcctctgcattctgtaggtgtaacaggtaggtggaggatggccagatgttgcagaggtgtcaagagtgtgctaaagcaagagccttgagctgagggggagtagaaggtcagtgcctggtctgaccttcttcaggggcctgcagcacacaagagcttacttgacagcagagggaaaactaagtaccaccacccactgggagctcaccccctcactgcacagggaacaccatgacagaactgtgccctcagccacttgaggcctagaggagcatttcctcaatgagcaggactaattcactctttgttgctgtcaactccccagccctcaggagcccccaccactgcatgtgttgataagtcttcctcccctctggaaaacaaacccatgatggagatgttgttataaggaatacaagccatttagaattggtttgttgtttttttctttcttttcccaagagaataacttgaagctgagaatccttaacgatgggaagatttctcttctcaagacattcatgggtctaccagccaccaactgatagctgatgctatttaaccagccaggtctctttgacccctactcccacccatccacacactcacacatcagggcagagtccacagcaccagcgcatctgtggctctgaccagaacccagtggaatctccctttcacttcagcacttctattcacaatcaattaaggtactcaacaaatgtatgaatgcagagaggtcttgaacaaagaggaaaaagcaggacatgactcagaaaggccaaaggaagccctcagtcttcccacaagtatgtctgcttggaagggtgaatacatcccagttcatgggaacaggcttgagcaatgctcttttccaggcatagataggcaggccttcccaatgcccacatatcaccctagatgtacccctcttccattatatatgttgccagctcatgaatgtgtttatctcagcaaactttgagctctttaagtactatctctagaactcagcaccaatcaaagcacatagctggtgcttaatgtatgtttcatggccgaacacatggtagacacatgtatgcacaaatggaaggatagatgagtgtgtagatgtataggtaaatggatggatggatgaagtaatggatggagggatggatggatggatggatgggtggatggagtgatgaagtgatggatggatggatggatggatggacggatggatggatggatggatgcatggagtgattgatggatggatggattttctcagaaggcatacactaaccatgttttacaaaaaagagaaattatagaaaatggatagcagataaaagagattttatccctccaactttgactttggacagagcctcctttgttcaaacagcaatttgttcttgtctaaaacctcctcaaaacatcttcttgatcttcccatggagctgtttccatctactccacttactcctaactcttccctggtaagatattgtctctccctgccttgggcataatctaacactgcagtaataatctgtggctcccccatcttctctccaacctcagcatcctcactgagacgacctactttgtgcaaactgactttagctgacagttcactggtggggatgcggagggtaggaaaggccctaacctcacaacctattcagagaagggattcttggatgaaaaaaatcacaagtagatggtagaaaggcagtttatgcttggggccctctccagagcctgataaacataaaagaagcctttcctcagggaagatggctggatatcagtgtcagggttggtcatgccaagcccctgagaaggaagtctggaaggagagaggctcccagatgcatggatgctcactcgtcattgaccaccaggggccaacagcccaggctggagtcacaggccacaggtgcagagaatgaggcccggcttggagaagtccttgcctccctccctcatattgtaggttatgcacagtacagagtccattagcaaaggtaaggcaagcaagcagatgctgtcactatttaaacactcatccccatgcaagcaggagcccagggctctgggtgacctaggaacactgcagcataaaattccaggaaccaaaaaagcattccaggtaagagtaaatttgagaagcaaaagagaggtcagagtgtcaaggccatgggcatggcagaggagagacctggctgcaaagcaaaatacctggagccaggtcagagatgctagagggagtgaagtcaaggccagacagaagccaggaaaagggcttgaggccttcctggcagctcatgggctctattgtaagtgaggagagagctggaagagggactggatggtttcatttagccactccagagattttcggcaagtttctctcactaattaccatacagtacgactctcacactagggttgcagcttaggcaagtggtctaataggaacagcaacagctttggattcattccagcctggaccagctttgctcactgctggaccccaggtctccacagtagtgcgtggatacagcaagcactcaataaatgttgatggaacgagtgaagtagatctccactagcatccatttgctgagtgatgttgaacaagctgttgaacactctgagacttatcttgataacaataaaatacagtgtgatctgggcccctggagaggtacaatgtggcagccctgatttacccacctgtggaatgcagatggtaatacccctgtgtgccaagtactattctaagatctttgcatgcatcttcatctttagagggagcagagacagaaatgaatagaagaggcaaataaaatatctatgcagcttccagatttcaatatgtatgagctgagagctcctccagggatgtccccagaagctggggtcagcaccagtctggatgcagaacatgaggactactgtgaaaatgcatttgtatcctccaacaccactcgttctctcccacaaagccccttgggtccctaaagccttccaaaggcacaaagggatcatgtctgactcctatagcttgagggtcagagatcaagcaagaatcagcactgaatattaattcccagtcccacctgaaatctgctcacctgagcacccgtgtacatgtccctggcctcctccaggccccagcagcacagccacagctgccacagcccccagggtctgagccacacctttcagggctacatgatctgaggtgttgcagggctgccctttaagggaaaggccacttctctgcccctaggatgtttcataaaaggtacaaacacaggaaggctcagagagtgtgtgttgtgtggtggagggtggagggggaagctttataataccctgactctggttcctgagagggagacagtgtggcctgctgcagtcaaaggccagacattcacatagcaaggctggctcagccacgggagcctttggcacagtggattctgcaatgagatcagcgaggtgtgcaggggaggtggggaaggcaggcagggtatggctggaacaaaggccagctgcagtccagcatccatggaaggcatgtgctctgcactccaccctctgaccagctcaggggtttcagtcctggagaagcttccagatgaggactcaattgagtgaggactcaatggtcacctcccattttgggggtggagttcaggtgcccttatttttacctagggagatggtaaccactggttaacctgtctccagcctcagatcctccctttccacactgcacagagttgcctttctcagatacacgtcttccacatcacatcaccaagggcagagccccagttgctgttgtcccctccaagttacttcccaacttcttgcctctcaccccttgccccaggcacagtgaactcttcccctgctctctcaggcctctgagcctgtgcacatgccagtttccctaatcaggacctgctacaacatggaaattaaaattcctaattttgagaggtttataagaattaggaaggaacatttatgaaaggtctaacataagaagaaatgcataacaaatgcataaatgggtatttatgcaattactgaaagttgaataacagttttaaacatgttcttagaaacataaagttaaagagatgtcaaggcatttgcaaaaaagatgcctcttcttagaagacaagtggtggtggatagaggctgctggggaaagagatgggagctctgtgtgaataaatgtagaattggccatctcccaccagaatcccaggctatgcatttccctgagatagcaggatcctggcaaggtataaatttccaacatcagttgcccatgcaggaggtgggtcctcagaaagataatgggaaaggtaggaggcgtctctgggaagcaggagagaactcagccgtgagctcttgttgggggcttgcagctcttgagagacccagatggacactctcggctgctggataattagagatgagtcacaagaagttgactgaggaccagggatggaaaaatagattttttaaaaagttattaccagaatttctattacatcagtgactatattttatttaggaaaataccttgtggcagcaggagcaaaggccaccagtgagactttaaattgatcttcatgagaaaataaggaaccaagacccagagggaggaaatggagggagggcagggaagcaagcaagatgaggagataatggagcactgggggcagggaagcagtgctcagaaacactgcacattccccagcggggaggggcttcaaaggctgaatcctgcttgagcagctacaatgcaaatgccccacccaactccccatcgcgtacaacaccggctctgggctctgaggctcctgaggagacgcgaaggctgccttagtccactcaggtcactgtaacaaaaaaacacagactgggtggcttataagcaacaaaaatttaacttctcaccgttctgaagcctggcaagtacaagatcaaggtgcctacagattctgtgtctggtgaggacgtgctttttggctcataagtggtgctttctcatcttgccctggcagagtggaagaggagaagtctggtctcttcagctccttatatgggcacgaatcccatttatgagggctccccccctcatcacctcccaaaggtcccacctcctaatactgtcaccttggggattaggtttcgacatggaaattttggagggatacaaacatccagaccatagtggatgtcttgtgcagaagggaatttgttgtcttgttgaaaccaggaaggcactgactttccacctgggcaagcactgggcagggtagaggcaggcacattggaagcccaggtgttctggtcagttattgagtccctgggagcaggatcaggaccagagataataagcatataaaccccccatgaagtgtgttgagctcctcaggagtgctgcaggctgccaggtcgatccagctaagacctctgcccctatcagtgggggagaggcccctggaggacaggagggtgtgcctgccgggtggccaggctatctgccttcctggcagcagcacatgccttctctgtagtaagtctgagacttcagtcacgttttattagggtattccagcctagtatttgttatgctctggggcccagggaattgttgtgcatccgcattatcaaggtaaaaatcattcttggaggagaaggaagatgaatcacaggccagggtcagaaccagaccattatcctcccaacaccaaagctggaagtgtggaaaatgttttcattaagaaaggctgcatttcctccaggcttctgaagaacccagctttctcttccctctgtcattaatcaagcaaagtggacagttcagtgagacatcacagaggcaaacagtaggaactgacctctgaccaaatcctcagacaggttgtggttggccggcaaagttagacaagcagctgacagagggatcagcggggaggacaagttgacacccagatgtcacagcttgagaaatccatgccaggtgtagtctctgccaaactgctgccagtccagctgtcctgggagagggcaccacagccaagcctcaggaggaagcagatggtaagagagggcacagtggatgcagggagctccactcactgctgaatctgaggcgacggtgtgaaagtgaagagggctatctgtccacacccaaggcttcctgggctccaaatgcacacatggctgcctgcagccagaatagcagccagttgcagccaaggagaacacttgcgcaattgtctccgacaaagccttccccactctccatgttaaatgctcccatatgggtttttagggctaagtaaaccattgaaagtgacatgaaatccaaggtagctggtatggggaggctcagtgaagctccagaggacaagcttctaccaacaggttgacaaaaaccttttagccatggaagagtacagaaaaccctaaaaaatagggatgttagagggagaggggttgaaatcctctaatagagtgtgtgcagcacagaggaggaatgattcaatcaagccattcgacaattttaaaatgcacaaagaagagaaatttcaacctgagggagcattttatggtaataccacattagcccccaaagcttaattcagggatccggctccacagtgaccacacaacacagtttacatcatttgcctgtcaccccttagaaacacatttgaatataaatggggggatggctatgtgacaatacgcctcttacttcaattgcagccctgatgtcacagggcagtacagttccagagacagagtacgttacagattctcctctgagcaaagatgtctgtgaaatcttagcaaagtctcagggttctgagggactggttatcacttttattactggctgagtcagacaagtcctaaactaacttgtcaaggaaacaagaatcaaaaacacacaaataagacagtgctttgtggggaaaaataaacaacagtgctgcatgctggcaaatgcaaagcttttggagcactaggggtcacatatttaggtatttttcttcccagggactttccttctgctaaataggaaccaaactgatttgctataatagttcttggttggctttagagcacagaaagccctgaccacaagcctcatagaggatgacagagtttctgaggccagctcaatagagaagctaagggatggatactcttgcaaaaattccctgttcttcttggtcctcccagaaacttctaaaccagaatgatcttcccaagagcagccatttggtgggggggaagaaagatggactggagagctccatttccaaaaggatcttcactaatttcatcaagacaaagttaataatccatgacataattttttttttccttgagttgttctaaacatgttagagtcttctcgataaatctcacagctagaggctagtagaaattagtttgccttccacactgtcattaagaaagaaagaagtggtaatagctatggaggaaactggaagggaatggcttgtaaatgagatgaatctaccagctgcccaagtagttgttgggcaggatgaatacataaatccacattttcctctcatgataccgccttgcaaggaagcagatgcaacaaatggagacagagattcctttaataaagtgttttacatatatacatatatatatatatatatatatatatatatacacatatatatggagagagagagagagagagagagagagagagagagagagagaggcatctagggtcagtttaacttgtactgagacctgcattcttaatagattcatcctttaattccttatcaagggtcttcaatgagcagggtcttgtggccttgtataaagaactacatgagcctaaaatacaaagcctctcatctcccaagcaaggaagctatgattgagtacccatgggagagatgtggacagtaagtggtacacaaagcctgtgataaggggctggaaagatagaaactgccctcccacctgcagtgatgcctttaaaaagcatgcttggagataggtagactaaatcacaccaaaaaaaaaaaaaaaaaaaaggctatgttcaccctttccatggaaaccctgaatgtacctgtccacctccacagtaatgatgataataggttaagtatcccatatctgaaatgcttaggacaagaagtgtttttatttgggatttttttttttcagattttgaaatatttgcattatattccaattccagttgagcatccttaatccaaaaatgcaaaatctgaaataccccaatgggcactttttttagtgtcattttggcactcaaaaatttcagatttcagagtacttcagatttcggattttcatattagagatactcaactgtactgctaatagccagctctgaactgaatgctttccgtatgttctccgatttaattttaattatgactctgggggataatattctaacccccaatttagagaggagggaactgaggcgcagaatgataaacaaataataataatgaaataattggctagtaactagagttatcaggatttgaacccaggtgacttgattcctcttttactgttgctgctattactacaagattcctgtagtgttgcacttcagcgttgctctttatgcaatgcctgggtctcagcaggaacagagggaggcatagtgtcccagggttcctggatctgacactgcatttacctcatttgatgatgtccggccacatatctgggagctgtgcctttgtttctcctctccatgggcacgtgtcatttaagtaggccctcagctagattcccctttgaacccctcagtctctctttctctctcctccagtgaaaagactttttgcatccaatgtgtctgatatgcaaccaaagggcccacctgcgcctttcacccacagcaaaagggggcatcacaggcctcaacaagaagcactttcttctttcccctgctctaacctttgcagacacttctgtgccatggaaagtggccccatctttgttcttcaaggagactgagtgcagtttaactaagacctagagaatgatttagggcatatgaggcaagggtgccatgtatttggggagggaggaagcccttcaaaggagagagaagctagaaagaccctgcagggagtgagaccctcacaggctctggccccacagagagcaaagggattcccctctcccgctgcactgggtgggaatgggcacacactccctgagccccattgtttaaggccatttccacccacatggaggctgggaatcatgactacagaggcacagtgagaggaacttacttggccttcgccatttcttccagactccacatacaggaaggcagaataaaccagcagcatctcaacgtaaactcttgcctttcactctgactcgggtgtccagggctcttgagtccatgagtgatgcgggggccttgggtccactctcttggccacccctccaccgccttagaaagaccccagacactctggtgggctccctggagcacagacactagtggaatggggattattccagctaaaatcaatgtctgctgtgtttccacctcaaccaagaaaacatttctcatgtttaccatccgttgaggcatgtttcctttttctctccacatatgagattatagagtagattcattcctttggcaaatttgacacatgtccacaccctactcaagattccacaaattcccttccacaaaatgtgcagcccctgatacagtgagagcaaaatgttatggggtggggctgatactcaggtggcagatacagccgtctctgttctgcaaccccaatttctaaccctcatgcctggctgggtaaagatggtggaactagtttcaaatgctgaatggcaagcatatcacatgtacaaacttctgtgcaatttccacaaacccaagtggaagaaatttccttctgtcctggtgctctcactaagcatcagtgaaagttttctgaggcaccacattcctaacctagaagtggatttgaggctgccagtgggtactctccacactacttccctgttgctcccaaacacccagagagaaaccacctcttacactaggcacatagctctccatcgtattccaaggcccaagacaagctagtgccgactgcacatacttagggttgaaggactgaccagaaacacttggtacctctgggccttggaaggaaccatgcgggtggggttccatgttatggtcctgctgtcctgcccctccctgctcagctgagcatccaacagtgtcctgggtgacccaagcctcagcactcagccaatgtgctgggatagtcccatcttgctttgcaagggtcgtgtctatattaacaagaacctaaaacaggttcaaaatgatcacttcccaaagaagactccacccccagccctgccagatgaacacattcccacaaagaagtcatcacagagacataagagacaggaatctctttaccctctatgcatgtgacttttaaataccagagacacccggtgagccaataagccctgtctgctgacaacaggcataattgcctgctcgtgctgttcagagacactgcccagtcaaccggtttcaatttcaacaaatgacagagctctagtaattgaagttggtggcaataggaggcccccacatgtctcccttggccaagggtgtgggtgagactcttggtggaggggactggagagaagaggctgagcactgacctgcagcatctggaggtagccttcctgggggtcgcagagcagggaggagatgcggtggttgttcctcgtgcatttctgattgtcctttgcagacggaaagatttgccggaccacggtcatccttccaagggcactatggaccagatccaggatctccgggtcactgatttcctagaaaaataaccaggcccatgcttaccatccactcatgaactatctctgcaagagacctatcaggaggcatctaggccagcagcctgaaaagctgatgccaaagagggcaagggattgggcccaggtcacacagttcattagttgcttattcacaaataatacttgctatcccttagaggcaaacaagattagtcaacattttccctgaaggctagaaaaagacgtttgagactaaaccactggtgcactggtttccacaggtgtgaagcttttaggaactaatgccataaaaggtcatggtagacattagcaagacagaaaggctaactttccttttgggagtcacctacctgattctgacaaggaaagctgggtttctctgccatagttgatcaatatacaatgagtttccatgaattcttccagaattacattcattttacaaaatatttgcacacgaattttgagaatatatccattcatttattcactattcattccacaaaatctacctatatctctgaagtttgttctgtactaagcactgtggatacagccagaaaaaaatcaggccctatcctgtcccataaatctcatgggcatcctaggatggattatgccaagttccagggctaaggaaacctatgtgctgtctatattgactacaaaaagccctttgctcacattagcttatttagtgctcacaacatcccatcctggtatgatccactgtggagcatagaaatagcagggggaggagaccacaggagctctttccagaacagggcttccatgaggaatctgacaaggggtggacttgtgatggttaatattgagtatcaacttgattggattgaaggatgcaaagtattgttcctgggtgtgtctgtgagggtgttgccaaaggattttaacatttgagtcagtggtctgggagaggcagacccgccctcaatctcagtgggcaacatctaatcagctgccagcataggtagaataaagcaggcagaagaagctggaaagagcagacttgctgagtcttccaacctccatctttctcccgtgctggatgcttcctgcctgtgaacatcagactccaagttcttcagcttttggactcttgtacttacaccagcgattttccagccgctctcaggccttcggccacaggctgaaggctgcactgtggcttccctacttttgaggttttgggactcagactggctcctcagtttgcagacagcctattgtggaacttcaccttgtgatcgtgtgagccaatactccttaataaactccctttcatatatacttctatcctattagtcctatccctctagagaaccctgactaatacagattttgtttctggctaacaagttctggaggagaaacttgctagccaaagtgccgctggtaggcagggcacagttgcagttgaggagttggtggtgctgtggaaggaaggtggagggagctgccaatagctccctgttccaggtagagggtagaggcagcagggagtgtgaaatgctaaagccttagatgacctggggagggacagagcaactggtcccctgcagggaatgcttgtggggcagaaggaacagtggtcagtggcagggctagagccccattcagggccagatgggagaacagagggtcagtacaccccacaaaatgctaatattaagggagacaaggagctcttgaaaggatctgggctcaaacaagccatagatttacatttttgaaaatctctgactgcggtagggcgagaggattagagaggaacaaaactggaggaggagagagcagagaagagagcacccttctctgtagctgtgtgcaacatgggaactacaacaaaaatggaaactaacacatacagacgcccctcaacttaagatgggcttacatcctgacaaacccatcatacgttgaaaatatcataaataaaaaatgcatttaatcctcctagccgacgaacatcgcagcttagccttgctcagaatgctcacgttagcctacagttgggcaaactcacccaacagaaagcctattttataataaagtgttgaatatctcacagaatttcttgaatgctgtactgacagtgaaaaacagaatggttttatgggtactaaactgggtattctactgaatgtgtatcattttcatgccattgtaaagtcaaaaaattgtaagtcaaaccattctaagtcaggataagtcagcctgtataagccaacaatttcagtgatggaagagagggctagccaggttaagaaaagctctggttcactctttctaagaagggactaagtcagcggtaaattacaagacaaaattttaactacaaatagctacattttgaaataagtcttaaatctttctccttgcatgtgacacattctagctttgagacaatatgatggtaaaaaggaagctaatgaggttgggaattagtgatgagggtttcaaaatcatttaaacaagaacataacatttttaagggtaagatggtaaacaatgtatttcagaaactgtcttaagaagctgatatgtgtgtgaagcctggtcagttgaaactgggtgctgggtctgggagaaagtaaaatattaaggattgtatccttttaggataattaatatttcctaaatatactgaattacagggatttcaaaagaactcaaatgctattacatattggatttgggtttaaactactaaactgtatttcagacaaaagtctgttcaagggaagatgattttattagattggaaccgacagacagtcaaaggtggggaaattgacaatgtccatatctcaggactaccagatggaatgggcctagaacacagctgggcttcagggaggggagcagagggcacagctgagcctggatgtgcatgctcagctctgctcttagctgccttggtgaccaaggccctgccccgaacacaggatacagaataagagaaatcacattctaatctgagacaaagtaagaatataagaaaaagcaatgagtaggttagttagttttacctgaaagacagaatataaaggacctggggaggtcatgaagaccctaatttaaattatgcacaaaagagagaatcagagccagtacacctccaagaggaattggatgtgtctcatgcctttcgtttttcccatattctcttgatggctgagggcactgtaggaataacaggccattttcctagaagtcctttgattaaacttctcctgcttcctcaactttctggagggagaatctgcagcactgagctctccccactacaccccaagcaggaccctggaaatctgtagtggagttgacttacaaagttgcacagtacgtttctgtaaacacaaccatcactttccctggcaacctggggcagcacctggagtgagtggctaagtgggccaagggcagccaccacatcaagtgggctcagcccctgcccccaactcccttagtctgcactgtttcttttccattctacccacctgggaattcttgaaggctccctttccaacccattagctgccatatgtcttcctcacagtgagggtctgcaggtaccttgcagaacttcctgtttcccctaatccagttttcatccatgtgctctgggtcagagcatgtatgctggctgccaatgtactcctacccacctccttgcacttgtgggattattcttactgtacaatccagagatatttgcaatcagaatctaacaagccacagaagcagcttccccacttccttggggtcaattaaaaaggtcacttttctccttgcgtaagtcccaaacctgtgtgatcagtcagttctagaagtttcatgccaggccctgctcttgtcctgttggtcctcctgggtctcttgtagtgccacaggggtgagtatagggatgcatccactccctgctcactgatgtcaggctgcacacaccaggctgcatttcctggctgcacacatcaggtcagtctctgtactactatgagacaccccgacctcgggaccttcttaagtgtgcagagggcaatccaagtggcttcttggaaaacaaactttccctttgtcctgggcaaagattccctccagtagtgcagccaatgagcagaagaagcaagataatgtatatacaacactattagaagtcagcaagtcagcagcacagacaaaagtaacacatcatacacagatgctcactgagtgcacgggctcaaaataagccttttgtattttattactttttaagtttatattgtgaaatatatcttatgtacaaacattacatacattaaatatgaataataaaatgatttcagtgcgcctttcatcaagctaagaaataaaatattacccacatcttggttggatgcctccttctcaaaagcttactccttcctcctcacagaagcagccttcatcatgctctgattagtgtagcgtaacccaaataacatacagtttagtctcatttattctgtttagctttgggtaagctaaacaatgtgtatgcctcttgcaactgtgttctaacacgctgtttctcaaacttcgttgtgtatcagtaccacttgggaacttaataaaattacaaaactccagtcctgtcccacttcaacaagcaacgtctctgggtaccccattagctttccagataattccaatactcaccaccatttaataaccactggttgaacattaagcattagtgattgattcatggctgataggtgcagctcagctctagtttattcattttcaaagctgtgcacaatcacattgtatgactatattacaatttattcaccctattgttgattaccatttgactgttttgtttgtttgcccttacaaagtttccatgtacattgtcttgtgcatgtgtcttggtgtgcttgagtaagaatttctttaggatatatatctagaattaaagttccttgattagaaaataggaacatattcaaatttactaggtaacagcaaatatgtaaagtgtaaaataaatttatatatttgggttgatttctgtcatattatttatattctatattttgctattttttcatttttcctttttataaagtggttttacaaagttataatcatatgtggtaagggagtttctgttgctctacctccttgcctacacctgatattgtatgacttcctaatatttgacagtctggtaagtatgcattggagcattgttaaattttattttcacttccctaattcttaataaggttgaatatcttttatacacttatgaatcatttgtattgcctttcctgcatttgtgcttttgtccaatttccactgagttggttctcttgcatgttaatttgtgggaatatatttttttattctagatacaaagcctttgtcacctgctacgggtatcttctccacgttcaggaatgtttgttagaaccaggctacaaacccatctaactttggttctttgtggaaaggctggctttgtagcttaccgtgtggtcagtttgtactacatgaacgtttcatgtgcattcactgttcatttgttggtgtcaatggtcatttttaggtccattaaaaatctgtgtatttctctttgaatattggctatttttaatatattttggggttatgttattttattttatgtatttatttatttattttgagacagagtctcgttctgtctcctgggctggagtgcagtggcacaatctcggctcactgcaacctccacctcccgggttcaagcaattctcctgtctcagcctcctgagtagctgggactacagtcgcatgccactacgcctggctatttttatttttattttgtttgtatttttagtagagacggggtttcaccatgttggtcaggctggtcttgaactcgacctcaggtgatccactcgcctcggcctcccaaagtgctgggattacaggtgtcagctatcgtgcctggccagggggtttttttattcgttacacacagtatagaaagacagcccttgctgaattaaatgttaccatcatatagataccctatttatttctagtaacacatcttgccttatggtctattgtgtctgatattaatatagctacatgagttttatttggttagcatctgcctgctctaacgttttccatctctttgccatcagtctttctctgtctcacattttagttggaatgcctgtaaacctaatatactagatattttacatccatatttgaatttttagtagaaatttcaatccatttatattcattatgattatttatatatttggattgatttctataacattatttatattatacattttggagttttctctttattccttgtttgtttccctttaaaatgatttgtttcctatctttacttatttacctacccttggcagttatgttttctatgttatcttttattggttatgctagatattttaatatgcatatctaataaagtgtgaagttaatcagtatttttactctcttctttaatgtttacttccaatcaccattatcccaactaacacgctaaaaacctccagtattttaattcaatctttctttgtattttcccattacacattatttctattgtttgatacagccaatatttatctatgtaaccaatattcattagtttattggtaaggcttcttttagagacctcagaccttatatctggggtcatcttccttctcctgaagtatatgattgagaatttcctttaatttgggtttgttggtgataaactcagtttttgtttgctgggaaatgcctttatttttatctcactcttgaaagatataattctaagtcgactactattttctcttagacatggaaagtaatatggcactgacttctagcttccactgctgtccagtgtgtaagtttcccacagctgcattaacaaattatcataaacttagtgcttcagaataacagagttttattctatcatatttctggagaccataagaccaaaatccatttcactgggctgaaatctcggtggtggccaggatgccctcctttggagaccctgggggagacatgtttctcacttcttccagcttctggtggccgtcagcattccctggcttgtagctgcatcattccaagctctgcctctgtggttgcatcacctcttcttctttcatacagtcaaacctccctttgtgttcctcttataaagatgctgggattgcatttaacacctatccagataacccaagataatcgccccatctcaagatcattaacttcatcatatctgcaaaatgtcctttgccatataaggtaatactaacaggttctaggattaggccttggatatctttggagtccattattcagcccactgcatccagatattaagaatcattttggggtggagccaagatggctgaataggaacagctccggtctacagctcccagcgtgagtgacacagaagacaggtgatttctgcatttccatctggggtaccgggttcatctcactagggagtgccagacagtgggtgcaggacagtggatgcagcgcaccgtgtgccagccgaaggagggcgaggcattgcctcactcggaagtgcaaggggtcagggagttccctttcctagtcaaagaaaggggtgacagatggcacctggaaaatcgggtcacacccaccccaatactgcgcttttccaatgggcttaaaaaattgcacaccaggagattatatcctgcacctggctcggagggtcctacgcccacggagtctcgctgattgctagcacagcagtctgagatcaaactgcaaggcggcagtaaggctgggggaggggcgcctgccattgcccaggcttgcttaggtaaacaaagcagcagggaagctccaactgggtggagcccaccacagctcagggaggcctgcctgcctctgtaggctccacctctgggggcagggcacagacaaacaaaaacacagcagtaacctctgcaaacttaaatgtccctgtttgacagctttgaagagagcagtggttctcccagcacacagctggagatctgagaacgggcagactgcctcctcaagtgggtccctgacccccgagcagcctaactgggaggcaccccccagtaggggcagactgacacctcacagggctgggtactcctctgagacaaaacttccagaggaacaatcaggcagcagcatttgcgggtcaccaaaatccactgttctacagccaccgctgttctgcagccaccgctgctgacacccaggcaaacagggtctggagtggacctctagcaaactccaacagacctccagctgagtgtcctgtctgttagaaggaaaactaacaaaaagaaaaggacatccacaccaaaaacccatctgtacgtcaccatcatcaaagaccaaaagtagataaaaccacaaagatggggaaaaaacagagcagaaaaactggaaactctaaaaagcagagcacctctcctcctccaaaggaacgcagctcctcaccagcaacggaacaaagctgaacggagaatgaccttgacgagttgagagaagaaggcttcagacgatgaaaatactccgagctataggaggaaattcaaaccaatggcaaagaagttagaaacttcaaaaaaaattagacaaatggataactagaataaccaatgcacagaagtccttaaaggagctgatggagctgaaagccaaggcttgagaactacgtgaagaatgcagaagcctcaggagccgatgcaatcgactggaagaaagggtatcagtgatggaagacgaaatgaatgaaatgaagcgagaagaggagtttagagaaaaacgaataaaaagaaaggaacaaaacctccaagaaatatgggactatgtgaaaagaccaaatctacgtctgattggtgtacctgaaagtgacggggagaatggaaccaagttggaaaacaccctgcagggtattatccaggagaacttccccaatatagcaaggcaggccaacattcagattcaggaaatacagagaacgccacaaagatactcctcaagaagagcaactccaagacacataattgtcagattcaccaaagttgaaatgaaggaaaaaatgttaagggcagccagagagaaaggtcgggttacccacaaagggaagcccatcagactaacagcagatctctcagcagaaactctacaagccagaagagagtgggggccaatattcaacattcttaaagaaaagaattttcaatccagaatttcatatccagccaaactaagattcataagtgaaggagaaataaaatactttacagacaagcaaatgctgagagattttgtcaccaccaggcctgccctaaaagagctcctgaaggaagcactgaacatggaaaggaacaaccggtaccagccactgcaaaatcatgccaaaatgtaaagaccatcaaggctaggaataaactgcatcaactaacgagcaaaataaccagctaacatcataatgacaggatcaaattcacacataacaatattaactttaaatgtaaatggactaaatgctccaattaaaagacacagactggcaaattggataaagagtcaagacccatcagtgtgctgtattcaggaaacccatctcacgtgcagagacacaaataggctcaaaataaagggatggaggaagatctaccaagcaaatggaaaacaaaaaaaggcaggggttgcaatcctagtctctgataaaacagactttaaaccaacaaagatcaaaagagacaaagaaggccattacatgatggtaaagggatcaattcaacaagaagagctaactatcctaaatatatatgcacccaatacaggagcatccagattcataaagcaagtcctgagtgacctacaaagaggcttagactcccacacaataataatgggagactttaacaccccactgtcaacattagacagatcaacgagacagaaagtcaacaaggatacccaggaattgaactcagctctgcaccaagtggacctaatagacatctacagaactctccaccccaaatcaacagaatatacattcttttcagcaccacaccacacctattccaaaactgaccacatagttggaagtaaagcactcctcaacaaatgtaaaagaacagaaattgtaacaaactgtctctcagaccacagtgtaatcaaactagaactcaggattaagaaactcactcaaaaccactgaactacatggaaactgaacaacctgctcctgaatgactactggggacataatgaaaggaaggcagaaataaagatgttctttgaaaccaacgagaacaaagacaaaacatacgagaatctctgggacacattcaaagcagtgtgtagagggaaatttatagcactaaatgcccacaagagaaagcaggaaagatccaaaattgacaccctaacatcacaattaaaagaactagaaaaccaagagcaaatacattcaaaagctagcagaaggcaagaaataactaatatcagagcagaactgaaggaaatagagacacaaaaaacccttcaaaaaattaatgaatccaggagctggttttttgaaaggatcaacaaaattgatagaccgctagcaagactaataaagaagaaaagagagaagaatcaaatagacgcaataaaaaatgataaagggtatatcaccaccgatcccacagaaatacaaattaccatcagagaatactataaacacctctatgcaaataaactagaaaatctagaagaaatggataatttcctcaacacatacacccttccaagactaaaccaggaagaagttgaatctctgaatagaccaataacaggctctgaaattgtggcaataatcaatagcttaccaaccaaaaaaagtccgggaccagatggattcacagccgaattccaccacaggtacaaggaggagctggtaccattccttctgaaactattccaatcaacagaaaaagagggaatcctccctaactcattttatgaggccagcatcatcctgataccaaagctgggcagagacacaaccaaaaaagagaattttagaccaatatccttgatgaacattgatgcaaaaatcctcaataaaatactggcaaactgaatccagcagcacatcaaaaagcttgtccaccatgatccagtgggcttcatccctgggatgcaaggctggttcaacatatgcaaatcaataaatgtaatccagaatataaacagaaccaaagacaaaaaccacatgattatctcaatagatgcagaaaaggcctttgacaaaattcaacaacccttcatgctaaaaactctcaataaattaggtattgatgggacatatctcaaaataataagagctatctatgacaaacccacagccaatatcatactgaatgggcaaaaactggaagcattccctttgaaaactggcacaagacagggatgccccctctcaccactcctattcaacatagtgttggaagttctggccagggcaattaggcaggagaaggaaataaagggtattcaattaggaaaagagtaagtcaaattgtccctgtttgcagataacatgattgtatatctagaaaacaccactgtctaagcccaaaatctccttaagctgataagcaacttcagcaaagtctcaggatacaaaatcaatgtacaaaaatcacaagcattcttatacaccaataacagacaaacagagagccaaatcatgagtgaactcctattcagaactgcttcaaagagaataaaatacctaggaatccaacttacaagggacgtgagggacctcttcaaggagaactacaaaccactgctcaatgaaataaaagaggatacaaagaaatggaagaacattccatgctcatggctaggaagaatcaatatcgtgaaaatggccatactgcccaaggtaatttatagattcaatgccatccccatcaagctaccaatgactttcttcacagaattggaaaaaactactttaaagttcatatggaaccaaaaaagagcccacatcaccaagtcaagcctaagccaaaagaacaaagccagaggcatcacactacctgacgtcgaactatactacaaggctacagtcaccaaaacagcatggtactggtaccaaaacagagatagcgatcaatggaacagaacagagccctcagaaataatgccacatatctacaaccagctgatctttgacaaacctgacaaaaacaagcaatggggaaaggattccctatttaataaatggtgctgggaaaactggctagccatatgtagaaagctgaaactagatcccttccttacaccttatacaaaaattaattcaagatggattaaagacttaaatgttagacctaaaaccataaaaaccctagaagaaaacctaggcaataccattcaggacataggcatgggcaagtgcttcatgtctaaaacaccaaaagcaatggcaacaaaagccaaaattgacaaatgggatctaattaaactaaagagcttctgcacagcaaaacaaactaccatcagagtgaacaggcaacctacagaatgggagaaaatttttgcaatctactcatctgacaaagggctactatccagaatctacaagaactccaacaaatttacaagaaaaaaacaaacaaccccatcaaaaagtgggcaaaggatatgaacagacacttctcaaaagaagacatttatgcagccaaaaaaccatggaaaaatgctcatcatcactggccatcagagaaatgcaaatcaaaaccacaatgagataccatctcacaccagttagaatggtgatcattaaaaagtcagggaaccacaggtgctggagaggatgtggagaaataggaacacttttacaccattggtgggactgtaaactagttcaaccattgtggaagtcagtgtggcgattcctcagggatctagatctagaaataccatttgacccagccatcccattactggatatatacccaaaggattataaatcatgctgctataaagacacatgcacacgtatgtttattttggcactattcacaatagcaaagacttggaaccaacccaaatgtccaacaatgatagactggattaagaaaatgtggcacatatacaccatggaatactatgcagccataaaaatgatgagttcatgtcctttgtagggacatggatgaaactggaaaccatcattctcagcaaactatcgcaaggacaaaaaaccaaacaccgcatgttctcactcatagatgggaattgaacaatgagaacacatggacacaggaaggggaacatcacactcccggaactgttgtggggttgggggagggggaagggatagcattaggagacacacctaatgttaaatgacaagttaatgggtgcagcacaccaacatggcacatgtatacatatgtaacaaacgtgcacattgtgcacatgtaccctaaaacttaaagtgtaataataataatatttttttaaaaaatcattttaactgtcattcccttgtagatgatatgccttttctgtttggatgcttttttaggtttttgcttgtctttggtgttctacagtagcatgttatgctatacccagatatggacttttaatttttactctgtttctgattcttgggattcctgagtatggagtttgatttctttcaataattctagaaattagaagccttaacattgtttattattttttcttctccattatgtcatatttcgttttagaagtccaataaaaatatgtaggacgttttcattctaccttccatgtatgttaacttcttcatattttccatctctttgtttctctaggcctcattctaaacaatttcttcatattttccagttcactaattctttctgcgtatgtatccactttggtgttcaacctctaagatttttaacttcaactgttagattcttaattttctgatgttctgttcatttccttttctattttgctttttaaatgccttttattccttgctcatattttccagtatctatttttgaaacatatttaagcacacttatttaatattctacgtcagatacttctaaatacgtaaagtcatttcagatctgattaaactgcactttattgtttcttggttctcactcatggtgacttttttctttccttcgttttcctttgtccttctctctctgtctctctctctctctctgtctctctctctctctctctgtctctctctctctctctcctcttccctccctctctcccatcttctctttcttccttgtttttttccgtcatgtacgtaatctcattttccttaaaactgccttatgaagcctttgattcacattacttcaaaaactatttatgctgacttcaaatacctaactaggagcactagttatctataaccactacaaatctataaccactacaaatttaagttttcctttcagctttttaaagacaccgtaaatagtggaaactgggatcacaaacctgcatgggagttatcagttctgaagaaaactccccgctccatgcaactccagtcaagactgaacattttccttgccatctccttctgcatagtgtgttcatttctcataatccttacactgaagatagaagtttccagctttatgtagaaatctctcatcaggctccacatttgtttagttcttagactttatctcatacgtcctattccttgcacaatcataagaaaaaatctcagggttttcacagttgggcaaatacatgcaaggcaaaaattaaatctgaagctcacatattgctgggagttcctattaccactttacatttggccttcatagatgttactcttgatggactctatttttaagtatttttaaatgtattatatctggcttttttggtcatttttccttttgtgagtgtcattcaggctaattattcttccatgaagacatactactaaaccttttgtatggaatttaaattctttagctcatgaccctggtctttttctgggacacacacctgcctcccaaatagctccctatatgttttgactttgtgactgactaaacctcagttattatgctataatttatatttgtttcatttggctgtctcttcttaagtttcttgtcattaatattagaaagagggctatttctgaggggcccaagagaagcatgtgcactctcctccatttggccaaatctgaattgtattcttgaatcatctcattatcgtgactgaaagaatgtaaacattctgcagcttccaccttattttgtttgttgcttcagaaatatatccctaaatttctgttacttcctctcctacaatctaataggttccacccataaatcctatttcatcagtactgctcattaaagagatcagccctgtgagagatgatggtaacttaagctaaggtggctgcaaatggtcatctttagaactaggtaaaatttagaatttggggcattaactgttgatgaaattggaattgactgatggcaaaatactgatggatctacctccattttcaatgggagaagtatttgcaatttaaaaaccagaatattgtaacaacaaaaacaagtagagaagaaatgagggatggagtttcaagttaacatcatatcctttttaccagtcatcagaaagtaaaaaaaaagactcttttattgccttataccatacttaataaaagatttctgtgaatacactaaaatatgagaaattgcttcatgcactacataataaaaagaatcgctgtctctaattctctactgagaatgcactgaatcttagaaaatctgcattttgaatcaaataaattaagaaacctctgcaaatctctacttcacttgcaaagtgttaagaccaaagaaaagttagaattctgaagaaaagccaatcctcacatcctcccaaaaggtacatgcttaattcactgattcgaagcaaaactgtcctttttatagtgtgcactaaggaaggggataagatgtgatttcccctgttcagaggaacatgtatattcagccagggtatatggctggcttcaggaggacttgccattccaaaaagtgtaaagtgtgtatgtgcattttcctgtggagaaagcccatagactatattggattttcaaagaagcctttaatcaaaacaaaaatgtgatgaattactgatatggaggctagtaatggtttctaaagtgctcctttttgctaattatgagaacaataaaaatgatgataataccaatgggataatttggagacacaagagtttcactaactgtcagattcagctatttcttcctcacatccattcaggcctctgatgtaataacagaaaaagaaataatagaagaagtaattgaattaatatgatggactaccatgcagctagaaagatgactgaatacatctgcagtgttacttcgtcacctgcacagatgtggatgacagagttaaggaaagcagaaaagaaaggaaaagaggaataagttacagagtgataaataaatacatttatagtaaagatacatgtatagtataatataataaaaacttagatgaggacacacccagcttcaggacagtagctgtccctgggggaaaagaggaagctaaccagcagatctggtgcctgcctgagactcttgcccacttcctccatgctagggcaaccccagggggctctcccctccaggatacccagaaccagagctgtgtcctgcctggtcccagacccagagctgtgtcctgcctggtcccagaccacctgggttgtcccagttttaagagacagccatggccccacttctggttgttgagacataagggggttctccatgctggattttttagatggttttctgaatcctaagaagaagacctagaagagacagcacctttctgcctctggatgtttgagtcctgagcagagtccacttgagggccagtccatcacactgcaaagatcagggaacccgaagatgccacttagcctctgaattgccctaccttgaaatcttatgaattgtctctgaaccatttgtaaagtgaagtaataaatttttagaccattcaaggaaatttgactcatatttttctgttactgtagtcaaaacaaccttactgattcacactctcatgggacttgaaatggggtacagggcagattttcactgtatccaaaacagccaatttctccaaatacgagatctcaaatatggcaaaatttcaatgatggacatgtgggtgtttgttatattactctctgtatcttttaagcttcttagaaatatttcattgaaaacagagaaagagtaactgcaaaggtctcacttcaagccaggttgagggacaaagaggataaatttttataatgaagggaaattttcaaagccacaaataaaatagtaaggatctctttttttcaaaatatatattttggcaaaccaggtgcaaaactcatgcacagataagtttttgtctgatctgcaaaacttcagtaaaattttggaaagttccgatatcagagaaaaatattattaaacatttatataaatctctaaacttatacagggctatgcaatcacattattagtcatttccttttattccttaggaagacctagatctatcaaacatctgtgtgataccagcattactccatttctggagaaataataaagtttattttcctcttccaaaccatggtgtcagtaatctaagttgatgacagtagagaaacttcaggcaaggccagcttaagaaaagttgagaaaataaaagaattcaataaagacgtgatgacagaataactcccactgaagtcaacagggttttcagaatgtgtgttgcattcaggtccctatagaccacctagggcaaggcagaccaaggctccatggagatcaggacatcctgagtaggaagagagggtgggagacaaagcttggcactgattacatctccaggacagaggacagtggaagaaggggcatcttctgagtagtcatcctgaccagaggcacatcatctcattagctgccccctaaaaacttatggggtatgcatgagtctccctggtttgcacaggccacagcaacttgccaaagagggttcttttgtttcctaaagtgagatccatgggccaacagtatcagcatcatctcagagcttgtcagaaatgcaaagtctcaggccccaccctaaacctatctcatcagaatctgcattttaacaagatccccaggtgacttatgggcacattaatgtttgagaagccctggtctaagatattatgcagagaagtgatgagcgtagggtctgaaatcagatggatttgacttccaaccccgccttcttctcttcctgatggtgtaacttggacaaggcacttaatttctttgagcatcatttataaatggaataatagtacttcctagggttttgacaaagttcagtggctttaattcaataggatacaatgtgtctagcccgaagttttgcagtgagtcctccttatccatctaacttaaaaactaaacgtctttctacaacctttgatgcccatcaaagacctgcctctacctggcctccatgcaagccagagcagccctttttctgcccttcccatcatcccattcctcctacagcctcttctacacccttaaggaagcccatagcagaccatcccaattttcaattagctctttactgttcctcacctccaggaaatcttaggtacccttgaccccttgccaggacatcaaaacaggactcaacaattctgttatgaaataaatgagccattgtttgaaaagtagttcagcttcctttgtttgtataaatgacgcaatagcttctgctcactgtagagccagcactctgcctgccctcatactctggctgcccagcattcagctagcagagctgcctctcatccacctcctccatcacagcccattcccaagcgtgggcccagtcagcacagacagcaatctgcagcagtctcctctccctaaagactagcacgtggaggaacaggctctctgctcagttctggcaaacccttcccagatctactggtttacaaggagaacctggtataccagccagagaagtccaaagtcctaagaactttacattttgagaagcttaccccattttatcaatcaacttgtatttcttcacattttactctattttgttcaatcatatttaaccataagcacaaggtggacatctccctgccaatgagactagggacctacactgaggacagtgactcgagctcctctggctggttggttatttataggtgatggacgtgtttaggtgggctgtctgtgagatttatccatcttctcctcagttctctcctcatcccttttttcttgtcacctacttttactttctgctttccttttgtttttactatttcctttgtctctcactcttcctccctctctctttttcttttccctctttttccttcatcttctctgagcttcctgcttctgccatagaaaattctacctagcaaattctaaattctcaaaactccatttcacccatccctgctcattcaatttcctttaattccaatggactcagaacattcagggtaggtcaaagcaattcccaaaagtggtttatcaattgctaaccttactctgactttttcagatgtgatattcctgaaatatgctctaagttgcatctgaaatgtaaacttctgcaggtctacttggattttaaaagcactggaataactgttgggacaagttaaaacagctttgcctggcatttggagggacggcaaatctagagtgtttgcagttcaacaatcaaggcagaggctgagtgggaagttatccaggtaacgggtttcagcagtcacaggcagagacatgcccctttctgcaatcccctgcacccaacagagcaatgtggaaataggcccagaaaaggagtttcaattttgtaacattcaccaacttctctccaatctccccttacccctctcctcccaagattctggtaaccactgttctactctctacttctacgagatcaatattttttagattccacttgagtgagattatgcagtaatggtctttctgtgcctggctaattttacttaacataatgtctcccaggttcataaatattgtctcaaatgacagaatttcactctttcttatggctgaatagtattctcttttggttttatactacattttctttatccattcatctgttgatggacacttaggttgtttccatagcttggctattgtcaatagtgctgcaataaacatgagagttcaggtactttggagatgttgatttcctttcttttggatagatacccagaagtgggattgctggttcatagggtagttatattttaattttttgagaaacctctatactgttttccataatgattgtactaatttacattctcaccaacagtgtgttaagattcccttttctccgcatcctcatcaatactttttatcttttatattttttataatagtcattttgataatgagtgaggtgtcatctcattgtgttctcttttttaaattgacacataatgcacatattcgggggtatataatgatgcttcaattcatacaatgcatagtgatcagatcagggtgattagcatagccatcacctcaaagtttatcatttatttgtcttgggaatgttcaatatcttcctattagctatctgaaatgatatagtatattattgttagctatagtcatcctacagcgctgcaggacactagaacttattccttctatctagtgagccattgtggttttgatttgcaattctctgatgattactgatgttaggagaaataaattctggtaatctattgaccatcgggcaaactatagttaacaataatatactgtatatttcataatagctagaagagaggtttctgaatgttctcaccacaaggaaattacaaatgtatgacatgatggatatgctcattaccctgatttgatcattatacaacgtatatgtgcatgaaaataccacattgtaccacccataaatatgtacaattattgtgtcaatttaaaaaaagaaaatgggttttaagaaatgcataaagaaactccattaactcagatctaaaattcataaggatcttttggtcattcactgtatatacccacaattttcatttagttcaggactactgtaaattctcactgtgcctccaaaaccaaaaggaaattgtaagtgataatccattgctctgtctatgctggagttagaaccagaaccagctcttccacggtgaggtaaatgtctcctgttgtgctatcttcctagctctgagcaccaggcctggtaagtactcatgaaggaagaagggaagggaaggaggaaagagcaaaggagcaagggagagaagaaggaagagagaaagaaaaagggagaggggagaaaatgagttatttagaattacacacacatacacaaaaagtgaacctcaaaatttttaatattttaaactatgacctgagtagctatctccataacacaaagccaattcttttcattctgttgttaaattattaaaagctggctgagccctttaattcacagtttactccccaggcagatattcaaacagaaaaataaatataataacagctgatccttcacagtcctcatttgcttgcctgttgcaaaccactttaattattttgtttgcaatacctatttgtttatctcaggagaatatttaaatccacttctgtttgtgcacaactatccctaccactaggaaaatgagaccttatgtttcacattaacacctcattttttttatccctgaggagctgacagagaattataattttaattgcatatataatttaaaatcctaaaaaattaccacaaaaaactttccaaagatgatttagaaataaaattgcatggcccagagcccttaagtgtcatgattctggagtttatagccctgtatttaacatatccaatccttacatctgaacaagacccaattttgtagacccaagtgtaaagataaaaaacatacattcagaaggaaatatagcatgataattaagagtgcaaatgctggctgtggtggattaataagggctgaatttacctgtcatgttaaacaactaaaaacaaacaaaatatatgcaacaagttttcagacattggataacaggcataactagacatacataactaaaccccctgaatccagggaaaggaccatctgaaaggagcaggtgcagcaatccttagaaataggccaaattagcaacagactaaagagatctgcataacaaagctccaaagcaagtcttgaaacatcaaaatattcaaagtaattcagctgtgtcccaaggagggagaaagtctttaaaggactaacaatgaatcaagcacccaaccatgtaaaagcataatgtctggcatctaatcaaaaattatcaggcacataaagaagtaagaaaatacaatccataatgaggatatgtcaatatcctcaatcaatcctcaatcaatcaatagaaacacacccagaaataatgcagatggtagatggtaattaggaaaacaggacattaaaatagatattataaatattataaacatataccatatgtaaagaagatagagcaaaacatgcatgatagggagaaaaataaaaggcacaaattggatttaacaaatagaatatgtaatgcctgagatgaaaaatacactggataaaattaacagcacattagacactgtagaagaaaagtcgatgaacttgaaagtatggcaacagaaactactcaaaatgaatcatggagataaaaaaaaaacaaaaaaaaaaacaggaaaaagatcaacagagcattagtgagaatagaataatttcaagcagcctaatatacaagtcattcaagtccatgagggagaagagagagaaggggatacagaaaaaagtacttgagaaaataattgccaaaaagtttccaagtttgatgaagaacacacataattaagcacataaccaaagagaggcaaagaaaaaatcctaaaagcagctagaagaagaagatccgatatgcagggagaaataaaactaagattaagagctgagtcctcatcaaggcaagcctgaagtccgtgatacatcttttaagtatgaaaagaaaaaaaaagaaaactatgtttttcctagatttttatacatgcaaaactaaagcaaagacgtttttagaaaaataaaaggtaaaaaaaaaaatcttcaggaaaaaaagataatctaaatagtcctagatctgctaaaaaaatagaatgtgttcttaaaatctttccatgaagggtattcagaggaaccttttcagacccagataacgtcattggtgaattctacatgcatttatggaagaaagaataccaattttacacaaacactttcagaaaattgaagaggaggaaacatattgcaactcatgtcaggaggccatcactaccctgataacaaaaccagacaaagggtttacaggataagaaactgaagccaatttttgtatctctgggcatagatacaaaatttacagatttaaaatttctttaaaatatcttagccaatactttagctaaaatattttaattttgaatccaacattttcttgaaaaaagacaaaaatattcatcccaggactgcaggttggttttacacttgaaagtgaatcaatttagttctccaccctaacagaataaaaaagacaaaacgtgattatctcaatagatgcacaaaaaatatttggcaaaattcaagatccaattatgttaaaaactctcagcaaactaggaataaaagaaaacttcttcaacatgataaaggatatcaacaatcaacctacatctaacatcatcattaatgataaaaggctgaattttttcccctaagagcaggaaaaaggcatagatatccgctactattacttctactcaacattgtgctggaggttctagtcagggcaccagggctagaaaaataagtgagagagatccagattggaaaggaataagaatagttcactatattcagggatggcatgatagtctatatcgaaaaatcccaggaaatctaaaacaaaaacctaccagaactaagaagtgaatttagcaagattaggaacacaaggtcaatatccagaaaccagttgtattgctacatgctagtaacaaacaattgcaaatctaaatgaaaaaagaaacaccatttacaattataggaaacttattagatatttggagactaatttaacaacaagacctgtacacttaacagtgtaaaacattgctaaaaataattaagaaagacctaaataaatgaaaagatatgctttgttcatgaattagaagacaatattgttaagatgccaattcaacacaattgaaattaaatcctagcaggatttttctagaaactgacaagttaattctaaaatgcgtatggaaatgcagggcctcaactagggtaaggcactatcacaaacttcagagtgaattcctcttaaattttgtgtcctgagtgcctcacttgtctcaccctagtcccacacctgtgaaaatgtgaagaacctagaaaggtgaaaacgacgtttcaaaaacaggacaaggtacagaactttctcctcttgatttcaaagttaactgtaatgctacagttattgagatagtgtggcactgctgggacaatagacaatccttccaccagtcaatggtcaatgaaacagaaaagaaagtccaagaatagatacacatactgaagggcaattgatttttgacaaaagatccaaagtagaaaggatattttcaatggctggtgctggaaaaattaaataactatataaaaaaataaaataaggattaatcttaacccttacctcatatcatatgcaaaaattaaccgccaatatacacaacaacatgcgtgtgtctcaaaatcaatatgctgagtgaaataagctccacaaaaaaagagtataatacaggtatgattccattgatataaaattctaggaaatgtaatctacagtgacagaaaggagatcagaggttgtcttgagattaggtagaggtagaaattatatggggcaggaggaaatttttgtgggttatgcaaagatgcattatcatgattgtggtgatgattttacaaatgtatatttcaaaactccaagtcgtacttatcagattgtgcaggttttttaagtgtcaattgtacttttaaaagtttataaaataacagcagtgtaggcattggaatcagactacttttgctcagatctagagcactccaaacaaaacagaacttggccgggtgcggtagctcaagcctgtaatcccagaactttgggaggccaaaataggcagatcacttgaggtcaagagttcaagaccagccttgccagcatggtgaaaccccgtctctactaaaaatacaaaaattagcccggcatggtggtgtgcacctgtaatcccagctatttgggaggctgaggcaggagaatcgcttgaacctgagagctggaggttgcagtgaaccaagattgtgtcactgcaccacagccttcaacaaactgggactctcaaaaaaaaaaaaaaaatatatatatatatatatatatatgtaaaatataactcaccctgcacagaacctataaccttcatctcctttcaacacttgctacttgaaggtgcttgtttttgcactaaccgttggtcctccctgacatcagtttaatcaactctcagcagctcctgttagccccacctttgaaactcctgagcctgaatccatctcaccacctccatttgaaccatcctggtccacatcccatcatctctaataaaggctccaccttttttcctttttcctaccccttctcatcccaacccccatgatatatcttcaacacggatgtcagggtggtccttcaaaaacataattcacatcacatcatttctcaatacaaaatgctctagtgtctcctcagctcaatcagaagacaagccaagtccttgtgggagcagatgccacagaatatcctcccacccatgctcatatgttatcaccttggactctaagccactgccccattattaactgtctgtccacatttcatccacaagccatcaccacatttcccagttcttgtggttcctggctatgactgcttctcatctggggtacacatctctcccagtactgtgtggtgtgagctgagggacaaaaacctaatggttaacagaacccatcttcctgcagccaatatttgggtggaagaaatggcttttcatattaaactgaaccattaagctaaattgaaaattttctttgaggcacatagtcttaatgatatgaaattccatagtgaagtacctgacccagatgcagatgatccgaggaaaatgagaatcagtttcttgactccaaaaatgctcagccacaaggaggatataaaagggccacaagagtcaaaattatgggaaagaggatttagtgagaaacatctctctgggggaaaaacgaacatggacatgttgtcactcccacaagggtgaggagagtgcctgcccctcactgcaagtcttcttggtggggccattgaaagttcaacataagacagccaggactttaaacaagcaggattctttgcagtaaatcataaaagctactttacattgtcttccactggctctttgaatctgttcattcattcacttctattggataagaatttcatctgtcggatgaagtttcgtggcttttctgtctatttctagttaacaggaagttctgtcactttaagttgcaaagccaagttttgattcagctattaaaatgatctacccaatataataatcagaacttttacttggcttgatgcggaaattttgaccctttaaggacaaaaatcaacatgtatcttccattaagttagagctgggctggttcaaaggcagtactgcatgaaggtaacacagggtttggaatcagaccaacttgagcttaaaattccagcttgtctttatattgttgtgatacctcagaccttttctgaacttcaacttcatcacctctactggatttttaataatctctctcttataaggttgttgtgtggataaagctatataaaactaacacatctgtgcaaaggacataggcaaccatgtcacaaaatagaagtagacgtgatgatcaatcaagaaatattaaaagtgtttgacttagctaataagcaaagaaatacaaattaaacaatgcagtgcacctttttatctaaaatattggtaaaaacaaataacaatttattatattcatgtcacaagatgcaagagtaagatgagacaggcactatgataaaagcagttcagactctttgagtttccatactttgaaatagtaatattatcatcagaaggagacatcaagagatctaggtataaggatgttgattgcagcataatttacaatagcattaaccaagctaagtttccaacaaaggagaagatttgcataaattatgattcctccaatgacagaatactagaaggtcattaaatattatttcaaatgctatttactgacatgataaattgttaatgatacattattaattgaaaacagtgagacacaaaactgaacataacagtaaaatctcaatgaggcaaaataaatgacgtatataaggctgtttgaaaggataatttattggtatattaatttgtattttattttattattatagaaggagcagaaggaattagagcaatttttctctgctttgcttctatccctgcccctcccacttcattatacacacacccagacacacctacacagtggtaagcagcacttatgccctagaaagtttatgctcttctttctcccaagatattttctttcaaaaaataggcaaactgtcataatggttggctgggaagttctctgtggcttggagaatggggataggtaaaatggcctgagccaggaaacctccagggaagatggggagggaaccagaggagaagccttggattaacccatccccaatacactggcccctcaggaaggcttggccataggcatggggtctctcatgctcggaaaacatatcatcatgcctgaggcccaaagtggcttggagttaatgttattgagtgcctacagaagtctttctttttatgatgatgatgatggtgacaaataaaatgttatatatttatgatgtacaacatgacattttgatatatgtatacattgtggattggttaaatcaagctaattaattgatccattatcaatttttttgtgatgagaacatttaaaatctttcttagcattcttcaaatattcaatacattcttgtcagctatcgtaaccatactgtacaatagatcccctgaactggtaattctttctaactgaaattttgattccttggaccaccatctccccaaccccccactgtcactctggcccacggcatctcacccttcttctctctgcttctataagttcaacttttttggattccacatgcagtcacacattgcttaatgacagggatatgttctgagaaatgtgttgttagatgattgtgtcattgtgagaacatcatagagggtacttacacagacctagatggaacagccaactgcacacctaggctatatggcatagcctactgttcttaggctacaaacctatacagcatgttaccgtactgactattgcaggcaactgtaacccaatggtatttgtgtatctgaatatagctagacatagaaaaggtatagtaaaaatatgctatgaaagataaaaaattgtacaactgtataggacacttacgatgaatggagcttgcagaacaggaagttgctctgggtgagttagtgggtgagtgttgagtaactgtgaaggctcaggacattactgtacactactatagaggctatgaacactaaacataggcaacactaaaatttatttttaaaatttttcttcaaaaataaattaactttaacttattataacttttttactttataaacttaactattttaactttttgactcctatagtaacacttagtttacaacacaaacacaatgtatagctatacaaaatattgttttctttatatacttattctataagcttttttctatttttaaaatttctttaaaacttttttgttaaaaactaagacacttaggcctacacagggtcaggatcaacaatatcactctcttccacctccacatcttgtctcactagaaggtcttcaggggcaatagcatgcatggagctgtcatcttttatgatgacaatgctttattctggaatatctcctgaaagatctgcctcaggctgttttacagttaactttcttctttgtaactagaagaggtacactctaaaataacaataaaaaaataccatagtaaatatataaaccaatagtatagtcgcctattattattctcaagtattatggactgcacctaattgtatgtactctactttctttacatgactggcagcacagtaggtttgtttataccagcatcaccatgaacattggagtaatgtactgcactatgacattaggatggctacaaagccattaggtgacaggaatttctcagctccactaaaatcttatgggactgctgttgtacatagggttcatggttgacagaagcataattctgtaacacagaagtgtataagtgaggtcatgccatatttgtctttctacgcctagcttatttgacttaacatagtgtcctccaggctcatccatgttgtcaataacaagatttccttcctttttaaggctgaatagaattcctttgtgtagatagaccacattttctgtatccattcaactactgatggacacttaggttgattccatatcttgctattgtgaatagcgctgcaatccacatgagagtgcagatatccctttgatacactgatttcatttccattggatgtatacccagtagtgggactgctgagtctacagacatctttctatgattgatcttgttagtgtaaaatccaggaacctttgcatatccttcaggagggcagaaaggaagcaatcctattataactgagatcaagtttcttgccatccctttaattgggtaaatttaatttgttttaagataatatctataaagcatccaaagcagggcctggcacacagtaggcactcagcaatgtgtcttcccttgcttctgagggcaacccctcggcttgctattcttgccatgcccacagcaagcagaaacctaaacatggggaggcacttgttcagatccccatgggcctcacacagtgggcttttcagcaattcttgagtaagaggagtatcaggcgtgaaagtacccagaaggttcagcccctcattgcctcagtagctgacaagctggcctctagggctgctggaaactgcatcctagttccaatcactggcagttaaactgcctcctcactttcctttccaaaactgcataatattcatttgggattctccagccacctctaagagacagctgcctcaatgtatgtagcatcccctggtttgaggcagtaggaaagagaatgaaagctgagactacagtctctgtaaaccctcaaacatcccttaagacactcacagaaagaggttctggtggtttgaactatctcctgcctctgcttctctgttccagctttgaaaggacccttcctggggagctccaccaggggcctgtaatttcccatgctgtgtgaaggcagcagccacgtgtgaatgtgtgtgtgtacatgtgcgtgcaggcgcgcttgcttctcctctgtgtggtgcataatgattatccagactggcgaaggaggtgtaataacagggtagaaggcacagataatagggcctttctggcacaagcagcaagttcatctgaatccaccagaatccatttgctggaagacagatggataggaatgcggaaaggtagacaccaacctttagttttcaaatacatttgctgcatatggtaattaaagctatttttaaaactccctaagtgtcagcactccctttcccaagcatttttctgtcaaaactctgcaaaacggcaatacacttgttgggaacaattgattcatatctaaaaacatggagtctgattccatagcaatggcaggttgtctgtctacagggagttggaacttgaactgtagaggatctggagtggctcccacagccttggctgagctgtaatttagtgatccatggacacatgtttctcatccatgacactctaagctctctgagggtgagggactcatctttcaaattcttatgagcatccctggtgcttcacaggtgttcagtacatgtatgacgaatgaacaatagcttgtcaagagttacatatcatgggagggagagaggccatgaaggaaaaagataaggatcactgaagaatcacagagtaagttatatgcagtgtggaaagaaggaaagaccatggaagacattaataagtattgcaaaaagtggaggaggcagtaatttgaactgtcttaaaggatgcatgagacttcaggaagaactagggtcgcagcaggcccagaacagaactataaatgctgcgacgcggattcataacaagtaacaagaggaattaattcctcaagtcagtgtgtttttatttactaaagtacaaaggcaaactttcccacaggatgtgagtcacttgttacaaagaagagctatcttttatttatttattcatttattttattttattttatttatttatttatttatttatttatttattttgagacagagtctcgctctgtcgcccaggctggagtgcagtggcatgatcttggcttactgccaagctctgcctcatgggttcacgccattctcccacctcagcctcccgagtagctgggactacaggtgcccgccaccatgcccggctaattgtttttgtatttttagtagagacggggtttcaccgtgttagccaggatggtctcaatctcctgacctcgtgatctgcccgccttggcctcccaaagaagaagagctatcttttaagcgtgcttgctgtctgcctgacactgtgttaggccacttcctatatgttagctcatttaatcttcatgactgtcctaggaggtaactatcacaaagtctactgagtaaatgatgaaaatatggctcaaggaaggaaataaaacagtcacagaagtggtcagtattgcagccagaatcatatccatggtgtgttcccaaagactgtgatctaaagcacaatggtatgtcacttcttcctcggtcctgctcccaaaacccatcatctgtgcagctgcaaacaccgtctccacagggcttttcaaagggctaaagaatgatactgcagaacaacgatgacctcatatatctgcaaccataaatgttaaatctcataggttcctttacggctgagaaagaagaatagatctattgtgattaacatatagaagtgcatttccagtaaatagggtttgtttccttctggtattcctcatgggacatacataagcttgtttgtgtgggcttttgcaaggttctttcacgtttgccataatagattttaaaaataaggcactaatgtgcaaaataacataaagggtacaaatctaatcaagcagctccctcttatcctcggggaatgcatttcaagatccccagtggatgcctgaaactgcagatagtaccaaaccctatatatactatagttttttctatctgataacctagtagtaggtgactaatgggtgggtggtgcatacagtgtggagaccctggataaagggatgattcatatcctgggtgggacaaagcagtacagcgagagctttcatcacactatgcagaagagcatgcgattgaaaaacgtataaattatttatttatggaattttccacttaatacttttgaacctcagttgacagtgggtgactgaaaccataaaaagtaaaaccgcagataaggagggacaactgcaataaattaacaaaagtttcatagtaggactttccataatacaaactatattactgtttctaagttatgaaaaattcagatattgctgggattccataacttattcagcattcaaccagtgctgggagtgagagggaagataaggggggagccgtgtggcatcgggtatggagttcttaaattcgaagtcactcagatctcaagtcctgattctgccacttactaattatgtgacatcaaactgttttcttatctgtaggatggtataatagaagttggagttcttgagggttctgtcctcccacctttcccggcattccccttctaggtcacgcaccctcctggcagcatcaccagacatcattgacctctccttccctttgaaatggtttcttcacttggcttctgggacccccccacaacacctgtcctcctcctccacctcaggctgctcctggtcagcatccatggtgagtttctcctcctttctctggcttcacatgccccagaggtgccagggtttgggcctcttcgcatttttagtaatgcaacccctctgtggtctcatccagtcacatgaggttcaatatcccctatatgcagatggttcccagattcatatcaacagctttaccctccctctgaactccagactcatagagccacatgtctagtgtctacataccatctctgtgtaatggtctaataggtatctcaaaattaacagattcaaaccaaattcctgatcttacccctgaaatattcaatctcctcatctcaagaaatgtcttctcttttcagttcctgaagctaaaaacaaacaaacaaatgaaaactctagaatcatacttgatgtttctcttttctcataatccacatctaatccaacagcaaatcttatcggctccccaccccaaatatattcagaatccaactacttcttacctcctccatactaccccatagtccaaaccaccacccttcctttcctagataatcacaatagcctgataaatagtttatttcatccctaccctcctcaccacctcacttactcttaaggcagctaccagggtatagtttcaaaaaaatatatatatatattgcccatcttttgctcaaaaccctcctcttgcttccaacttcactcagaataagaatcgtgtcttacaaaggccagaaaagttctacatgacctggcctcctgccatgcctctaacccctctcccaccactctctccatcactcactctgctccagccacactggcctctgtgccattcctaaagcctagccacagactcccactcagagacttcacacctgttctctccttcaactggaatgctcttcctccagaaatatgcacagcatcctcacttcctcacttcttcaagtccctgttcaaatgttacctcatcaaatagatttctcatgggcaccctatgtaaagtggaatccattccttctcccaacagatttctcatgggcaccctatgtaaagtagaatccactccttctccctctttttgccttacatgattgtattactctacatagtatctaacaaattcatcaaattataaatgtaataattatctggtcatctgtcttgccccattgaaaatgtgctccacaataccaggagttttctgagaattaaataagataataaagatgatgcctataattaaccaagatggagtaacagggattggatttaccctctgacctgaaataaccaaaaagactaggaaaaacctatgaaaaaatagtttgcaagacactggaaaataggcaatgaagaatagcgatccttcaagacaggaaacaaggtgagttttatgactgaactaaatctctgcctttagagaatttccatgacacagtgcaggtggggagaggaagcatgcagaacccagtggactccatgtgttaaggatatggacccaagagaatggaagagcaaggcagttagagtttgcaggaaagactactagagagaagaaaactgcacagagagagaaaaatgtggtcacttccagagggtcccccatgacaatgctgagcagagtgctgacccagaactaaaacagaattagaattagcagataattaccctaaacagttattataactactttttttacattcaaaatataagtagagacattgaagatttaacgaaaaaactcaaaaacttctagaaatcaaaactacaatgtatgaaattaaaaaaaaaaacactggacagaatagttggcagattagacatcgacaaacaaaatatcactgaatctgaacacataacaataaaaattacacaaaataaaatagaaaaaataagagaaaaagaacatcagtgacgtgtgggataacttcacaaaaacctagtatctgcgtaactcaaaatctcaagtaagaggatatggaggcagaaaaatattagaaaatataaaagatttttttcacattttgcagtaataatggattaaagttttgatgaaaattataagtacacaagtccaagaagctcaacaaagtgcaggcacacacacaaaaataaaaacaagaagaaaaccatgccaaggtacatgataatcaaattgatcaaaaccagagaaaaagaagaaacattaaaagaaaccagagataaagagcatgttatatacagaaaaacaaaagtaaggacaatatcagatgcttatcagtaataatatgaggaggaagatagtaaggcaacatttttaaagtactgaaaggaaatactgttaacctagaattctgtacctagtaaaaatatcttccaaaaatgaaagtgaaatgaagtcattttcagacatacaaaagcggcaagcattcaccaccagcagaactgtactataagaaatgtcaaaggaagtctttcaagcagaagagaaatgataccagatcaaactacggatcttcgcaccaaaaatataaatagcacctgaaatgataacggcagagaaaagtatttaagattattttcttattacttaaatctctttaaaagataactgactgttttaataaacataataactatgtatttttgtgtatataacacatatgaaagtaacatttattataacaattacattgagtcgggagggtaacacggagggatactattgtaagatacttatactgaaatatatgtggtgtagtataatatcacttaaaagtagatggtggtgaattaaagatgtatactataaatcctaagcaactactaaacttttttaaaagagttatagctcataagccaataaaagttaaaatagaatcataaaaaattcgcaattcacccataagaggttttaaaagagaaaaaaggaatcaaaggaaatgaaacaaatacaaaatggcaagaagacagccttgaacctaacaatattgatgattacattcagtataaattatctaaaattcctcaattaaaaggtgaagactgttataatggataaaatagcaagacctaaataagtgctgcctccaggaaatatactttaaacataaagaaacaagtatgttaaaagtaagacagtgaaaaaaggtattatactaacacaagtcaaaataaatatagaatggctgcagtaatcccagataaactatatttcagagcagaaaaaaataccagggacaaatcctaatttaagtcctaatgatagagggttaataaatcaagagaacataaaaatcctaagcatttatgccccttgaaataaagcttccaaatatattaagcaataactggtaaaactgaaaggagaacaaacaaactcacaattaaggatgagtattttaatactcctctctaaataattgatagaaaaagtagaccaaataatcataaaggatacagaaggcgcaatcaacactcaactaaaatgacctaattcacatttatgaaacattccacacaacagcagataatggatccttttcaagtatacttgaaatatctagcaggaaagacaatatactggctatcaaatcagtctcaataattttaaaaggatccaaataatagaaactctatcctctaaccacagtggagttaaattagaaatcaatagcagaaagatttctttaaaatccccaaatatttggaaactaaaaacatacttctaaaacccatgggtcaaagaaggaatccaaaagtaatatagaagtattttgaactaaataatgaaagcacaacatatcaagatttgtgggatgtcactaaatcacttaaggggaaacatagcaaagaaaaagacaggtcttaaatcaatgatctcagcttactccctagaaactaggggaaaaaagagcaaattaaagccaaagtaaacagaaaaaagaaaataaggaagacaaaacaataaattaatataaatggaaattgaaaaacaatagagaaaatcaatgaaattgaaaactggttctttgaaatgaataacgtcaataaacctccaatcagactgatcaataaaaaaagaaaagagacaagtaatgaatattatatatgagaaaaatcacatgtctacagattcaacaaatattgaaaggatgctagtgggatattatgaacttcatacctataagtttttttgtttgttttgttttgtttttttgagacagtctcactctgttgcccaggttggagtgcaatggcacaatctcggctcactgcaacctccacctccagggttcaagtgattctaatgtctcagtctccaaagtagctgggattacaggggtgtatcaccacacctggctaatttttgcatttctagtagagatggggtttcgccatgttggccaggctggtctggaagacccaacctcaagtgatgtgcctgcctcggcctcccaaagtgctgggattacaggggtgagccaccatgcctggcccatacctataaatttgacaacttagatgaaacggaaaaatttctggaaagacacaaattaccaaacttacttgagaacaaatagatagctctatctctaatacataaatttaatttgtagttaaaacacttccctaaagaaaactccatgcccagatggcttcattggtaaattctaacaaacatttagtggaaaaaataataattatttatgaactctttcagaaactgtaaaagagagaatacttcccaacttacttttgaggccagcattatgccaatgccaaaactaaagacagacatcaaaagaaaaaaaattaaataccaatatacctggtgaacataggagaaaaattctaatcaaaaatttaatgaatcaaatataatcaaatagaacaatatatacaaaggataatataatatgaaaagtaggttttatcccagagatgttggattgctgtaatgttagaaaatcagtcaatgtaattcagcatattaataaactgcaaaaagaaaaaccatatgatcatctgaacagatgcagaaaaagcattagataaaatccattatcatttcctgataaaaactcaccagtctaggaatggaagagaactttcccaatctgataaagaacatctataaacaacttacagctaacctgatacttaatgatgaaaaactgtgtgtgttccctctaatatcaggaatacgaaaatgatgtctcctgtcaccacttatattcaatattgaactggaggtactaatcagtgcaatcaggcagaaaaaagaaatacaaggtatccagatggaaaggaagaggtaaaactgtcatattcccagaggacatgatagtcaagaatattttctctaagaaaatctaatggaatctatgaaaaactccactagttttggtaagtgggtttagcaaagttctaggatacaagatcaatatgcaaaaatcaattgcatttgtatgttctaccaatgaacaactggaaattaaaatttgttttaaactataattttcagtagcactgacaatataaaattctaagggataaatctcacaaaaatatgtgaaaaatctgtacactgtaaaagataaaacattgagagaaattaaagaaaatctaaataattaggaagatatgtcttgtttgtgggtgagatgactcactatttttatgacatcaattctcccaaaaatggagtacagattcactgcaatcccaaataaaatcccagtcagctttttttagaagctgacaagctgattttaaatgtatacaaaaatttcaaggacctaagataaccaaaacaatcttgaaaatgaagaacaaggcaggagcctaacaaaatgtaatttcaaatcgtatcgtaaagctaaagctatagtaatcaaaagaatgtcggattggcataaagacagaaaaaaatagatcaatggaatagaatcaagagtccaggcagttttcagatactacacgaaaaacataattcttaaaagaataaattgataagttaaacttcataaaaatttaaaatgtctgttcttcaaaagacagtgctcaactgaaaagataagccacaggctgggagaaaatatttacaaagtatatatctgatttttaaaaaatcttttatcccaatgtaaaaagaattttcagaactcaataataagaaaacaaaaaatccaatataaatgggtaagttgtttaaacagatactttgccaagaagatacctagatctaaatggcaaataagcacaagaaaaatgctaggaagtattgtcagttatgagggaaatgaaaaatcaacatcacagtgaggaccattacacacccatcagagtgactataatcaaaaaccccgaccataccaagtaccgaagaggatatgaagcaactggaactctcagcaacttggcagtttcttgaaaagttaacataaatctaccataggggttggcaattccacttgtaggtatgagccccagaaaaaggaaagtatatgtccatacaaagacttatacataaatgttcatagtagctttatttgtaatagcaaaaaacctaaaacaacccaaatgtccatcaacagcggaacagataatcatattgtggtatatccatgaacaaataaatattcctcatcaattaaaaggaaagaactattgctacacattgcaacataagatgaatctcaaaataatttcattgagtaaaataagccataccaaaagcagaagagtacacactccataattccacttacataaaacgcaaagatacaaataatcagtagagccagaaacagatcagtagttgcctagagagtgggtgagagtgggccaggagggtggcattcctgaggaccatgagggcacttttggggtgacagatacgttcactacctctattgtggttatggtttcctgggtatatacatatgccaaatttaacaacttgtacacttaagtattgtatgtattgcatgtcaattaaacctcaacaaagctgttactttttcagtaataataattaaaaaaacataatgaaggtgatactcaaaaacaatgtctggctccatctaaggtctgataaatggcaactcctggtcttcattcaagagttctgagctgggactacagaggcagtaagatatgctccctgtcctcaaagattcctcaatgaggctgggagagaaacaagtaaaaagattatgacaaacgtaattgttttcgagtgttactaaattaaatttgaagatggtaaatggtatagggactgaacagtccaacagaattggaatcttcaaaataaaaggaagaaaaaaatcttttccttccctctctttctctgggtcccaaatagagatttcttgaagctttgtgattcagcattcatatcatggtctttttctttgttttcttcaattagagcattcgcatcttcctctcccacattatatatgtggtgcataatcttattttcatttgttttaccttggtgtgtgctttaggatagggaagatttgaaagtctggagtgatgtccctggactgttgacagaggccactctaagggcaaggactgatccctaaggatcctcactgagtactcgttggtgacaaactagtgtaagtgataagatgggggctggggcctgagactcaaaaacaggagagcatctaggcagaaggtgctgaagaagaccacacactgggatgactttgtcctttgggtggcagatggggggtctcttaggatacagtcagattgtttaacccagtgagctcttctgtgtgtcagaccctcatgctaggaactttagggaacctcagagaaaagagatcagcttgttcagggaatcaggcatgtgcatcaattccccaacacagcagaactggggtgaggctgtgaaaaaatcaccctactggggaaatacagaagtccttttggcagaggcaatgttaagcagatgtctgcaagaaagggaagtcctagacaatcacagattcagaaggacatggcaggtggaaagaaaaaccctgccaaaaccccaaagctaggagggaaaaataaatgcaagaaagaagtcactcatccatttgcagggatgacccatgagatatgaacgcaatagtaagaagtaaataagggtataaatgtggggtcagggtcatcctgcagagggctgcagcaggctggatgaagtgggcagatttcttaaagctatgtgattcagcattcatatcacagtctttttcttttatcatgcctttgttttttctgtgtctgaggagccaaccagaaggatggggacagtggtctctgagatcaggagcaccaagagagaaccagttttggggaggatggtgagtttggaaagaagtacgctgagttcgaggtggtgatggagcttccaagtggccaagtcaagaggatcttgagtcaagctggatctctggatctggagctcaagggcaaggtttggaatggacgtgagatgtggagtcaccgacttacactgacaatcgggaagaagtggcaagggcctgctgactatacctcctccctttttagaagtcacctcctcctggccgctgctgacccacagatcacctcttagagactcactctctgagaaaacccaggtgcaaaggttatgtgtgcatacccacatcatctgttaagcatcttaaaccatttccaacaaagtatgtgtgtgctttggttcaatgtctggaagaattcatgtaacaatggaagctgcccagcaacaaacacagtgcttcaagtccccatcaaccttggttcttcaagaggctggagagtcatactgatttttctataggagaattccctgcacaaagttcccaagaggccagacccacagggatcactgactctcctggcatctgctggaggatgtgtggagaggaaacattttacctcagctgctaaagaggctccaaaagccacccagctcatccagagtcaaggctgactgggcttgaacttggcaacatctaatgaatgacccagagaggtcctttccatcgctgaaactcaggacttaattgttgcctttgtcttttctctgaggcagacagggaaatgcttgtcaatgcaatttgctctacactatgtacattgacctgccttcaaacaaacctttgaagaatctattccttgctcagggcattgaggattcagtgatgagctgaatctggccatgccctcaagggactcacagttcagtggccaccttgactaatggttcattttgttttccacaagttcttttgaatcccctaccctctctaaggtaatctgcaacctaatcagtcaataaaaatattctttaaatacttctagcagatataaaaacacatccgctctccagtgtccccacagtagtgcccagaggcctataggaactgttggtaggactcacactcacaaagcttcctctgcgtgcaattatttcgtctccaaataaaccaggtctgtaatacgtagcaccaatactcaccagaaagaaaagagggtagatgtaaagaaagcaaataaaaacgtgtgccctcaagtgtttattctgaatccaggaaaatgcataaaacaaatcaaatacagaggaggaaactgaaaggcagagcctgtaaggaatgagagggagctgggggcacagctggagggccatgctggaggccccagagacacctgcggtggtcggggaggcacagacctgagcttgtttgaggaactgaacttcctccagagaagtggggagcagtttcaagaggtgggaagacaaggacccagtgaagcagctgaattctggagcatgttggaaagtgagccagtaaatgcctgcccctgactttctctttttctttattttcccccttattttatctctagtgattatataagacaaacaggaaggtggctgagaaaccatttgtctgtggctctatacttggatagcttaaaaactgagcaaagcctaaaatgatatcacattataataagaataacaggacttttgtgttcaattggggccatgctaaaaccggaaacagtagtcctgagtatagctggatcctaaggataagcctacttgtaatttggaaaacaccacggtccttaaccagaggctaccctggggtgcctgggtgaaagctttccaacaggccctaccttctgatagaagacttcaaaaaagtccctgagctggcaccaaaggccagcccaagagtattccccatcagtgtgcatacctgacccccactgactgacttcactgaatcagatactgactgtgagttatagatctttgccaaggccatgtgcatgaaactactgtttgatggaaaaatttggagccagacagtcctcaaataggatcccagatacaccattaatagctgcatgaccttgaacaagtgatttaacctctggagactctgttttcccatctgcaaaatgaggataatgacaaccgccacacagggctgttgatgaggactaagaaggtaacaaatgcactgacaagtgcctggcacatagtaggtgattaagaaatattagctggctgggcatggtggctcacgcctgtatccccagcactttgggaggctgaggagggcagatcacttgaggtcgggagttcgaggccagcctggccaacatgataaaaccccgccctactaaaaatacaaagattagctgggtgagctggcacacgcctgtagtcccagctactcaggaggctgaggcaggagaattgcttgaggcccgggaggcagaggttgcagtgagctgagatcacaccactgcacttcagcctgggtgacagaacaagactccagtctcaaaaaataaaaaataaagataaaaaaagaaatattagatgttgtcccttgcctcatagaaaaggaagccaagaaaggaggaagatgaggctccctggaggcccctcacatttggaggaggacacactcagctcagagatattcacaccatccatgtgcactgccgggctggcacagggtacactgctggccatggtgagacaccacaatcctctcagtagaagccgctccagtgtggctccaacaggtataccccatatctgactcctcctgatgacactaaaccctgggttccagctgccccagtaatgccaatgtgcctaccagtatggaatgccctaggggcaccgcacactggttagtctgaagttaacgccagccctgaagagtgagtcaagagggacagacagggggcccctgagggtgggtggggatttggagaaagaaaagaaaacaggttaggaatgtaaaaacggagtaattcttttgaagactggcaacagagaaacactggctatccagtttggaggattcatcaaaaaagtaaaaccagcatcagacatttgacttcagggccacatggaatgcatcgtttctttggaacaaagaaaactggactatgaagagccacagagaagtcagcaaaccccagagaatccaaacttctcaaggatcaaggcagtctctcacaggctctgaaaacaggaggcggcagtcatgtcccttctaattaccagcacaaccacctgcaccccacggtaaatggacggttactgcacgtccccagctgccctctgtggacatggagctaataagatgtgaattcatggaggaaaatctacgaaaagtggactttgcaagtagttacaatctgatactacctgcacaattattaaaataagccacccaagactatttcagccatattagcaaagaactaatgaggaaacagacatcataaaagaatgaattacctacataataaacctgcatcttccagaatgaagccattagaaattgatcagtaatttaggagcagctgaaggccatagccatgatgaaagcttgcaccaggaacacattctgagtcagcttttagtgaatatagtgcactgaggtcacacaggccaccccggtagtgctcctcaaaggatatgtgggcagaggggattctttgggaaagctagagtgtgtgatttcaggccactcttatgcaatgcctgcagcgtggaggaggccagggccagacagggtacaagtaatgaaaagcaggccaggccaccacgatccctggtgttgccattcctccctggggccaaactggtgggatggtcagtcatgggagagactttctatttactccctttacatgggtacacttatccctacacgtactggttgcacacacaaacatacttacacacacgcatgcacacacaaacacacatgcacatacaacccacacagcattcacacaaactcatatacagatatatgcactttcatacatacacacccaaacatatacatacacaaactcacgtatacacactcatgcacacacactcatacatacatacacactcacatgcacacataaaatttgcacatgcacacccctgtacatacactcaacacattcaattcacacacaaagacacatacacacttgtacatgcacaatcacacacatattcacacatacatttatacatgcacacacacacagacacacatatacacacacatacacttgcacatgcatgcacatacctgtcacacactcaaacacatccacacacatatacacacacctgcacacacacatccacgaacatgcatgttcacacactcacacctacacaccacacaactcatacacaaacacacatacacactcacatcataaacacagacatacacacacacacctggattcacactctcgcacgcatgtgcacaccctgcatacacactcttgctcacactcatgcacacccttaccatcttgcatgaaattcagccttcctctcctactcattcctttgccccaccccctctgcatcccaattcatgacctgccctaattgctccagcccctggctcccactggctgcctcacctcacctagcacacctcatccctgccaccactgccctctgacttttgacttcctcatggacccaggtcaggattctttctctcgttcccacctgccaggtgagcaccctgctaggtcaagttcaactctttgagtttttgcctgggctaggtggagccccaggattcacaacagccccctaagtcagaattgaactgaaaagaatcacactgagctttacaaggggctaggggctcagtccaggccgtgctcatcacatttctagagcccttacctcattcacaaagacccagtggctgtccttggaagccaggttggtctccacggcctgcagagagaaaaagaacgaacatgaacagaagcaagacagaagctggcagacacaggatgattgccgagacagagttttataaacattgttcttggagaatattttcctcacaaaacatgccatccccctggggcctgctctggctgccttagctgcaagaagcttcatctgaacacagacatctgatttcctgctctccctccacgcactcctgcaccagcccagagcaagattagacgcttgggttcctgcaggcagcacagggtcacaggcacaggcacaggcacagccccccttccctaggaatgcctgcaaacacctttctgcaggggcgcttaggggatgagtgttatcattactccaggctacagaatcaggaaactggaacgagggatttatgggggcttgtctagtccagctgtactgagtgacattcaggaagacagcagctcacagcagctctggggctccgagtttccttcagttctttaggatccatagaacaaagctctttgtagctcctgggccgtagccccatcccgtaactctctattagtgttttgttctgtttctttatggcacttgccatctttgtgcttgaatggctatcagtttacttatttcttattgtctgtctcctctgctagaatatttcttattgtctatctcctctgccattatgtcaaaggccatatctcctaggtcacagctgtgtcccaatagctgtaaccagcacacagcaggtattcagcaaacattgttgattatgcaaatgaagtggaaggccaaggcagacagaactcagttaattattttgtttcctgtatgtgtttatgagtgctttccctctccttcaattgaaaagccaacagattggaagaattggaagagactgatggtttccaagcatgtcctgtatgaatacatcccgtgagcaggtgccaagtgcttgctgagcctgggcactgagccaggctgactatgaacctggacaagagctatcagattggagtcctgtttttttgtttgtaatgtaattttattattccttttatcaaaaaaaaaatgcagaaacataaaaatgctcaacatcccataatcccatcccattaaaaaaaatatgctgacatagtgaaaattccccctttatccctccaaatttaccctctaaatgttgtttgaggtgtcaccttctagaagattttacagttacctccgcaagtaaatagctacaaatagatatcagacaagtgttttcattaaaatcagaccatgaaatacatatccagttaagactctagtttttgatttatcagtgtaacacaaatatctttcctcatcagtacacagagatctgactcactcccaacaaatgaggcatggaggtgtcggggcctgtgccaacgaccccacaaatgaccctaggtctgcatggtgctgcagcctgcaaactgtcatgcacagggtgcatctctcttgcactggaaagaaaagaggctgcaagggatgctaagccatgtacctgggtatgctacaaggctgtatcctgaagacactttcctcccctttctacaaactcagttaaccgggctctctccagagaagctgcaagggctaaagagccagagctcaaaggaatcttcagtcaggatagagaaaggaggacacttcagcgtggagtctcagccaccccatccagagcctctctcctgtcaacatgcagactttcagggaggtcttcaaaagcctggaagcactgatgaagaggtggagggagaagtggagacagggtgggctgagaatgctctgagcgcatcgctgggctctagctcacctcgattcccaacaattcaacatttccttgacactcatgtggaagacactggcaatactcttatcaaatgtgcacagatgcaaatctggaggatgtcataacatctcagtggctggaacactgaactgaatctaaagacttgtggtttagcaagaccaaactcaaagtcctacactcagtttccaggagcaaaaaggcaaatggggaaatgaagtttgaaagcaacactcttgaggaaaaaccaaaggggactgcctccacctagctgtcacttaaccactctggtctctgttccttcgtaaaaggaacagataacacttgccccttcccgtctcccaaggtatgtaaaagcacatcgctgggctctagctcaactcatggaaaggagggtgtgggaggagtttgttccaccccttgaagggttgacctaaccaggtcaccccacttgatgaaggacaatgcacactatagcccagtcatggagagggacagttaaagtgatcagggatgcttacaggtgggacaatataggtgtctttaaattgtcatgtgcaagagagattggaattgctctatgcatcctctgagtgttgacctacagccaatggctcccataatcagggaggcagatatcaattcaatataggagacaactttctgactttccaagtcattcaagatgaaatggggtgcctcaggagtagcgacgtcccatcccaggaagtgcctgagcagaaggtgagcagtgctctctttacagtgccgtgttttctaagaaggttgaccatttgtgagaggtaaagctttatcatgcactgacattcttcagcaatgattctccagtccggctgtgtttaagaacctcctagggagctttaaaaaagagggtccccaggccccactgctagggatcctaattcactggtaattgtgctgtgtctgaggtcctgtgctgtttcagagctctgaccctgcctcttggcttcaggggctgagagccctgcttcagaatatgtagttctgtgaatctgaaggtctgggtatacctgtgcaggtgagaggttctctgcttgtcctggaagaagccagcagtgcagacaacctgactcagttgctgggagaccccagggagcaggtgggagccttggccaccctaagaagtacttccacctagtatcagacccatgcagggaagatattggtggagacaattgatcagaaaaccccacaggacaactggtcaacttttctgtcctacttttcctcaccaattaagcatcagctaatttgttaagcctcttttccccacatggagataaatagtgcttttctgcagccttttccagagggtgccactcgcacagaggctgagatagatggagagaaggagaagctacagcagatttagcaggaacactgcctgcctccccctgtcccccatcaacccgcgccactccagcaattactggagggctgccagctctgtgggaagagccctaaatgctcacaccccagtgggcaatgtccctcccagcaccattaattccccttctaagtgctgcccttttccttttcctctccagctacaactgcagcaggtggaggcaagtcctccctttcgtctgcagagtgagaacactatagagagttccagcaggcaggcagagtacattggaatcccagttctgccacttcctggctgagtgctcctgggtgagccttttcacttctctgagctgcagtttccacacccataaggcttttgaataccaacagtgctacagggggctctgcccacagtccctgtgaatcctgttagcattttttattacactgactcagcatgtttgctcactcccaacaccagccaacacccccaattcaggctgcctgaaccctgcttggcactcacggtgccttggaatgcacacccctaaccaggggcccagagtgccacgaaaacaaatcccagctgccttgctccctactggggacttctccagagtgtgatctcagcttttcaggatggagccaaaatcaccttgtttggcttcctttatgttcctgttccaagtccccacttccctgctgtctttctttttttaagtccccataatttttaataaatcattgtcacacacaaaaattcatctccaagtctacttctgcgaagtcaacttgagacaaacacctcccacttagggttattgtgagagtcaaatgaaattacaggtgacacttccagcccaggaaggctctcactaaagatgatcagtcagcgcaaagttcctcccgttccttctactggagtctccagcctgctcttgattcgatggtctcttgaagtacacgtgcataatccctcattccttccttccttcattcaacagacagagcccacccaaccccaacaggccatcctaattctcctgggtaggggagtggaccaggagcctcatctctgccatcatggatacaccagggcaaaaagaccaacaatcaatacagctttgcaaagtggtgggcaccaccacctccatgtgctccccttcaaggcagcaggacgtggtgtttccctcccatcttggccacagtgtggatcgagctgcataatgctgtgggcatcagcacagaagtgatgacccggtcagacaagcaaagggcagcccctgtatcctgtgggcggggagggaaggggggccggccttctgctcagggtgggctcccagcaggtggggtggctggttccctgctgtctgcagttagacttctctcctgaagctagacactgtggctgagggacacaaaccccgtgggagctgggaactagggcccaataagcccaaaggaattgctgcggtggccagatgcctgcacccctctaaattgctgtgaatcccacgagacctagccaaaccactgggcccatctgcctggctcctgtggccatgatacattggcaaacacagaacttcagaagaagaattaaggatgtaagaagttgcaaagcatccagctgacttctcttctagccccttttgaatggaggagacagcagatgctgatggtggtactggcacatgagacagctgcgaggctgggtgcagtcagccaggggtaaaaggcacagctgagtgtccacacgtgtgttgacttatgtgtatatccacatcttgacacccacattccaccctctggaaagaaaagtgtgctgttataggcaaactccagctaaagaaggccgaaggcagctgttcttcccacgtctggggagccgactgtggaagggaatgtgtctccctgctcgagagcaacagccccaatctgaacctcaggtgccttttcccagtgacacccaagagctgagttgtaagtgacacaggacaccaacaggccattctgcaggcccactgagggccagaggacatttgggtcctgccctggccaccctgatctcacgattttcatagggaaatagatgtgggccacgtactggctcccagcttccaaacagactctgcacagaaaggagtccctgagcactgacaagaatgtcaagggtggaggcagctctcctagactggtgctggggagagctgacagctgcccctggaccatatggtggtgaggattggttctaatatccaagagcctggaaggaagtagagaagacagtgaggctgagcgcattggaggaggcatctccagtctgggtccccttcctctgtgtccttggcttttcactcaagactaagttggagccatttccaagggcgacgagagcttgcttttattaaccaccccccaagatacttcaatacaacatctcctctgctttacaacccacacacctcatttactcccaacaacttaacaagccatgcagtgttcttatccctgcttcacagatggggaactgatacctcaatctagactcgtatcttgcagaaggtcccttagccagtattcagcagaggttagatttgaactacggcccaactgtctccaaagcctgtgttctttcctttggtcatgctgctctctgaaagccccagataactgtctgaaaaagtttttgggtctgaacctggccccgtaacaatgggaacaaaatggtcttttttctcatatctgagaaaacaccattataagtcacggtgctgtccttctccaggttaacttgttctcataagcctgaaaccattattccacttgcatttcttaagtgtgagactgtttctctttatcttggcctaaaggaatagtaaatggagtggaaaaaacctccacatggaagccttccaaacacatccctgaggatttattttacaaagtgcaaatgccaccaattatttatgtatgtgttaattgttgaccacttatctaggcatccccccaacactgggagcctgagataatgaaagcttgtcagcaattagcatctttttaaaaccccaactctaacatttgggaacattccccccgtgaagcccagggcctggcactttcccaaggacagatattgagctcacgttaaaggcccaccgctgcctttgcaacaacatgtcatttaggaacaatgctctctgtgcaatgtcacccctccaaagcatgcaggagcgcaacgcccctccatttgcaaggaaggggtgtagctagctgcaggaggatggattatttgaagagcctgtttaaaaggaaatcagcaaagcagacaccatgaggcccgagttttcagaagttatgccgggaagcatgaggaaacccctaaagagcggttatcacagaactttctcagccaccctgtgtctcctgggggcctgcctgcttggaaaaacgtcccaagatgctgactcagctgcttctccttgccccagccttgtctctggagcctctttggtctttgtttcaccagaaaactgccctgaagttctcttcatctcccaagactcctaattctggctccatccttattcttagatcccactggggaatcttggatcccagaaggtctcttttccagtattttgtcccaagcctttcccaggagccagcccctccttgatggtcatctgttcccatctcacccatctctttgctcgaggatccttgaagtccaaggcccccacccttggcaggaacaggaaacaccccatctgggcagagggaaaagcagttgaacatgggggagtgcatgggctcaggtcactgaaggatggtggagacaaggcaatcactcccagctctaggaaagccatctgagaaagctgtatcagaatttaccctgtgaagcactaaaccacagctctgggggaggctgagagggctgttttcctggaagaaagctgaacctgcctcttaggagttcagggaaggcactggctgggaaaggctggaggggaaggctggttgcaggctgggggcaatcgctggcatttacagaacacctcatccagcccagaccctgagctaagccctctacacacgatccctccctgagtcctcacaatggcctactgaaagaggctactgagctgcagcctacaaatggaaaaaccaagactcagaaggatgaagtgattttcccaaagtctcccagaaagtcagtgtaaccaggcctttccaatgcaaaacccatatggtttctaccgtgttccactgacttgggcaccaagaaaagacgaaactcaatctctgcatgtttcataggtgtttggtgcaaaaacaacagctaagccagaaggtgattcaggcgacagtgatagtggtgactggatagtgggggcctggagagctacagggccttctgcaaaatctgatcctggtttccagagtttcctgtcaccccctttcaaaattcctggatcacatgcacctctggttgtcaaaggatttttttgcatatggggagtagcctctagtccctcactaggaagtgagctcctggaggccaaagcctggtctaattaccacgaagccacttgtgggacacagcacctggcagacagtgaacttcaaaatgtgcctacagaatgaatgaatgggtgattcacatttccagagctgagtagaaggaaggccaggagcataaacagaaaccttactacagttaaaaagaatatgaatgtacaggtggcctttgctttgcatggtgcatggtactctggtaaacaaaacccatgcatatggaactagtgtcctcactttgcacgaacttcattatacacttgatttttggttaacattgtgccatgcaaagttagtgctgcctgtatttgcaattaacaccccctttctacacatctgagaggatctgagaaagaaacaaagtgaacttaaagtggaggaatgcaagatgccctgacctttaggaggtgatggaaacatgatcaaattctagagcttttcctccaggatacaattgtttcttcatttgtactgagcgttgaacctcctgatgctagttcccatatatcatgcctaacaacatagtaagttctggactagtttggtcaatgacatttaaaaagatattactgaaagagagttcactggaagagagagtgttcagcattagacttttttgacattggctcagatctctgaaaaactattatgttgctatggaaaaacaagaaagaaagaaagaataattgactaaattcatgtaaaattctgatagatgtgaacaatttctagtaaatcattagacctccctggcctcagtccttcttgttgaccaagtctgagctcgacagccagtctgaactgccttccctgttcatgtggatggcagaagcgcccgctcacagccccgggggaatgaagattcattacagatcatttgtggatccttcagatgaaatagaggcagcttccagggctgtgcagggagtgcaatttactataataaaaagtgagaatatgctacatgtggacaatttataaggaaacgttaatatcagcagaaaaatgaaatggagcctgctcacaggcacgatctgtttaataagatcaacttggagaagtgaagccaggaggcgccaatgagtattggccaatggatacttggattttaatcaatggtccataatttccctgccacctggagggcacagaaaccaaataaggccccccatgttcttgttcttacaggcattcaggctaagtcctgatgggaggcaacggagcccagcttttctatccgatcttgtctcacagaggagcaagacattcaggcccttggccacatggatgctgtcacacaacttctttagaggacctggatgtacagtggaacaaatcacttctgagattatttatgcccaccctggtttggcgggggcagccaccagcctctgcagtgtgcactgtgaacaatctcatgactcggtccctgagggcaggggacacggccctggggtggcaggtggctgtgttgagccatttctcatacactctgctgttcagctccagcttcaggtgattttcaaatacaagcaaagtccaaaactgattagaaatgttttctcctccctcatactggagcttgagaagctgctgcctgcatccaaagaccaactccagggaccacagcaccagatactgctgaaggagggtgtggagccattttggacaggagagtccctccctcccagtgcagctgtcagtctcagagctcctgacccagagcgggtacatccgctgggagaatagctacaccttcccagctgctcaattaaagcattagcgctcaaggttaatgctgtgaccccttcaaatcatgctcatgcaagccacttctgcacatgaatcaaattccttccctcaacccaaatcatttttaaaagatggaaacatgtgaattcttcttaaggcaataaagttgaaagtagcaattctttaccaagctgataagagctgctgagtataatttgtattcttttttacgagcctgactttttggagaatggaatagaaagaaaaatatctgctttttagttctggagatataagcttcttctacctcatggtgctagggaggaactcctggcccagaaactgtcaggaaacaagtctctggatttgtgacacgggaaaactaggggaggtggccagtacactgggggagaagaggtggatggtgcgacagctggggcataaacgattgtttacctcttacctcggccacctgggcactcaatttgggactctggctccacagaaagtgactgagagaccacggggggctctgaggtcttagggagtaaggaagagaggatattgcaaattcagcaataaaagtgtggggagaaggaaactatttttagcatccacaatgtaaattttgcttcactttaagacagcccctctccaagcacaaagcccccaagcagttgggtcccagacctgggaatggccaagagcttagtttttccccaaagctcttggggacctcacagtaagccaggaaattgcatttggcccttatagaaggtagaaacagaatcagaaaccaaagatgcctgctcttagtcctcaggggtgtggcccacctgcccaacgcccaccccattgccagcacaaagcacctgaaaaggccccacccacagaatgacatggcttagagagaaaactgtgatacagggcttctaaggagacagtgtgcagaagcctggaggtgtgaaagggcattcgatttgtagggactgtggtggagccacatcctcacatcgtgtgagtgaggatttgaatctaaagttaccagatgaggcaaaaatcaattagacaaaattagccataaagatttcttaattcatggatatgaaatggtacagaaaacatcatttgtgtaaagaaccctgtatctgttcccctaacctttatcaatcactatttctctacagccctcaattagcttcattttcttccctgagtgtattaactaaatcatcacccacttacctagccctggtctctcaggccactgctctaattcaaatgctcagaccactttggaaactcttcctgccttgcaagttaggacaggaagtgtgtgggcaagctgaccacgtgagaagccctctagaccatgcatgcactctccccagcaggtcctggcacacaaactatgtcaggcttcactatgccgactgcctgttgaggcagatgtggcatcatctggcctgagaaccaatggactgtgagttaaatgtgcacatgatgcatctccactgttggtcaccccatggcttaatacccgaggtgggaggatcagtggcatgaggcatgagttattacctgaaacactaccaggtcccagtcaacagggtcttctgccaggcagcagagcctggcttttaccccataagctgcgagtttccagattgtgttccacaggatgtgagggtcttagaagatgtaaagtttcttgtaaaaaaaaaaaaaaatctgtgggaaagttggagatatactgcacttatatctccagcttgagaatgacaaagcatactaaacaaacaagtcctcttttcccagaaacttgtcaaaattggctatacccggtgtttatttttcaaacgaatctccccagaatattcactttctttgttcgagaaacacatcaatatttcacaggacactgaggttacaacaggaacagaatcaggtaaatggagatgcagacttgggcatccatggaaggaagttaggatggaagagtatggtcagatctggattccagataggccagcctggccatgtggaggtgaatttcacaagcgagagcattttaaaaatttgctgaaaagtagttacaatagtccagaaaagaggcaatgaggacgacagcagggtatggggcattggcccaggaagaaaaggatggagcttaaagcgtttagaaagaaaacattgatgggatggagtcataggttgaaaactgagtaaggtacaaggagaaaaaggaacctgatgtgacttccagatgcagctgcataaagacagatgctggataggctcaatgaggaagatgatgattcatcccactaaactccctcaggcagcaggaagttggagaggacaatcttaacagtttgggagagaccaggtgtggtggctcacacctgtgatccagctgctctggagaaagaggcggaggatcgtttagggctgggagcttgagaccagcctgggcaatatagcaagattgcatctctaaaacacttacataaatacataaagtttgggagagatgagtaatcacaggagcggacagggatagggcaagggcttcactcaggcaaaagggaaaggtctgcaaggataaggcagattatgcagcagcaaggcagcctgcacagtccccgtcctccagtgtgggaatcggcactggcaggcttggcctgcagacaccaagtcactccagctgcagaactggtgacctgtgaaggctgggagctgggccaaaagtggcacgacaggaagctccctttcccccttgcaccacgactgattcactattgcggagccctcacattcctggggacagcacagctcacatccagctgccccactttcaagccccagggatgtatttttaaaataatgagttatacacacaaacatacacctacattccctgtactggttcagggggttcccaggcctcactggaagccttcatctttatccttgtaaatgtcatgttactggaatcagttcactgctctacacaaaccattcagaatattttggaacctcttcttgtcttccaacattaccctcttcaccttagatcgtgagcaaaggtaaactttagcagactagtaccctgtttgatcaaccagggaaatatatgtgaagaggactccaaacctagttcttgcttttcctcttttgcttttaaactccttggatttcactgttttttcatctgcaaagtctgggagatagatagacaagactgatgcttgggtctcaatatgttcgaaaatgctatgggggcaggttcccaatagtttgaggaatccagtggtttgggagaaaaggaaagggtgtcccacattggggtgtgtgagaaacagttgtaggattttgtctaccccatatcagagagtctttggtgtgtggagatgcccattgtgtgcaaggccagcacaggacctaggcttagcacagcagatccccttgaatcttgagatagtgactcaaaggtttaactcactccccacgagaacagcagtgttggggtccaccgaaggtgtcttatccagactgacccagggtaacctcagcaacatctgttccatccagcctcccatggctttctgggcctagttctccagcattcagcccacctctgtgagttgaccagtgtcatttgaataaattacttttatttcttattaactccattctaaaactttatacaaacaatagggaagataatatttatttttaaaatttaaatatcaaaaactggcaagagccttgtgccgtataagggtacaatcaaatgttttaaaagggagaataaactgagtaatttcaaagcacaatgttacaattacagacaatagtttctaagcctattattctatactaaatcttaatttttaaaaggcagaattaaaagccttctattgacaaatggcagtccctggtcctaatgccactcccagtcctgctccccagaggcaaacacttataactctttcatctgtttctttgggatttacttccatatttcttaatcatatttaatcatgttcacactgctatacttggttgatcaactttagcactatctattatgttcctgatactgcagagaggacttaggtctcttaatcctctcatcctttcatttcccttcccagtatttccaatctacctgtatcacaatttgtaaattaaatcaaatgtattgactccattatggttatgatactattcactactaagccaaatagtagactatgattatattatttccttgcttatacaacttttgcttttttgcattaacaattgctctgacttgtagttatttataactacaaataacttgcggttatttataactacaaataacttgcggttatttataactacaaataacttgcggttatttttaactacaaataacttgcggttatttttaactacaaataacttgcggttatttataactacaaataacttgcggttatttataactacaaataacttgcggttatttataactacaaataacttgtggttatttataactacaaaattgttttatttatatttatagttatttatttgtagttatatattatattatatttataatataatgtacttttccaaatgctcaatgcaacaaaataagctttccatttccttaagccctggagagagcccattccagctctctcccttctcttgtgtggaccagttggtctccagttggatgagcaggggctgtcatgagacttcctttctgctctgctggttggattctctgtaactgctattatgcttacttttatcttgttttggtattttgactttattttttttttctgaagcccatcctaccacagaaacttcttaagcaaagattcacagtgtgtaagtttttgagtatttccatgtatgaatttttttaactttgctatcatattgattgatagcttcacttagtatagaatatgtgaatattaattcttcctcagaaatagcacctctccagtatcttctagtatggatgttactttttctattttatttttttagacagagtctcactctgtcatccagactggagtgcagtggtgcgatcatgactcacttcagccttgacctccgggatcaagcaatctctcacctcagtctcccaagcagctgagattacaggtgtataacactatgctggcctaatttttgcattttttgtagagactgggttttgccatgttgcccaggctggtctcaaactcatgtgatctgcaggccttagcctcccaaagtgctgagactacaggcatgagccaccaggcctggtgttactcttaagcatcctaatgccactttgattcctgttcttttcatgtcacctactctccctcctcccctttcctccttctccttttcctcctccttccttccctctccccctgccctacccctctacccagtgccttggtgtggttgttcttttcatctactttgagtaagagctacatggttgggaggactttttaatctggagacacatgtcctttaactctgaaatattttgttacttatttctctgatatttgccttttctttattttttctgttcttgctctagaatttctactagaatattaaactttctaaattgagccatgcatttttatcaacttttctctctcattatatacctctttgcctttttgctttacttcaattgaacttttaaaatttcagtcatcatgtttctcttcaattgctgctttgtgctccctgttctttttcatagcaacctgttcatgtcttaagggtgcaatattttttaatctctttaagactaataatagcatttttgaagttttctctttttccttacattatttagtttgtcctggatccctttggtatccctttgtgttgtactctctgtttcatataaaagacattcctcaaatgcataatgatccttaattgtcctttcatgtttaatatgaagcattaagaagctcattgaagggtatgggtgtgacttgtggatagggggacttcctgtcctttgcaatggaagattccccaatgtcagcatttggaggtattttctccagagtccttcagtttctccagaaaagactcctattatatcctgccagaagagagcactccagccgctggcatcctgggagcaggtcagaagaagcagccaaaggttctactatcgaacatgtcaatctctgcttaatttttcctggtttgtaccacctgcctaacctgggctttctggagtttctgggtgctgaggctctcagaggcctgccggcagaaccaggctcaccccacaatagtatctttattaccaagcactaacactgtaacatccttgcatctgctacatcagttacccttcttccatccacttttttaaaaattgagacagggtctccctctatcacccaggctgagtgcagtggcacaatcctggctcaatgcagtcttgacatcctgggctcaagtgatcctcccacctcagtctcctgagtagctattactacaggcacatgctacaaagcctggttaattttctttttaattttttgtaaagatggagtctcattatgttaccctggctggtctcgaacttctggactcagggatgctcctgcctcaacctctcaaagtgctaatatgagccactgtgcccagccctccatccactttctattttccaaaaactggccccaagcacctatccactgttgtctcctcttatgaattctttgatcttgtagatttgcaacactttaaccctttgccatcattttagaatagtttaggggagagcagggataaacatgggcaaccaatcagacttgtctaatcaattagaagtcaataaatccaaagtccatcagaagtcaataaattctccttttccttaagctaactagagcaggcttctgttgttgatgactaagaacactgactgatgcaaggtggctggaccagggcacagcagggatgagcatggcttgtgcaggggctgacagaagagggaaaatcggcagcaaaacaaaataaaaggaatatcgattttctgcaccaagcctggaaaactagctgagaacccaaactccaaaacttcttatatagaacttgctatggttcgaatgtatccccaaaaaaacatgtgttagaaacttaattcccaatgcaacagagttgagagtggggtctaatagaaggtgtttgtgtcatggggcaccatcctcatgtatagattaatgtcagcattgcaagagtggcttccttataaaagggtgagtttgactccctcttgctctcctgctcactctctcttaccctctcttgccctcctgctttctgacatgggatggcacagcacaaaggcccttgccaatgatgcagactcctcaactttggacttcccagcctccagaagtataagaaataaatctctgttctttaaaaaaaaaaaaaaaaaaaaaaaaaaacttattttagattcaggggtatatacacaggcttgttatataagtaaattgcatgttatgagggacgggtatacagattatttcatcacccaggtaataaacatagtatccaacaggtagtttttcaatatactacctaatatcaggtattctgtgatagcagcacaaaatggactaagacataacttattttcatacactttggaaaggtggaccttctggccagactttgggataaaacaaggaattctctgctccaatcttcaggccctggaggctgtttggggctgtgtgttctttggaatcaagcagtgaaacagacacaacttcatagagaattcttgatcaagcccacaagtccattttgggcgcaggctcgatttatcacttctagaagggaagaatgtcaaatgcttatcctacaacttcattccacagcccatttatatgaacatacatcaagcaatccaaagaaagaagaggtgcggaaccatcagtaacctcgggattgacattatatcaacaggatgtgcatgagggctggagatttataatagtctgctcaaagaaatagttcaaacatactggctcactttgatcaacacatctttctagaaggatgaatgatttaaaaatgtacagaacaggagatctgagctccttcaacataaatataggctgagggtttcctaggtaccctgtcctcagtgagggtgaatttgcaggcaagaagggaagccactgatgctgtctctttcctcaatcagattgggctccactgtggggttatgtagggaggaacagatagtgcatgcagtctgtggatgggcaagctgtctggagggacctctgacgggagaagtgagagcaagctggaatagtaggaatggcttcatggaggtactgggctgaaagagtgagaggtttgggtagacctaaaggaagaagtaggtcattgaaatcctgtgaagtcaagaaagagcaaaacatctccttgccctcaaaaataacgtaagtataaagaaaagttactctgagtccagtgtgcccaaagtatgccccaaaatatggaatggaagaaccctaagctgcagagattggacacacacacacacacacacacacacacacacacacacacacagagcaaagataaatagctcatcaaaatgacacacctccaggctagctgtggattggagccagagtctgggctatattctaagagtctagattcacatttagtgctctgggacaaaaatcatatgttgttctcaacaaaaccactttacacatcactttcagtacaaatatgatgaaaagtgcctaatttgtcttctttcctaatcctttttttgtaaaatacctatgtcttttagagcagaaaatgaagttagtatgaaaagggcaaggagaagccacaagcagacaggatgccagtcacgctggctggggccactgccaggcgtggcctgagtgccaggcagctccaggagggaggaggtgagtagggacctcctgcctcttcaggagcaggttagtaagcactgatccccacccacaagtaagtcctgtagactttggttgggataaagccacctcggtactttaaggcctccagagcttttctggttattttcataaagataaattctaaagaaagttcatgtcatggaaaaaaagaccaggtatagacttcatagaagtaagtttcacaaagtcaagagcaaaagcatctaatattgattacatgctgaccatgacgggtcccggctaacagctctatacagattacttccctgaatccttacagtagccacttcatcaggggtactattgtctcagttattaaagatgagacagcagatgctggagatgtttccttattcacccaagatcatacagaaaataagaggctgagccagaagaggatcccaagtctgctcgtggccaaagacccctcaattgcctcccaagggaaactgaggcagggtgagaggtcacctgaagaaggtagaaagcctcagagatggagttctgacctaaagattacaaatatcctcccaaaatcaccccagtgtggctggacagggagctctgagaaggatggataaggttgcccaacctccgaacagaggcagcctggagggccagtatacacgcagagtatcagcctgaccctccacatgcctcagagctgggacatgggagctgctttcgagtgaataacaagtatctgtgtgccaggcccagccaggaccacagctcagcccctctgtacattcaccctggcaaaagagccatggggacatcaaaaacaccaatcatcatagccaattgcatagcaatttctatatgccaggcactgtactaagtatgcttcatatgtcaattcctttaatcccctcagcaactctgtgaggtaggtgctgttgttagctctgtatttcggatgagtaaacagaggcacagagcaattctttcacttgtccaaggtaacagagctagatagtggtaaaggcctaaatttcaacctggcaatctggtgccaaaaccaagactctaaactctctgcacactaccttgccttataccaagaactactctagttttggcatgcctaataaatatttatgaggacctactatgtgccagagccagtgtatgagctgggaatacaaacataactgatatcatgcctacctttcagggtccatcatctgcaacacagacacatacacaggtataatggtgtaggggttctatggaggggtggggtgcacaggatattatgggaccacatattaggatacctaactcaacttcagggagtcagggaaggtttcttggaacagatgatgctgaactacatcttaaaaattagatggaagttagctagaaagacagcctaagaaacaccaaattttaattcttctaaggcttttaagctctgccaagtcaaatccctgggaagctctaagcctggatgatatcatttcagctctccatggaaaaattcacaccaaactagaatatcacactgtttatgcctttggcttccagccagagctgatataagaggcagccacatgaatcgcatttgcattgtttgtaaaactgcaagcaaagacactatccattatgttgttctatgtcccttatctagaaactcatgtgataaatgccttctaaaaaagcaccaaactaaaaaaaaaaaagaaaaagagaaaaaatagaagcctcactcccaatggactggcattcttccttatagtaagcattgagggtcatgcattctatccagttctgtttgttgccttgcctactgggaagctcagagcagagggcaatgttaagagcttcctttagcctatgttttttggcataaggatccctttgcccttgtttacttgcctctattttgacagaaaaagtggacatttaatatttttattgagttattttgatgttcaattaaaaagtatttggctaagagacggtgagttttagaatgccattaatacaatctcttcttgcactaagttaaaagagcagttattaagttaattttaattcacatttgtttttcaactcaatagaatttgattttataaattaaaataatgcttttgtttcctagatgtggccattacccaattttactgatgtgaaccaagcccagaccgacctggagagcagcttctggaggcaccaccagccaatatcctggtttgttccactcaaatcctcacccaggctgttttcctttacatgagaccagtggttttcaaccctgcacatctgattcacctgagcagcttcagaaaatcccagtgtccaggcctcatcccaacaattctggcttaattagtctggggtgtggcctggacaagcattagtacttctaaagaagagcaaagatgctaaagataaagatggcctgtgcaacaagatgtgaaaacttcccagtctaacgtgaaacacagatgcaggaggtcaaaatgtagagcagcctgggcccattttcagcaggggaaaaaggtagcaccttctgactggccccggtgggcatcagaaaactaaaactgttattcaaaatacccacctgtgttcatcagaaaaggaccatttctctctgtatccagccgagtagctgtgttgaaggtatcacctgccctaccctgtctcatctcagtcttatgttctgctcagagttcaccttgtggttgacctgactatattatcatagcccattgctcttgagggtctcccctcttaaactgtaagattctagatgataggagctgagtttgattcatttttgtaaccccaatgcctaaccccatagcttttagccaggggcaattttacctccactgccctcctcccactggaacatttggcaatgtctggggacatttggggttgtcaaaacttgaggtgagggggtcaagggtatcaaatgggtagaggtcaggaaggctgctaaacatcgtacaatgcacagttctgcccccaccacaaagaagtgcccagcccagaattccaacactgccgaggttgagaaaaccagggctagcttaatgttcaacacaaagttgacactaaatatcagaaagatattcacatcaagaagtttcttcttcccatacttattcatcattcagataaggccaatgtgatctatcaacatctagactctccatcccagatttattagctatctggtctcaatttgacaagcctttgagcttaatatattctacaaagccatcaaccaacagagtttcttccagaggtatgaatgcctcctttccaattatgatcccaaagatcttgccagggggaatctggatgggagaatccaactctctagggcaagttctccaggaaaatccacctgaattaaggagaaaaatacttggacatattttctataagtaagacccaatattgagggaaaagttcagccacagccattcctccctagtggattaccagcatctaagtgctcggatggggtcagagtccaccctctactcttgccctgactttcaatacaacgttctccaatttttcatcttatatatttcaaaattagaataacaatgagataaatcaatatttttatttgagcacttactatatgctgggcagtgtgctcagagttttacatggcttgtctcccgtaactctcacaacaacgctatggggtagtttctctcatggttcctattctacaaatgagaaaagtgagcctcagagacatcataaaatgccacgatacaaacgagccaggatttgacctcagggatagtgagtaaacatgctgaaaatatacaaaaggctctccagttctaatcaacagtattctgggggccaattaaaaacccagtcctctatgggtcatcaccagtaacaatagattagaaacaggccagaagctaatttggccagcctctagctgggtaatcgcaggtagtcatttaacctgtgatttggaaagctttaaaaaattacaacttgataataccagcaacaacaatctctcatattcaaccgaaaaaagtcacatgaaagtatattaagtaaaatccctttttaaagttaatttcttcaaaataaattaatcaagtaaatttgagcatagttgttcaaacctgccaaagtttgattagtttgtaaacggatgctgacacttgtagcctcctggaaaaccaagccttgtcaaatggttgtccctggaggccaaccctcagcaggtgggtcattgctcagtcccaggccgcctggtgcctggtctgtaggacagcctctctgccagcctacctggactgcctccgggggacccctgattcctccaacctgagttcaacaaggaggtcaaggtcaagtctatgcttccccacctctccctacccaagtaggtcttactgggccccatgatccaacagagattgctttcttattagcttatagacaggatacaacctgtattagctctttattgatgctgccataaattaccacaagtttagtgactaagcacacaaagtttagtgatttagcaaaaacctacaaagtttggtagagtagatgtctcactaagctaaaatcaaggtgttgacagggctgcgttcctgtctagaggccctaggatagagtgtgcttctttgccctttccaacttctagaagccactctcattccttggccccttcctccatcttcacaatcagcagcaacacgtctttctgggcctttcttggggagtcatgtcttcctctgactctttgtctccctctcccactttcacagtcacttgtgattccattgcgcccacctggataacccaaataagttccctgtttaaggtcagctgattagcaacagtaattccatctgcaaccttaattttctttcgtcctgtaacataacatattcattggttccaagagttaagacagagacaggctgagtgtggtggttcatgcctataatcccagcactttgggaggccaaagtgggagaatcacctgaggtcaggagttcgagaccagcctggccaacatggtgaaatcccatctctactaaaaatacaaaaaattagctgggcatggtggtgcacacctgtaatcctggctacttgggaggctgaagcaggagaatcgcttgaacctgggaggcggaggttgcagtgagcagagattgcaccactgcactgcagcctgggcgacacagtgagactccctctcaaaaaaaaaaaaaaaaaaaaaagagagagagagagacagctgtgggcagggggcattgttctgcctgccacaactcttagatgtagtagcaaactgtcagaggaattatcatagtagtttcttaactgaatgtgaatgccttttgatgggacatgcctctccagttggttcagtccccaagactctcttgttttttccaacactctgctcttatttaccttctctgtctggcccacagaggcagctgagtttctaacccatgtgtagtgaatcttcaaaggagggcccatctcacttagcttcagctctgctcttaggaagctgagctgagagtagtgatatcatatgcagacccccagagctgctggcaaccctctccaaagctattgggatgaataataaatgcagattccagggtgcacacactgatgtggcttctgaaaaagaaattggagaaacatccgtttctatcgatgtctgggtgacttacagctctggaaatatatctatggaatgatttatctgaattttatagaccctaggcttctcccaaccaaaacccagttactgcttccataataactcatccaatggattgctttaaatttaaagggtgcagggagaactttgactgcctgcaatgtttaaatcttgtcttctgtggaggttctgttaaacttctggatggcctggacaaaagcactgttgacccatggggacaactgggttcagtggcatgggaaacacaaagaggcagagccagaccctggctgaagaaagcatcagccagaaccttggagaggagaagagaccgaggcaggggctcagggtgccaaagcagccgctcaagctccaagagcttcctcagaagggttgctataaaccaagactgactaccaatataagaaccattctgcttggggaaggccagatcacaggatggggagactggagaagaattgtatgtattaaggacccacatatatcaggtgcttttcatcaatctgtgatgtgtgatgtgtattcatttattcttcccaccttaggagggttggtcttcataatcaggaagatataggttcaaatcctggctgcactatatgccagctgggtgtccttgggtaagttatttaacctttctgaccctcgttttctcatctgtatttagaaattatagtctatacctcacagagcctgaaccttttaaagtgcatttttgaagaatgtttaatagcatgggaaaatgctcattaacagcattaaaagaaaaaaatataggatgacacacaaaaaccacataactctagttctgtaaaaagaatatatacatgttgaatatatgcatatctatatgctgtgaacatatatgcatagacagatgaaagaaaataaataaaactattaacgatggttatatctacatggtgggaattcagatgatttaatttttaaatgtactttttatattttccaaattgcctacaatgaacatgacatactttgaaatatttttctagatttgcatttttattgcaaaagtgatccatgttcagtgtaggaaattaaactttgttaccactgggaacagcttgttatgaattcttccagatgtttttctgtgcctatctaaatatatatgcacaaggcatgaatttcacaggtcacaaattcaggaggtgtgcaaaagagggcatctttagttttttgtgattgaattttatttctatcccaagccccattccacttagtggcagaaacgtaattttaagcaatggaaagtgagatcaggcaaataagaatgctcccagacaaataagagttttccctgtggctttaactgcctcctgtctcctacttctccctggaattgcatcttcatcctagggagcttacacggtgctgaagtgtgcagtggggcactggaggggtcatctttccatgctagcttgaacctagatatacttttcccctgccctccgtcttcaggatctatcccaactaatggactcttagatatccaagtttctcaaatgtactgatcaacccaagccaaacacactggggcacccctttctcagctgtgagccttcttctggtccaagagacttgggtcctcagtttctcaaagtccccctcaaggggacacgtggaaagcttccagatgctatcctgtgctcccctgggaggggcactcacaggctttctctgtctagacctgcctcctacccccaccctgccaatttctaatcttctgatgctgcctatacctggttcagaggatgttggtgggggtctccaccttcacagagttcagaggggtctctgactcttatgtctccaactgtctggggcctgtgatccagaccttccttccccacactagggggatccccaccctaaagatcacttcacagatacccatccaaaacttaaatgagaacactcagattctccacccagcttcctctccttcctgcagctactgtaatctttatctcttttgcatggacctggcggacagtgagcctcggtgttcgtgttcaaggtttaagacataaacctgatgccaggggtcctttatctctgccttggaatggagactatgcaagccttctcctcaaatcaatgtctctattatagattacaaaagtctattttgaaattccaaagctgaaattaacttttgtcctgtggtcctatgtgttgcctgaatactgggagaggagaggaagtgaggcatagaaagaagagaaaagagcagctgttcatattcaaaactattaaatactacacatgtctttggttgtgtgaaataaagatacacagcttagtaatagtatgacagtagaagcatatcatacatactttctacaatattcttatcaccactgaaaaatatgcctttgagttattgggctaataaattctttgcaatagttgaaaactattctattattccattttgatatctaatcatttgtttcaaaaatagagttgcttccaatttttcaatatttaatgcttcaatgaacattcttgtgcatatctcttgctcacttgataaactatttctggcagataaattcctagaggaaaaattgttatgtcaaaggatattgccaaatagccccctaccaaaaaattatatatgggaactttacagaaataacatttgagttctgtgagggaaaatgattatttaataaggaaatttaataaagaatgctggaataaatcaaagatatataaaatatatgccatattttttaaaactatatgccaaacagattaaagctctaaatggaaataataaaatatctatactgggagggaaaaaaataccagaaacataagcattacctcaccatggaactaggaagaatttcttaagccagatcatctttaatatagtgaaaaataccataaagcaaaaagataaatgaaagattagagaaaatatttgcaatgtactgtcccttgctatacttggggattgaatctacccccacctataccaaaatccaggcacacttaaaatcacagctggccctgcagagcccacctctatgaaaagtcaacctatgtagttcaaactcatgctgttcaagggtcaactatacatgccaagcaagtggttaatatcagtaaataaagagctcctttagtattaataagaaaataaaggagaatggggcaaaggattgcaaaagcaatgcagagaaaaagaaattgaaaaggctaatgtgatagatcgcaaacaatggccacacgattctccctcccatcaggagagatatctacttccccaagcccggagtctggattggctgtgtgacttttttggccaatgggaaatgaacaaacataacctgagcagagactttaaaagttctcagcactggggcttgtcctatcttgctgctctgaggaatcctgccacagtagcctgtgaacagtctctgtctagcctggtggattatgagacacacatggcccactggcctccattgccctagccaacagccacccaactggcaaccacagggccacctaactgaccagtagctgaccacagatctgtgaaggagctaagccaagaccagtaacagaacttcccggctgagcccagcccaaactggtggcccacagaattgtgagctaaaataaatggttgttgctttaggccactaaggtttggggtgatttgttatgcagcaaaagcgaacaaaaatagctaataaacaaataaaaatgtgctcaagctcacaagcagcaaatttaagcatggtattatttttaacccctcgaattgacaaaaatgaagaaaaataataatttcagttcagcaaggatggaaagaaataatatttctagtcattgctgagtgaaaattgctgcaaacatatctgaaaagtaatgtgacaatagctattaaaactgaaaatacatatagcctttgaccctagagttcgactttgagaaatttatcttacagcagtaaaaaatgtataaggatatttattggcatattggctgtattgggggaggaggaatcatcaaagaaaggaacggagggaggtagtgagaaagaaaagaatggaagagaaaacctggggcaaacatgtatatctctcaataggaaaatgcttagtaaaatgtagcatgtgcatattatgggtcactagataaatactaaaggagtaaattagacttacatttactaatttggaaagatgaatgtgatttactgtagagttttttttttaagtaagttacaacgtaacggatatagtacaattccattttttctaaaataaaaacgatgatatagttatatgcgtttttgcagaatattataatactgacatgttttcattttactaatttcttttatacagtggccctcctaaagacatggaaataatgggtaccccagcagactatagaaataaaggttaactcatggctttgagtttcaaatgctgaggtcctcatccaaactatgactgccaagcatcctaaccatgaacacctatcagcaaaacctttgaagcaggtgctccgttatgtgtatacttaggtatttaaaaattatgcacatgaattactatagattataaaacatattagaatatataatacgaaaagatccaaaagaagaaataaatgattttaataagttatgatttactgtgattaatagtacaaaatctttttggtataattaaaaacatatatgctccattataaacaatttaagtccagcaatgtaattgaaaatgctttaattttttttaaatcttggtttaaccctttgtaatacagtaattcaaagcctgcttccagtttccatttatttcaatacttgattttaatgggtactgtactgtagctgaaagtggtatctgtcagatttccatatgtccaaactgaagaagttctttggggtattgcttcctcaatcttagcaaacagaatttgtcaaaaagttgactaatacatttccatcttcccagatacttcaaacacactaaaatttcatgtttttagaaagtcatttcaaagcacattgaaacccttcactctgaaaagttcctacacatgggctagaaaattctgtttcccaggtttttaggatgataaaattttcatagttttcataagcactttcaaaacatcctgagatacttcactgtggaagttttttatatacggattagaaaattctgtttccaaggtttgttttctagtaagcagatataagggctttaaattattatttatgagtgacacatatggttttcagcaacaacaattaaaaatactggaaatatttccgaccattcattttcaaaatgctctcttgaaccaagaatttacttcaaaaagcaattactttcttatgaattgttaaaacattgaagggacagataaaatatgtttaatttttagaagagtatctgccaggtagcattcaattgacattatctcattattacaaatagggtcagcaatcctcaaagtttgttttttaatgagagaaaaatgtcttagcatcaagtcccagacttttaagcactttgccaaaagatcaccagtgaagctctgggtagtacaaaagatttcaaaattttctccccatttcattacaaggtactataaagagtctgccattgaaaggtcttgtgttttaaaaagtaatcagctaatggtatctcatggcagattaaataggttgtgctcaatgccctgagaagacaagcagccaggtaaggtcactgctctgaaccctgctcagtgtccactccattcgacccaagtgtcaactcgtgttaaatattaggaagcttcactcctttgctttttgacttaaaaattagaaacagaagttctaataattttctttgacacaccaaggaatcaattgtgtaacccactttggaaatcactgctctaaataatttattcgggaaaatacttttgatgccatgaagagagaaaaatgctcaggcaaaaagagatgacatgagagacttgagtaacagagtccagtgggggcttggaaagggatgctgtccctgctcccagggccaaggccagccccggggattgcggggggaagaatccccaggtcagtcttgggcggctctgagaaattgtcttcagtttcattttgcactgtgatgccaacaagcccagtgttctcaagcatccaggaaggtagacataaggggcctcccagaaccccacccacactccccagtgtggcctgtggagctgcctggtgacctgagagtcagggacaggccaatagtaggtgaatatgagaagcacacagtcataagctccaatggctcacaatgcggaaatgtggatgacttggcaaacacagcaagagagacaacagcaagtccagaaggaacagtgtatggctcagaagaggcgcgacagtgatgacaatgaaccagggcagtccccaccagcactgtccacccgcaccattattctcactgccaaatcagagaggctcctccaggagaaggggacaggggaaacacagcatggccgtggctgcattctctgcccccacacagaaggggaagtgcaaaatgaaaattaagttccgctgcagtcaaaaaaggctgtgttgtttccacttctgaatttgtggtttgaggtaagtacccaccacatgcattggtaccttgttacccacacagagctgtgcaaggatacactccaagctgtgaacacggagcctgggactggaggtggtgtggggtggggagaatactgctttacacatctttgaactgtttttcttattataatggccatggataactttcgtatctcagataaaatataatttaaaaatatgtatgtagagcacgtatgagcaaggcagccagttttgggaatgaagctatggctacagattcccctagaagacccagtcattgtcccaggggcactgtggtcaccacagacccacaagtgcacgtccatggagagtgtcgtgactctgcaggatgctgtgccagagaaaggcacacaagaagcagcacctgatgcttcagtcaacttcacagaattttctaaaaaatgcttcgtaaagaagaccaccaaatctgctgagaagagaggatgctgaagaagtggcaaaagcataaagccacgctatgaaagccttatttccttctgaaggggaaagaaagagggtcagacgtcccaatacactcaatagcctccttcgaccttgttcttattttgttcggtctatccccagaaatcaaaggagagcatcttggatatgttgcaaaagaattaggagaatgttgaataacactgcaggtgataagcaaccttacaataagcctaccaagctgaggaaatttttgaaaatggtattgctttgccaggttaaagcctaccataggagaaaaagaagttgtcctaaaagcaatgtggtatcttagactagaactgagagcagaaaagggacattagtagaaaaactagtgaaattcaaataaagtcttgggtttaaatagtaatgtaccattgtcagtgtcttcgttttgacaaatgtaccatggcaatgtaggatttgattagatgagataatcaacatcaagggaaactgagtaaggggatagataagaactctctgtccattgtttaatcatctaaaattattccaagtgaaaagtttatttttaaaaaacagagatacttgccaaggataaaacatctagtccaaggaagaggaagatgaggatgaagtggttgaggatggagttgaggaattaggtagtccttttgggaagctgcattgtcacctggagtgacaatttcccaacttagaagatgttctcttctctgaaggaattaactgccctacacacatctcacttggttttttaaaaattgaaataataaggatgtgtagataatttttgtgtagtaagcctagtattaagattaaaacattatgaacctatcttttagaggtatttgcaatagacactgactttgtatcttacagtatggggctgtaaattgacacagaaatttaaagcaggtcacatataacacaaactatatttggagtagtagttttgtttttgatgcaacttgtattaactcttctatgaacttaataccagcttataattgcaagaaaaaagatcctgtttttttgacattctgaatgcttctaagtatatacagtattttcaaattttaataaaaacatgtgctttaaggaaaaaataaatatatgtaaactgcttccaaaaatcttgaccattctgaaaggtaatacgatatttcattgttgtctgaattgatgtttttattattaagtattaactttataatcaggaacatgaacagaaaaatacactttaagcccacacaggaatacacaaactggagaggagagaaaccgtctggacatgatgcttaaatttgggtggagaggacaaaggaagcactttctatgggaacagaagacgtgcttctcccaggagggtactctgacaggtgtggggtgcgggaggggaagggcagcagatagccttttgtaccagggtgttgtattggtttttacatttttataacaacaataactgttattaaaataataataattgcaaaattttcaaaaaagttttagttgaaaattcctttttattccccaatctcatttcccagaagtaaccactggtaactgcatatttttgggcatccttccagaccctttctatgcatatataagaatataactttaacagaaataaatcagattgtacataatattgtataatttgcttctttttgtcataaaacaatacatcatgaacattttctcactctttgtgtatgtagacctaatccattcttttgggaagtggtattgcatttctttttatggataaatattcaattatttatccaaacacctattgattttcatttacagtgtttccaggtttttgctattatggatggtgctgccacattgtttgtgctctgatgagcacaatctttacatcaaaccttctaggcttccatcctggcatctccaaagactaactataattttgaacacattatttaacctccctgaaactcagtgaataatcactgagagataatgtctactttatagatatattgccgggattaaatgcacttatattaatgactaaaataaaattagcaaaaatgtctagttgttcccctgatatctatgtgtttcttgtgtgtgtgtctatagggagagagacagagaaaagagagatacatataaaaagagagagagagaactatagggatggatggatggatggatggatggatggatggatgcatggatggatagttggatggatgggtgagtagatggatggatagatgggtgactggatgataaatggatgggtagatagataaatagatagataacagagagagagagatacctggtaggtaacaaagcctagcatcaaggctaggaattttataaattaatgatcttaaatgaacttaaattccttccttttactttcatggaaatagggagcagacaaaacacagtggcaatgggaggtttacattcaactaaagtatatgcctgaagagccattaagcccagagcagtgcacctggagtgacaatttgccaacttagaagcagtggaggaaatgccgctattctggagctaaagagacatggttccggaaatggagtggcaagaacattgagagaaagtggtcctgtcattttaatagcacgtgctagccagagagggtacagctcagtgtaatcacaaatgtatcccagactctagccaaagagactgtgaaatgtccaaagaaaagcaagatgtaactccatgtcctaagacttttaaaaatgatacagctacagataagggaggctctgagaatccaagcctgaccagactgtgatcaatggtcttgtcaaggagcagagggggagaacatctcaaaaggcctgtaagataacaaaatatttaaaagtagaagcacatccttgcagtcacctttgatttgtcctctaattttaatcagttcgcaaatccagcaaacattatgccccgtacaaacttcctgccagagtgatcttcctacaccccgcttggcacaccaagccccttcatcctctgtggctcccagaacaaaggctacagtcctggtacagcttcagagtcctctcaaatcaggttccagccggatatgcaccactcctctccaaatgccctgtgctctgacagcactgtcactgatcattcaagagtctccttccaggagtaatactgtaccatcatctgacttgaaccctgggcctggagtatatgtgggagacgtctggagttaggagcctgtctggcatccccattccattgggaaatggcccctgcaggactccatctggctctggttagataccactcactagatcccactcctatccccggtcattggatgtttctatcctcttgttcacagtgaccagcccacaggatggaaacatctcaagcaagaccaaaccaggtcactgtcttccttgggctggggctggcagttaccatcctgcctaccatgagaaccagactctgggctccaggagggcaagggatttttgtctggcatatagtacatgcatgtttgttgaattaataattgaatgtgatgggatggaatcagagcaaataaaaggacaagcagcaccagtgtgcagagggagttctaagcatgcaccctcagacctccccattaagtgtgctcacatgttatatttctgtatttctgcttatactagctttagctgggcctggagtataggtgggagacgtttaattggggtttctttcacatacaaccaaaacacacttccctactcatgatcaaaaagctcaaatctctccaggttcatttcgtatgctggttctcccatgcagtcttcccagatgctcccaggtcaagccaccctctatgccttatgaagtttcattgcacattatctcaaacttctagtaacatgtcttattttctacctttatctaaggcaatttatgtacacaactgcagcagacattgctggtgcccacccagacacaccccaggatccctttcgctggccctgccccagggcccgcaggtgctggctaaaggctcacgttcacaaccttccctggagtaatcaaagcccagaggtgcccacagggccctgttgccaccccatggccaatgctgctggagaacaaaagcccataggacactctgcagcatcacctgtgttcctgggggtgaggccgacgccttgcctgagtaggtccataccatcctccatcccatctccctaactcctttatgagcatctccctttctcaataaataaagtgctcacaaatctccatgtcaggccctgcttctaaggaacactatccgaagcactaaacattccatcttcccaaacaaacctttcaaaaacaagacttacgtcgattctcctttctgtctcttatagcacagtgcctacatgggaatggcatcctctaagaaacaaacaggaaggaaatgcaagaataaagacacaacagagcaattgaacagagttaataattttcagtaaacaaagaggggcacatgttacgacatcaacctgaaaacagcatgaggaagcaaactcctagaacaggctaaatcttcaaaacaattcatagaacaaccaaaaatagcctggttttgtttgttttgcttttaagatccatccagaggaaaagctagacatgaaaaaattagcaatgccatgttttagaaattattcttttattaatcctcttcagtgtttcccaaactcctcaactcatctgtgatgaaacaggcactttgatatcaattgcaatattactgcaatgccttcaggtttaagtgtgggatctgcaacaaacccattttttaaggagattttttgtgtttgtgtttttttttcttcaaggcttggctcactccccaaagaaagccttctgccacaagaggaaaagagagaaaaaataaagaaaaagaaacaaaacagggccttgcaaattgaacaacatctctatttcatgggttctctctggtatgatccccccctccaaaccaatgatctaggctattatcttgggagaactgtacacagttgatcctttaatcacatgggtttaaactgcatgaattcatttacactcagattttcttctgcctcttccacccctagagagcaagaccagcccctcttcttcttcctcttcctcagctactcaatgtgaagacaacaagggtaaaaacatttatgatgattatttccacttaatgaatagtaactatatttttttcttataattttatcaatagcattttcttttctctattgtaagagtataatacataatatgtataacaaacacagtatgtgttaattttttatattatcagtaaggtttcttatcaacagtaacctattcatagttaaattttagggaagtcaaaagttatatgtctgcatagtattccatggtggtacatatgcaccatggaatactatgcagctataaaaaagaatgagatcatgtcctttgcagggacatgggtggagctggaggccattattcttagcaaactgatgcaggaacagaaaaccaaatactgcatgttcttacttataagtgggagctaaataatgagaacacatagaagggaacaacacacactggggcctattagagggtggaaggtagggcagggagaggatcaggaaaaataactaatgggtactaggcttaatacctgagtgatgaaataatctgaacaacaaaagttatatgtaaatttttgactatgtagggagtcagcacccctaacttcaacattgttcaaaggtcaactgtaattgctaggatattttgtgagaagaaacttccagactatgtataactaaaaaagccttctccactttgcagaatctgtggactctataatattcctggcctcccaacatcacactcaattgcaaacccctctctgctgcttcagcctatgaggcgttaagtgcttaaccatttcacagtctctctgtataggtagtctctgatgtgcatgaaggtacaggcataattcctccccagaacaattcatgcacactttcacagaaaccctcacacagaaatatcacactgtctggttttaatattcatcttcttcttctctgccctgagttcctaattcttagtgtgggacaatgttttcctattaagctttttcccctaagcctcattacctctctgtggtagaaaatcattgcagttctttggctgtcttagcaggaaaggaaattaatttacaaaagagggcaaaataatctccaaataacaaatccttctgaacttggaatttggcacttcataatcaagtcaaatgagaggaggggagtctattactgtttaacaatttacaggagtgtctgaaactgccttgaaattaacaaacataaaatggtggaaagaaggggagccagtaggaagttctggtcccagaaaacaacatcatgaaatgccattaatgaagatagtacctggatagcactcaggacaggaggatggcaatagaggatgttcaattaaatatgaaatctaacagaaagaggtttaccatcacttctactataaatcaatgacttccaattattgtatccagcaagcatgccaagttactctaaacattgtctctctttatcctatgtcctaactatttaatggactgagagtaactggcagcaataggaaatcttcagaaattaagtctacatgaaagcctaagtcacaaatataggaaatactaatgttccttttatcagcactccaggcaaccaaaaaaagcctttatactttctttattataaaaggaatcattataaaagggccaaagatagatggcccttgatatatgtaaggaagctgccactaaatttgacaacattactgtatcatatggttcctcataagcagtgtactctagcataagcataaaatagcaaaatcaggcaatacttgtccttatacagcctcccaggtccttccgaactggcagaactgtgctaaacccccaaaatacagatcaaggcagtaaattacactaataagtgttgaagtagtgtgaactcaaacatttactaatcttgtgatctagaagaagtcacttaatccctccgagccatagttcagttccccacggtgttgtgaaatttaaatgagatcatggatataaaatgtcaaacccactgcagacacttgttgaacttgtgttttttctccttttctagtacatactttgaaataggtctaaaggattggagtctacaggtacaagtatacaaaaaatacaaaaatacaaaaaacatgccattgactaagactcttcccaatgctgggtagagcaggtgcagcatggagttatgagaaccaccggattccccctgggtgactcccagcttctgggaatgagattccagggcctgaaggaaagactccatctccctgtcccttggatggtgcagggaagaacttactcactcagtagaaactgagacaaagaagcttttctgcccttgctccagagtcccagcccttagggtcagcatcaagatggcgaacctgtagccatgattaaacaacatatggagacaccaagaggcccctcagaacctgcatcaggatagccagcctccagcatgcgagacaacttatggaagtgccaagaacctggacgcaatggcctcctctgggagtaaaatgggtggaatcagtggtagagggtccagctggcctctgcccggtcccctacctaggagggtctctgtagtcaaagcagaaacagcaggacctgagaacatgaattcagcctcattaggggtactatcctattcaaagatgtagggcatgttgaagggaaagtgcttccaggcctccagctgtgcctgggataagaaacaactagcaactgacagggttcaatgggtcagaaaggtctctttcgacagagcaagtggagactccaggctgtcctttctccatgattcatttagtcatcagacagtcagtcagcacctttcctgagctccctacaagcccacgctttgcccctgtctgccacagtcacagtggacagtgcagctgacctatgcccacagtcctagagtgggactcttccccttctgacccctgaggcttctccagctcagcctccaccagaggggagctggccattgtgctcccctcagccctttctctttctcaatttgataaggaaattaggatgtgacattcacagtaatttctcatgagcttgacccactcgagtcacctccaggctccctggcaaaattgattcgaggccctcaaagtggatggccatagtcctgatgtggttactcagggcatgcaatgtccaagcccctgggcagcctcactgggcagcctctttctttcagcactcattatactcatatcttgttttccaaatatttattcttattttaattttaacccaaatcatttcctgagtcagactgtaagccatggtgtcaaacggtttgcacctgctgtgcaagtcctgcactccaggtgtaagttccttacacctgggcaccttgaccacttgaatctctaattggctgtgccaactccctttctcaacccttcctattccagcaagcttctgctagcccaacctccccagcactctcttctggaaacttataagctgccaatgctcattcctttcaaagtttatgaggatatttccaacttcaaagaggtgagttacataaacgtcatatctttaaaaagtttaaaatagatgctcaggatttctcttttcaaatggggcaggtggggattaagtgcggttttgaccacaagggaccatcttggcctggtttgggctcatgcatgtggtctgattactctaagctacccaaacattcagtggtagcacaaggaaagccccttcacatcccagcactttgcaaactctaatcaaaaaagcctcattgagattaatggaaaatgccctttctcccatttaggagtgcagaacagagtaggcatgggaagcgtcaatttgaaatggatccagcaagaaccactgggctctttagtgcaagcaacagaaattgattctaattaaagttggggaactgttggaaggaatctggcaactcacagaatcactgtgtatcagttcgttttcaggttgctatgaagacagggtaatttataaaggaaagaggtttaattgactcacagttccacatggctgggaaggcctcaggaaacaatcatggtggaaggggaagcaaacacatccttcttcacatggtggcaggagagagaagtgctgagcgaagcagggaaaagccccttataaaaccaacagatctcttgagaactcactcattatcacgagaacagcatggaggaaccgcccccatgatctaatcacctcccacgaggtccctcccccaacacgtggggattacaattcggattacaattcaagatgagatttgggtaaggacacagagccagaccatatcacactgccaaagctataggatgaagctgggatgtgaggcagctccaggggtttggagaacaaactacaaaaataactttagagtagaaatggtgtggccagagtatcctccagcctcacacaccccatgaatgatttccagccaggtctttggtcctcaaatttttagagccccacgagaaagcatttaagtggccaggttaggtcttggtgttccccccggttgtattaggcagttaagaaggcatatctggcccctttggcttctgtaaatgggataatccccccagactacacataagggcaagatggaactccccaaaatgaaatcagagagcagtaggaaggaggaaaggatgaatattctccccggtgaaaatgcagaaaagagagtcttgacaccctgagcccacctggtagggttgcagcccatctagaacaccctgaatcccagacaggattggtacggcaagactccaagcctgctctgcaggccatgctctccctgcacccatgctgaaggtcagcagccacccattcccaggtaactcttcccctaagcttgggagaggagaggttaatggaaagctaggctggggatgtctatatgcctggtctggctcctcagggtgaacgtgacatggaaaggcagcctctgcaaacctggctgtcacctatcaaggtgagacaagctgcaagtaaggaccttccccaaattgagctacttttaactaaagcaagaatggaacacgtgaaactccccctaagggagtcgggagatgtgccagctactcagggccatgatggcaaaacccagcaagtggacaacaaaggcaaacctcacaggcccagggccaataacctctagaaacccctctgacccctgctgggtcaggtcaacctgggcctctcctggaccccacatgctcctttgtaaatattactgcagtttgaattttacttccatgagtaacttttttactgatgacagtctctctcatggcaccataatctcctcaaagataggaatgccaggggtaagtcacaaactacctgcccctcacccacaggtgccctgctacactgaacccatatgaacacactaaacaatacaatacccatctgtcacctcaaggccccttggtgacacctgtgattgttaattttatatgtctatttgactgggccacagggtgtccagacatttggctgaatattaatctgagtgtgtctgtgagggtgtttctgggtgagattagcatttgactgggccacagggtgtccagacatttggctgaatattaatctgggtgtgtctgtgagggtgtttctggatgagattagcatttgaatcagtaactaagtaaggtagatcacccccactaatgtaggtgggcttcatcccatcagttgaagatctgaataaaacaaaaagaagctgagggtccaggcgtggtggctcacacctgtaatcccagcacttcgggaggctgaggcaggcagatcacctgaggtcggaagttcaagagcagcctgaccaacatggagaaaccccatctctactaaaaatacaaagttagccaggcatgatggcacatgcctgtaatcccagctactcaggaggctgaggcaggagaatcacttgaacccaggagccagaggttgtggtgagccaagatcacatcattgcactccagcctgagctatgagagtgaaactccgtctcaaaaaaaaaaaaaaagaaagaaagaaagaaagaaaaagaaaaagaagctgaggaagcgggaactttgtctgcctgactgtgttgagctggggcattggtattttccaaccttcaaacttgaactgaatcctctttcagactggaactgacaccgctggctctcctgggtctcctgtttcctgactgcacatcttgggatttgtcagcctccaaaagtgcctgagccaattccttataatgaatctcttcttctatgtgtatgtgtactgattctgcttctctggaggaccctgactgatgcaacacttctcaatgacactcctgccctgtcctggccaaactgaaccctcctctgggaaactttggccctctctgtgacctggcaaataaagggaacaagacgaggtgcagcagggtctccagagtgttgcaccagtgccttggcagcatctgccttgagatgttcagggcaatgagttggcaaggacatccacctgtgcacccacctgctgatcctgatggagcacatttccatcatccaggagagttccctgtgcactgccagccagtctcccacccgcccccacccgaggcaaccactggtctgctttctgtagctcaagatcagattcactttttccagggtttcatagacataaaatgatacataaggtactctttttccggtctggcttcttttgctcagcataatgtttttgagattcatctttgtcactgtgtgtatcaccagattgttttctttaattactgtctaatttctattactgagaacatcactatttgtttatctattcacctgtcaatgaacatttgcatcattttcagttttttgctttttcgattaaagctgcgctaaacattcatgtccaagtcattgtgtggatatatttttttcatttcttttgggtaatttttttttttaagacaggatctcactctgtcacccaggctggagtgcagtggcacaatctcggctcattgtaacctccgccttctgggttcaagtgattcttgtgcctcagcctcctaagtagctgagactacaggcatgtgccaccactcctggctaatttttgcattttttggtagagacagggtttcaccattttttggtagagacagggttggccaggctggtctcaaactcctgacctcaagtgatccgcctgcctcaacctccagaagtgctgggattacaggtgtgagccaccacgctcagcctcttctgggtcaatatttaggagcagaatagcaaagtcctaaggtaattttatgcttagctttctaagaaacagacaaactgtcctctgaaatagttgcacaatcttccattttcactagcaaagctggcaaagttttaacatcactctgcccacacagacaggtggcgaagtgttcaggtgctgcctgcaggatgcagagtcaggaaaaggttgtgatcatatcatagtacagcaggccttccctggccaggtctagagccctctctttgctaaagctttataagctttctctagccttcaacactgagctcccctctgcatttgctgtgggcatgagagcatatatccacacagcacagccatgctaaggtagagagagcactatacatttccaccagccaaggctcaagggccggacctcgccctactgacctgtatgtctctccccttgaccccacctgcaagaatctctcacctgccttgcattaacaattgccgctacatgttggcgaacaaccaaatgaatgaatcaatggattgagcctggtttaatcacttctatcacggccacaccagccttgctggaattggagcactgcattccacccatggatgcaccattgtgagcactgacctcactcagggaaaacatttcttttgatctcttgagaactttcctgcttgttgctggtggcttcaggagggaggaggggcttctgcagaccctgctattaaccctggccttcaccctgaggactcacagagagaggctcggtggtagagtcgcacggaggctggcaaggagctctctgtggtgtctaggcctggagtgaagggctccagggccagtctcaggagtctcagaagtgggccctgccttgttgaatggcagtacatcctaagcccagatttctactctgaacagaacagagtgataataacacattcacagtatcgctctgaggatagaatgaaataatgtacatgaaagtgctttgaaaacactaaattgctccccaaacacaagcctcaattatcatgcggcactgggttctcctctgagcctgcccctgcctcccttcacagctggcaccaccaggcacattagctatgcccaacaagtctcccgcatctgtcagcccgggagctatgagcagatcccctgtagagcccaccagggaccctggtatcataagcacagtgaagcccagaccagtgaggaggcctcccgccacttgggtcctgaggcaaacgaaatcaactggcttgtgtccaaagacctcaggacccaccaaccaccgtctgtcctccctcccttctgcctttcttccttcctcccttccttcttccctttcctccttccttctttccttccttcctttttaccttctctccctccttctttcattccttccttttctgcctttcatctgtttttctctctttccctccttccttctcagcttccttctctccttccttttttccttccctgcttctttccctcccttcttcctttcttccttccttcccatcctccttctatctttccttcctccctctcttcccttcttccttctttccttctcctttttcccttccttcaggcttccctccctccctctttcctgccttccttcctaaggacaaaaaggatggaaggaagaaaagagagagagggaaggagggaaggaaaaggagaaagaacaaaggaagaaaagaagaaagaaaagaacaaaggagggaaggaagggaagaataaagaaaggaaggaagaaaagaagaaaataaggaagcaaaaagagcagaaggaaggaaggaaagaaggaggaagggaatgaaggaagaaaggcagagggagggaggacagagggtggtctgtggatcctgaggtctatggcttgggccactcgctctcctttggtcaggcctcctcactggtctgggtttcactgtgctcatggtgcaagggtccctggtgggctcctacaggggtctgccacccttcccttccctccttcccttcccggcattcctttccagcatccccgggttcattgctctcccctacaaagttgcttagcatctggtgactggatggaagtgatcttcccctacagccttctttcccaatttccaccttgcttctctacttaaggagacaacctgaagctgccagtccctaaaaatcagaaaaaagccccagctcagctgcatagacctcccaagcacctgacaaacgttagaactgtccaaaagctccacttgaaaatgatgcccagagaagttacattgcctggagccatgtcagcttcctaaatggagagggagggaagaaaacatcatcacagatgtgtccagcacaacctggcctcaaggcacactaacagctcccagtggggatcctagaatgcaagatggtggctcaagagaaaccatcttgatcaaggtgccacccttgccccagggagactgagtgtctaaagcactgagcagggctatgacaactgaacactctgctcaggtttgggaggtactgggtttggggagaaatttaaaaatttatgaaaccactcagtactacccttccagatatcctttcttcctaaccctctacacccatccttaattcaatacacaattgttaatcccgactctgggacaagctagggaagcaatgctgagtgagacttggttcctatgcttaaaccactcatggtttacagggaaagacaggcacataaatggataattttaaagtaatatgctaagtgctctgctaggcataagaagcaggttctgtgtgagcctaagaggagctgcccaacccagccagggaagtctggaagaatgacatgtgttgctgatgcctgaactggaggttatttctttatttacttcccttgctgtaactatatcatggattccagaacatgttcctggaggcagttgaaacttagaaggctcatggctttcttcatgggaacaagctacatctttcagccaaaaaaaaaaagattcttctgacctttctttcatatgaaattgggtttcgggtcccatggattctactactgaattatctcttcactccaacccttccttcctttctccactgccactaccttactcccaggtattgaccatcacctctctgccaagttaagaaaccagtcctctttcctaagactcccatcccatttctcacttaccctccaatgcactcgccacacagtggacagggtgacttttgctcacttccatctgaacaagtcagacttgtgctcaaacctctgctaaggctctcatagcttttcaaaaaaactctaacctcctgacaccaggcccctgatgatctccccatcctccactcttaccacgcccaacctgattccaaagcagcttcccaaatccgtggggttatttcatgtccatatgtataagactactccttcaccatgattctcctggtcacaccttgcctcaaaggtagatatagccactacattccttgagccattacttcaccctggtcatccttctatgtgtgtaacattttgttgcttttgtatgcaacttgtccctctccttttcacattatgagatgaaaacaagccctatatcttatttctcattctagcagcagcacctgacacagcacatgcagaaattacttaaaaggtcctcatatctaactgaaagaggatttatacatggcagagtaaggacttccataaataagcccttccataaaagaattaaaaaatcacaagcatccctacagcaataacagacaaacagagagccaaatcatgagcgaactcccattcacaattgctactaagacaataaaatacctaggaatacaacttaaaagggatatgaaggatctcttcaaggaggactatagaccactgctcaaggaaataagagaggacacaaacaaatggaaaaacattccatgctcatggataagaacaatcaatatcatgaaaatggccatactgcccaaagtaatttatggactcaatgctatccccctcaagctaccattgactttcttcaaagaattgggaaaaaacatgaaaaaataaatttcatatggaaccaaaaaagagaccacagagccaagacaatcctaagcaaaaagaacaaagctagaggcatcatgctacctgacttcaaactataccacaaagctacagtaaccaaaacagcatggtactggtaccaaaacagatatatggaccaatggaacagaatagaggcctcagaaataatgttacacatctacaaccatctaatctttgacaaacctgacaaaaacaagcaatggggaaaggattcactatttaataaatggtgttgagaaaacgggctagccatatgccaaaagctgaaactggatcccttccttacaccttttacaaaaattaactccagatggattaaagacttaaatattagacctaaaaccataaaaaccctagaagaatacctaggcagtaccattcaggacataggcatgggcaaagacttcatgtctaaaataccaaaagcaatggcaatgaaagccaaaattgacaaatgggatctcattaaactaaagagcttctgcacagcaaaagaaactatcatcagagtgaacatgtaacctacagaatgggagaaaaattttgcaatctatccatctgcaaagggctaatatccagaatctacaaggagctgaaacaaatttacaagaaaaaaacaaccccatcaaaaagtgggcaaaggatatgaatagacacttctcaaaagaagacatttatgcagccaacaaacatatgaaaaaaagctcatcatcactgatcattagagaaatgcaaatcaaaagcacaaagagacaccatctcatgccagttagaatggcaatcattgaaaagtcaggaaacaacaggtgctggagaggatgtggagaaaatgaatgcttttacactgttggtgggagtgtaaattagttcaaccattgtggaagacagtgtggcaattcctcaaggatctagaactagaaataccatttgatccagcaatcccattactgggtatatacccaaataattataaatcattctactatgaagacacatgcacacatatgtttattgtggcactgttcacaatagcaaagatttggaaccaatccaaatgcccatcaatgatagcctggataaggaaaatgtggcacatatacaccgtggaatactatgcagccagaaaaaaagatgagttcatgtcctttgcagggacatggatgacactggaaaccatcattctcagcaatctaacacaagaacagaaaaccaaacaccacatgttctcactcataagtgggagttaaacactgagaacacatggacatagggagaggaacatcacacaccagggcctgtcagggggtgggaggctaggggagggatagcattatgagaaatacctaatgtagatgatgggttgatgggtgcagcaaaccacaatggtacatgtatacctatgtaacaaacctgcgtgttctgcacatgtaccccagaacttaaaatataataaaaaaaaaaactttctcacaaccctagaaattaaccaaagccatataacaacctaaggagtgtttattcaaaaaatcccagctaatccttggtaagaacatcaggatttatggtactttaactagatctactcccaccacctcctccccagctccagagtagccttaaaaaccagcaatcactcaacccaggtggttaagaagaccatcttccttgcagctacaagatggggtgggaactgagtttggagcgtcttaaaaagttccattctccagggcattgtcacaatttgacgtgtttcctggaagatccttatgcacacggtgttgtcattatttgacctggcttaaagctcactaggtaggaaaagccctgtccttagagcacttgttaaaaacaattagaagcaattgtttagcatcacaaatacctgagtctgtaataacagttaggaaaaacaacagcctggccaaaaccttaaaaggaaaatagagagaaagatgcccatagggacattgggaaatctctgatctattcctggatatttaggacacacctggaaagatctcagaaagctccaatatcttacctctggctggccttgagaccatatataagtagaaagtaaagaatacagagagttgtaagtacctacatgagcatctaaagcatgccccatcatacatacagaacccccaggaaagggtaaaaattatattgattaaaggcatctaaagagatatctggccagatacggtggctcacacctgtaatccaaggactttgggaggctgaggtgggtggatcacctgaggtcaggagtttgagaccagcctgaccaacaaggcaaaaccctagctctactaaaaatataaaaattagctggacatggtggtgtgtacctgtaatcccagctactcaggaggctgaggcaggagaatcacttgaacccgagaggcagaggtttcagtgagccaagatcatgccactgcactccagcctgggtgacagagtgagactccacctcaaaaaaaaaaaagcagaaagaaatatatgaccaccaagtattagctgactactaagaaaactgagcagagacttaaatggatactgacatggtttggctgtgtccccacccaaatctcaccttgaattgtaataatccccatgccttaagggcagggacaggtggagataattgactactgggagcagttttccccatactgttctcatggtagtgaataagtctcacaagatctgatggttttataaatggcagttcccctgcacaagctctctcacctgctgccacgtaagatatatcttgcttcccctttgctttctgccatgattgtgaggcctccccagccatgtggaactgtgagtcaattaaacctttttctttataaattactcagttccaggtatgtctttattgcagcatgagaacaaactaatacagatacacactacaggtaataaagacatcacaaaactagtccatcaaagttactaaacaagtatatagcaacagcaacaccaccaaaagagaaagaaagaaagaaagaaagagagaaaagcaacaaacccaggataaaggggacttatttccagagttgccacatcatattatctaaagtgttcagttttcaacaaaatatatgagacattcagaaaaataggaaaaaatgcattcaatataaattgtcccatgggggacagttgttgaaattagtacccaaagactttaagtcagctattaaaaatattttcaaggaactagagaaaatcgtgtctaaaaaaattaaagtataacaatagtatctcaccaaatggagaatgtcaataaagagacagaaattatatttttaaagaactaaatgaaattcttgaatgaagctcaatcaatgctaagaaggagaactcagggagactcatgcctaaatacatcataaaaccaaagccagagattcttgaaagtagcaagaaagaaatgactcatcactgatgaggaataagattgtcatctgacttctcagcagagaccatggtggccagaggtagtaagatgacatgttcaaagtactgcaagtaaaagaccgtcagtcaagaattttatatctggcaaaaactagccagcaaaaatgaaggagaaattaagacattcacagataaatgagaatggataaaatttgttattatattggctttacaagagatactagaagtcctttagtctcaaatgaaaagacaatagataataatctgaattaacatacaaaataaagagcactgataaaggtaacaatataagtaaaaatgaaggtataaatgtatttttgtaactctgtcctcctatttgatcaaaagacaactgcctgccaggtgcagtggctcactcctgtaatcccagcactttgggaggccgaggcgggtggatcacaaggtcaagagatcgagaccatcctggctaacatggtgaaacccccgtctctactaaaaatacaaaaaatttgctgggcctggtggcgggcacctgtagtcccagctactcgggaggctgaggcaggagaatggcatgaacccgggaggcggagctggctgtgagccgggatcgcgccactgcactctagcctggacgacacagcaagactctgtctcaaaaaaaaaaaaaaaaaaaagacaactgcctgtaataacacttttaaatctgtattgacaggcttcaaatgtataaatatgcaatttcgacagcaacaataatataaagaagggggaggaaacagctacactaaagcaaagtttttgcataacatttaaaattatctaccattaatctgttccagtttgttttaaggtaacatgttaattgtaattcccagggcaaccaccacaaaaataactaaaaaatatatacagaaaaagaaacaagggaattaaaatgttacattagaaaatatatattgaatgcaaaataaagcagtaatggaaaaaggaacaaacacataagacatgtagaaaacaaacaacaaaatggaaggtgctaatctactttatcagtaattacattaaatgtaaatgaattaaatactccaatcagaaggcagaacgacagagtgaattttttaaaagatgcaaccagatgtaatctacaaaaaacacactttagtttcaaagatataataggttgaaagtaaaacaatgggaaaatatgtaccatacaaacagtaaccacaagacagctgaagtggctgtactaatagcagacaaaatagactttaagacaaaagtgctattgaacacaaaaggaacattttataatgataaagtgtccatctattaggaaggtatgttttataaacctatgttcatctaacaatagcaccccaaaaacacaggaggcaaaaattgacagtattgaaggtggacataaataattcaatgataatattatagttggagactacaatatctcactttccataattggtagaacaactagacagaagttcaatcaggaaacagcttgaaaaatgctataaaccaactagatttaacagatatctatggaacactccattcaacaagaggagaattcttctcatgcacacatggaacatttccccaggataggacagactatgtgctatgccctaaaacatgcctcgataaaagtaaaaggattaaaatcacacaaagtatgttatttgacctaaatagaattaaagtagaaaatctatactagaaggaaatttcgaaaattcatgaatatgtggaaattagaccacaaacccctcaataatcaatgagtcaaagaagaaattacaaagaaaattttttaaaactttgagattaatgagaaaaacatacagaatatcaaaatttataggatgtgacaaaagcagtgcctagaggaaaatttgtgggtgtaaacacctacgttgaaagagaaagaaggcctcaaatcagtaacttaaccttctcccttaagaaactaaaaagataaagagcaaactaacaccaaaataaggaaaattaaggaaataataaagattggaatggaaataaatgaaatagagcatagaaaaataatagagaaaatcaataagcaaagagttgatttttttcaagactgacaaaattgataaaatttaactagatttatcaattaaaaattatagaagattcaaattactagaatcagaaataaaagaggggatttcactactgaccttaaaaaaataaaaataaatagctgtgtgacaacaaactaaataagcgaactagatatatttctagaaagacacaaactgctgaaactctctcaaaaagaaacagaattcctgaatatacctataacaagttaagaaattgaattggtaattttaaaacttcccacaaagtaaagtcaaagcccagatgtcttcactggcgaattctttcaaatatttaaagaagatttaatgccatgccttcacaaactcttccaaaaaatagaataggagggaacacttccaaactcattctaagaggctactgttaccctgatactaaaatcagacaaagacaccacaagaaaagaggactacagaccagtaacctttatgaatatcggcacaaaaaatttcaacaaaatgctagcaaaataaatccagcagcatataacaagaattatacatgaccgtcaagtgagatttatcctaggaatgcaggatttgtttaacatctgaaaaccaatcaatgtaatatgccatagttaacagaataaaggacaaaaaacatatgattatctttacagatgcagaaaaagcatttgacaaaattcaaagcttttcatgattaaaaacaacaacaacactcaacgaattaggaatagaagaaaactccttcaacctgataaaggacatctatgaaacatctgcagctaacatcatactgaatgatgaaagactcaatgtttttcccctaagacaaggaacaagacaaggatatccacttttgcaacttctactcaatattgtactggagattctagtcatgcaaatcaggcaagaaaaggaaattttaaaacatctagaaggaaatagggaggaagaagtaaaactatctatatttgcagatgacacagctcatttattttttttaaagtcctaagatattcacacaaaaaactatcaaggctaataaataaattctgcaaggttgcaggatacaagatcaatatgtaaaaatcaactctatttctatatactatcatgaaaataaaaataaaattaatgaaacaattccatttacagtagtatgaaaaggaaatcaaatttaggaataaaaataacaaatctaagtgaaaacagatgcacttagatggttccccagtgacaacctttccccaggagtcattcagcttcagatctaaatgtaaaaggtaaaataaaaataaataagcttctaaaacaaaatataggaagatagcttccttgccttaatgtaggcatagatttttaaaataagacaaaaggcagtaaccatttaaaaataatcaatcatactttattaaaaagtaataactgttgctcaccaaaagacaccaaatttagatagtgaaaaagatgatacaaatgacaaggtattcataatacatatgtcccaaaaagacccatattcagcatttttagttttaaaaattatcctgtaaatcaaaaagaaaaagtccaacaacccaattgaaaaagtaaagtgggagaaagttctgaacaagccttttacaaaacaggatatccaaatggctggtaagaatgtgaaaaatgctcaacatcttcagtcatcagggaaatggaaattaaaaccacagtgagactcactcctgcctttggaatagctgaaattaaaaagactaccaacactaagtgttgttgagaatgtagagtatctgaaactttcatacagttcaggtgggaaaaaattcctgcaatcattttgggataatgtttgccagcatcttctaagactaaacatacatctactttataatcctgcaatcccatttctaggtatataccctagataagtgggtgcatatgcccaccaaaagacaagaacaagaataaaacaataagagctttattcatcatagccaaaaattagaaataacccaaatttccattaacaaaagaataaataaatgaccgtatattcttacaaaggaattctacatgtctacgtggtaacaaatgagaatcaacccctaacagacacaacaacatgggaaaatgtcaaagacattatgttgcatgacagaagccagacatctcctgtggatctcatgttgtgtctcagaaaaagcgttcaaggttttcctgaccatttttcttttttttttttaactgacccataattttgatggctcatagtgagcttgaatacaactcacattcctaagtctctttttcccccggtacagctaggactcattgttctcattccatcctttggcacattttttaatctaatgttatttttacttgtttactgaaaaatgaaacaaccctaatggaaatcaaaggcaattgggaagagcgtaatttcccacaggccagccatcccatgaatcgtcagattccagggccttagtcatgtatatatttatataactatattaaatatatgtatatatttatataaatatattaaatatatttatatatttaatttttatgtacttttaatcactacataggtataattctgctatttcaatactcatgatcatatcagaaatactttctcagtgcctttgcaatcatcatgtttattggctacacaatagtctattgcgtggctattccataatgtacttagctattccctacactgaacatttaggttgtttccaattgttcagtatggaagatagcactacaatacaatccttatatatttatgtatttctcacttaaattacaaggttaggataaattttaacaagtgagattattgggtcaaacaaatgaacacattgatgattctaggtatgttttacaaatggtttttcccattgacacagcaaccagcaatgtataaagtcaccagttttatcacaaccttgatagcattactacttttaatcatctataatagatataatagatataagatgattgcatggatttcattttattttgaaattcactggttattcctgaagatgttcattttgctatgtttgttttgaagtcttggtatttaacatagggccaggcacagagcaaggtggcaccacgtgacttttcaggtgaactgaaccttattcattccgatgtcacttgttcattcataccttttgtccagtgttaaccaggtttgaatttgcctattaatttgaatgaggcaaggtaaatattcccattttgtatatttgtaacaaataattttcccttcacttttttttctttattttttgtctttataaagaagtttttactttttgtacattggatctatttactttttaaatatttttaccactttaaaatttagagtgttacctgaaaaatcatgtagcctactttttgctatttgtagttatttttttccaaataactaatacattcttccaacatccttcattacaaatccttcttttctccatggtatttgattcctcctttatcttctcttattttatgtataaggaactctttcagatttgtctttcgttgctggaagtctctgtttgtaccagtgtttctcagatttaattaacatgggcttctatgttctaaaatctgttaatactggcccccttcattatttgctattttctaactatttctatataaagtagcttttcctttccagttttattttctaatcattttgtaaaaatctaataagacactgaatggaaattttgatgaggattaggctacaattataaattgagaatagactttttaagtatttaaccaaaagactacagcagggaatatattaagtctccttgattattcatctcttatttctttcaatgaaatatggtaaagagccaaagagcatgggttctgaagtcagattatgtggatttgaatcccagcccagctacaaactggcaacatatattagtcatgctgctaagtggcaaacaaccacaaaatctcattatcacccaatataagagtgtatgtctcatattcgcagactggggagtcacctggatggcccagctccacacgtcccattcttgggctcagtgtgagggcagtgtatacctggggcatattctctttatcagagtagatgggtaggtggacgcctgctttctacggaaagtctatgctcagaacttgcatgctcacttttgccagcatgccattggccaaagcaagctcatgaccagatccagtatcaattgtgcacataaataaattcatcagtcaatatttaggaaagaaataccgagggaaagtcacacaaagcccaagcctcaagttttttgtttgttttgttttgttttgttttgttttgttttttgtaaaacagagattatcacctgcctctctcagggggctgtgtgaggactaaatgggataatgtctgaaaaccacttggcattatgcctgataagtagcaagaacacaagaaatgtcaggtactattattgtttttaattatagaccaaatgctgccattgaccttttgaatctaagtggaagactttcaatttttccacatcagattttatcttgttatctctgacacactgcaccagtcattggagatatttgggatcctcatctgtcaagcaaataaatatgagagcactatgctaaatatgctcccctatattacctggcaggttgtgcagcactaatgaaatagtgaccctcttgactttctgcaaccagtcagtgctccaccacttttcatggatgatggacatgttgaacgctacctaatgcttcccaagtagctgggaccacaggcacgcaccactatgcctggctaattttttatttttgcagtgacagggtctcactatgttgcccaggctgttctcaaactcctggccccaagccatcctcccaccttggactcccaaagtgttgggattataggtgtgggccatgagcatggcctaaagccttcctttgattgactttgatcagtgaatcaataacttctaggtacatgtgtttaaagttacacatcaacctaattgccctgcttaaaattctgtgtttctccatgttctctacaagggtttcatccagagcctcatgcaaatctaaatatgccaccttagacattcccattctcatcatttgcccaaatgaatttgtccaaaatctctacatgtggctctgttagtctatccaaacgttctctgtctccattagggacattcataattacttccccacattcagtttctaatctgcacaacccgaaaagccatcttcccttattttgacaaaaacactgagatttctcgggactttttgaaatcctccttgctgaggtgcagggtggacagggcttgcgcagcctttcctggctgactgtggggaactgaagggccatcagtcgggccagcctgtcacgaggctactcttacttccacttcaccaagtggctcctccaggccatccacatttagggccaagagggcgattgtcctaattggatcctctaccatacgggaaacaaaataaaataaaaaagctataagatgcttgatgagatctagtggatggctcatctgtggttgggatcaactggagtttgcaaacaagaaaagctgaatggcctccctgcggaaaatgagcagtgtccagtctatagtaagctaccccagaacccaaacttttggagactgactctttttggtccaggcctatggtcaaggggtctccaagttgccctctttcaactcagctccaggaggcaaggactgcccagcagatgatcaagaaaatcgaccctcaaggtcaagctctctctctcagaggccacctttcccaaaaacttaattcatgcacccaaaaaggacaatagtggtttctttcctataaaatatatttcatctacatgaaaaatattaacatatttatgtggtttttccttattattcttccaaaatctgtcatttagaactagcgtgccatctgtgagaacaccaggaagccccaggagagctcacctatggctcaggcaccctctgcctctgttcaccttaccagctcatcacggggtgggcaagtgttgtctaatagatgccaacacttccgtgatgtgtgccttgtctttcttacgatctgaacatctttgtactattctcttctcttttttccccttaattaataagaagcatttattttctctaatttgattattgttttttttgttctgttttcaaataacaacaaaatgaccagagatcaaactgtgatcatttcctgtagcaattaatctatctgcaaggctgtgttctgctgagcactttgatccgagttaatcacaactctggatggtgctccatcaatacatcccaattactagcatgacctcaagtcaagtgattttaaggcactgcccccagggagtggggatgcctccagactgagtgaaggcaggctgagctcctgctcaccagacccatgtctggctctctccagaggatggcacctccttcaggtgagtagaaggaaggctacagattctagcttctgcaagaactcacctatggggcaagccactgcttccttgtcttagaaaacctgacctacccatctagctccccggccccttgcccccgtggcatccacctgtgcgtgcacctccaggagggtccctcacattccaggatgatatgcaggagacgtagccctcgtccagttccccagtgtccctgcagcaacctgaggagaagcagctgctgctcttggctgcagacctgaacaggcttacctgtttccctctgtgtatgctctttgcaaaattctgccttcaggactgacagtcttcaaaggccccacaggacaggctaagacaggagtgctgtgtttctaaggcctcaggaaaatatatcacatgggtgcaggtttactccaaccataatgggaacttgtctgcaactaccagagatggtttttcttctcctgctccaaatggaaggcagttaggaaggactaagcactggcctgtgggttccagcacagtcttctacctctgacaaggcccagcttcacgggagaggtgaagcccatgaaacctgtgtaggagccagggctgcttaaatcctgggacatactctcctgatgcatttgatttggagttcagccccctctgctataaatgtgattagtgtctaccttatagggttgatgcaaagtctgaagaagactagagttccaaaaacgcttagaaaagtggctggcatgtagtagatgctcaataaagctttccttccatcctaaagcctattgtggccaaagtgtaaatgctggaggtagcacagaatctgtcccaggcaggtaatacagtggtgagaagtgaggggaacaggtaggaatgagcccatgaggagagatgagacttgcctgactcaagggtgcagaccccacctaaagggactctgatgttgtagaaaataccatgccagccacacaaatacacctctgatctgaattcagcccatgggcagtgagcttgaactctggagaagaaaaaaatatgaaaaacaagggcatattcatagctatgaaacatttctagcaacataaagtgagcaatcaaccccctaggcttagattagagcaaggctccatgcacacctgcagagcctgggagtgctcccttgcactcacactcaaggctgtccctctccagacacaacgcagtgggctggtcttccttactgccctggattagatcacaagtccctatttcacatccagaaatacccagccagtccttacgtggcagtcactagccagttgaagacctccccgccgacccagtgaaaatgaaatcctaagctgctgtttaagcacaatgccaagcccaacactaatcatgccctgatggaacatgcttaggagcctggcagaggtctggtctatctagtgccctgaatgatggacatgatggcagctgtgatcacagacgccactccagggcccacatgagagtgccgaggtcaattgggccagagggccaaaagagcctgagaatgtatccagctctctgaaaacatactactaactttccagggatcctcacatacctgggttatccttatagttcttgcttaagttcatgcaaagccatcaacaagtggtcccgcagtggacatttttccagtccatgcagcgtcttccctacctaacctgtgatttttttaaatcccccaaagccacatccttggggttcagggtcaacaccatgcagatgccaaggctattccattcacctctgactatctaccaggccaaaggacctaaagcagccagatgatatgttgcccaagccgaaaaacatattgcatttacttagaagcattttctccaaagggactgggtagcttaccacaaagaacatatttaatcaactggtacaacataaataaggcataataaattagagccagggaaaagtgaatacatttgtacaaacctaagcattaatggacttgaccttcccagcagtaagagcaaaaagggaaacacattgttacactgatcacattaccaggaaggaggaagcagacattccctaaattctgaaagaggttcctccaaattgtgtaatggacaattactttaacagaaaaaaaaaaagctaacacttcttgaatgtctactacatgctagaaacactgtgagacatttgccatacagggtcctccctgcctgcatgagctcttattcaaattagaagaaaatgccccagtgaggaaggcctgctgagcagcaagcagtgtgctgatgaagtccagactcacctcccagccatccaggtgcaggatgcaacctgctcagctgcatgtggcaaccctgtttactcacatcctcctggaacgcttacagtaaccctccagagacaatggttccattttatatacagagaaattggggctcagaaagcataagtgtcttgcccagttcacaaaaccagtaagtgacagccccattctctgactctgcatgacttgtttcttcttgtaggacccttgacaagagctgaactttgtgtgtatgtggtggggtggggggctctaaaaggggcctgtgagcataataaaggccaaggacatagctttctggaggtctggctgcacacagctgaggaccaaggttgtgagtgcacagaggaaagccctgcgtgaaacctgtgtcctccagcccccctcccatggcctccagtgcccatcagcatcatctggagaggtctgaccaccacctaccctgtatctgtgcatctccaccagtgggacccaagagtggtgaggtcttggaggtccccaagttttctatataaagagatgagggtgtgttcatttgctagggctgccataataaaatatcacagaccaggtagctagatcaaacaacacaaatgtattatctcccagttctggaggatggaaatctgagattaaggtgtcagcagggctggttcccctgaggaccaggaaggagggatcgcttccaagccccccttcctggcttgtagatagccatttctctctgtatcttcacatcatcttccctctgtgtatgtcctgaatacaaatgtctccttttcataaggaaatagtcatattggattagggtccacccttataacatcattttaatttgatcatctgcaaagaccctgtctccaaataagatcacatgctgtggtactggggttaggattccagcttatctttttgggatgggacataactcagtccataacagaaggctgcagcactgctgtccttggtggaggcagacactggtccacagggctcaggaagaggccaggaggacaggcaaagaatgggtctatccagtggcctactccaagttaccttcatctgttgccaaaacaatttcagtagcctcctagctgatcttcactcatgcacaatggttaccttctatccaggctccacacagcagccagaatgaacttttcaaccaaaacacaaatttgataaaagcagtcactgcttagaagccttcaatgacggttcattagtctcaggggagagagcaaagccattccatcctcattaccttccaaatattggattggttcctggaacgctctccccttcctccttccccacctgggacttacctagacctgataacaatgaatttctcttacccgtcagaccccagctggatgggcttctccccagggtgggattcccccatgcccatctcctgtgccacccacagcccctgttggatagtgtcagggctgttttgctcacctctgggcccctactcctaggacagtgcctggcatacggccagtgctcagtgtttgttaagtgaagaaacagtgggactgtgatgccttatcctgcagtaggagttttagatacaaggaaacttatgtttccatataatagatgagaaactgtctgtctacagaaatgacttgtccaaggttgcacagctaatgccatttgattcctgatgctgagctctcaaccgcaaatttctggttccccaagctggggctgggacagatccaagtcctccttctgcagcatctccggatgtttcctggccagcagacaaacctccctgctccttcttccctatggaaaacacactcgtgttcccatatgaggccctggggtgaagggttggtaagagagtaataaagaaaacagcaaagagtgctggctgtccccaagtggggtcagaaacagggatgtgtctcctacatgcattgtaatgaattgaggcccaaacttggagcctcaagataactcctcagaccctgcatctgcttcttaatagaaacaggaacttatgagagtcacatggcttctctgtgccctgctttcctcctctgtaatacatgagaacaatgaagcccatttcacagtgaggatttgggaaattatgaatacataaatgtctagattgatgctggtcactgtgggcacccaggaagtgacagctatctcttgccttcctcccaggtgagccgtagcttggacagcctcagcgtggaggggccactagctcccaatgaagccataggacaaggttgcatgtggggattcaccttggtagctcacagcccgacagaggcccatgagcacagagagttgggaactgaccaacaggctccaggctctgacccaggccctggaagaaatgcaccaccagcagccaacagcaatgaatatgcccctcctgccatagcaggtctaacccacacctcttcaggcacaagctttcagtctgacacacaagctgccaggacaagacctgtttggttttgctctattttatgccttgaaatatgcaggcaaaggacacgaactgcagtcactccagggaaaagccttcgcagatcatcagcctttgtagaagggaatctggaagcagctggctgccagggatgctaacttcacaagggctacaatgcctacttggcttttgatgggagcccagcagccactaggaaccttggcaaaggacttaatgtcggcctccttcaaatgtacatcaatgttcatccaagctctgccttcttgccccgggctctctggcaggctgatgtccttaccctcagatgcacacatctgaaaactttgtctaaagcttccctttccttcaccattgctctccgtctttccccactcccactgcccctttgattcctgtgttagttcagtgggtcgttcattcactagatgctccaggcacctactatgtgtcggatgctgttgcaggcatggagaatagagctgcagcaaaacacacatagcctcttttgttacaaatgccaaccacccacttaacatatgaaacaatgtcaagtcatgacaaatacgatgaagtcaggcgggagagggaccagggagaaggaggagtgtgctacttcaggcagggtggtcaggaaaggcctctgtgatgaggcagcattgtgcagcagcaccaagaaggcaaggaaaccagccatgtgggaatctgggcaaagagtgagagtgatccaatgacagggaacagccagtgcaaaggccctgaggtgagcgcttgtttggcatgtttgataaccaaaaataaggctccaggtgagtctggggaatgaagttggagaccaggacagatggaaaaatggccatttagtgagggccttgaaagtgatgaaaagggctcttgccacaaaaaaaaaaaaaaaattgggtaaactatgtgagatgatgaatgtgttaatttacttggctatacagtagccatttcactatttgtatgtatagcaaaacatcatgttgtacaccttaaatatatacttttatattaaaaaaaaactttggattttattttatgaaacaaaggccactggaagcattttaagcaacagtgatctgacttatacttaagaggattagaccaggtgctatatggaaaattgactcaaggggtcaagggtgaagtgcaaccatcccgaggacgcctgtggccattgtccatcaggtgagaaccaagggtgaatggggagtattgcgggagtattgcaggggaggaggtggggaggggacccatggtgagcccagcccgtggcagctctgtgatgtgggataagttgggacatctctgagcctcagtgtcttcctctatacagtgagagcaatcccagtatcacatgggtatccagtaggagcataacagataatgtatgcaaaaagctgtgcacagcacctgactcatatcaggacctcagcaaaagtgactttctttccccatccgctatcatctctatgttttgggaagaactttttccctaagtggctattgtcactgaaaaagaaactccctcagcccaagtttctcagcaagggcaacccacaggcaaaaacaggaaaactcaagaacctcttaaatcaagactgtaaaaacctgcataaaaaagacaacctggcacttttatggctccctaaaaacactttagaaacctacatggcatttcctctcaagaccctctattgttgatccaattagccaatttggggcccagaaacacacaaatttctggaaactggagtgtggaaagctgcctgagtggagagccagccatggcctggacacaggtctctgccggggaagcaggtgggcagcctgctcctgagcccacccaccaccttgtctgaagtgaggatgaccggacagcctctgttgagttcatgagtaaggaaatggagtctctgtcacacgtgctggttggccctggacctggtataagatgtagtccaaccagaaaagctgggggagccactcacagaaggcccagaggggaagaaaggagtgaggcacatgtgcagatttatctggtgagattatgctacgtgtccactgcccactgcacgggaccccagccttgagcaggctccacccggccctgtggtaactccccagttcacagtgctgcacaatcccggaaattagcctagttaatttttgcaacttccctttaagatgaacagggtggaaatgattatcacatcttaaagatgagagaactgaagttcaggcaggggatgtggcctggagacttgaacagaagggacttccttctgagaccacccacaagtcccagttgcccatcctctcctgggccagggtgtcacatccagggttatcagagctgaatgagcctcaggccctgtggatggtgagtaggaactggccaggccaagaaagctcccatagagtctccaaggcaggccccagatgctcctcaaggctgcactccattgctcaggggctctccctccccaagccctggtcaagggagggaggaccaagactcaccatggggtcatgagcttgggggttgctaaagaaaaggccctttcttttcaggcttcacctcacaatatcattctctcccatgcccacaggacgctcaccctcatcatggccagctgaagtcctcctcatacctgctccttccctgctcctccatctcctctggacacgtgagtgtcagcctgtctcctccccaccctggcgactggacttcaggaatgtaatctgaatccagccctcctctccatctctcctccatgacctcccagcagcctcctcacctctccctgcaccacagagagaggctccaacccatctccctggcttcatccctgcctgctcatctcccttactttctcacaaggctcctaataggtgtcctgtgcccctgagcccccaatctgggggcctcagtaaagacctggaaccactcaacatggaacgagaaagagacataacagttctccttcctctagactctctccagattaagcccaagggtctccttcaaggccaagccagcaggcagggtgggagattctagtctccatctaccacctggccacctggggccaaggcatgagctgcttatgtcaagaaagcaccctgggtgctgagaggtctgggcgggagagccttctcccacggctgtgctgctccccagcacctgcaggcaggtggaatgggcctgtgtccaggacctggagctgggagaggtgggcaggaaactcacgctagtgaatagaagtgcaaggagccttggtcctggccaaatcccagcatatcccagcacctggaaagaaacatcagagcaaaacggccctcagaagctctttcagacaccagaaggatgcaggcagagaggctcaggaaggggaagggagtgtccttcacaagcaactgatcaagactcctagtcccctgacaaaagcacataggtacattcacagcccccaccttgagtcccaggagcaaaccatggggcactggagcacctggtaggagccccagtgttgagagtcctctggctcttaacactctgactcttaattcaattagccctgattaacactctcttgggtgccaagcgctaggtgatgcttactcatttacaccagggtttctcaacctagcactacattttgggctgaataataccttgttgtggagggttgacctctgcattgtaggatttttagcagcatctctgggctctacccactagatgccagtagcatcccaaccccccagctgtaacaaccaaaaatgtctccagacattgccaaatgttgtctggggaacaaaattgcacccaaattagaaccactggcatacaccatttaatcttcacaatagtaatagatgtttctatctcaagttgccaagtgaggaaactgagactcggagagggttcattgacttgcccaacgtcactaagcaagtagccatattcatgtttgagcccaggccactctgattgaaagtccagggcattttctgccataaaactctatttcctgatgcaaagatcaacactaagtggctgcccacctcggtctcccccaactgtaagctagcaggtgacacctgaatttgatcgataaattaggagcagcccctgtgaatctaactagacggtcaccttcagaggccagaagcagggtttaccgcatggtacatgaagctcatggggcaggctctccttgtaggagccactagccatcctggaaccccagatgcagcaagaacctacatctgggttcccaggatggcctctcagtgcctaaggagcatctgaaatgctacctgcactcacagtcacctcctggttgggcagctgtctcccctgtatgtccccactgagatcccctctggtcaggccatctttctactggacctcaaccaacacctgggggtggtgggggtcccatgtctagaccatggccccattggatctcccggatctggctgcctggcccacagggagaggcaaaagaacaactcagctgttggctgtgttgtttccccaaagtcaagttagagatgcaaggcctggtctcttggtacaaatcctgacaaatttggaatatgtggtttcatctctcagaacatgaattcactcctccaaagaagaaaaatattaatacccaccccacagggatgtggtggagacaaagcaagaagttggaggctaaatgcctggcacaatgtctactgcattcaaggtgctcaataaatcctgtttaataaaattctgtagcactaagcacaacgaggagggaagttctgcatgcctcccaggtgttcgtaacttacggatggattgggtggatgcataaatgtacgctaagaattccacggtaagtcagtctcccatatttgaagcagcccaaatttaaccaagaaaaacctgaaaggtaatgaagttgtctcagaccgcttttgtcttaaaggcaactacctgcaaatagcaagcccagaatgtttccaaatgagatgccctgggagagcccttgatgggcactggagcagtcagtccaagaggaagaaaataataataatccagtttgttgtctgagacatttgtctgtgcattctgctggggaaattgtgttagttgcagagacaggcctgataggaggccagctgggaagagcatcacgtaacaatcaggtaaatacagcagcaggaaggagcctgcatcatcgccagaccccaactgcaacctgcctctcccgccagccacattggagaagggagtggtctgagcaggcaagagcaagtctgtgccaggcccacagaggtgaggaaagagactgagatgccaggcttccaaaatgtgccctggctgcctggtcagctcagcctgcatctgctcctatgtctaagagaggtgcaacattcatttactcaccaagtgtttgcagagctctagttccaaagaatggttctagatactgaagatactgcaaaggacagcacagatagagcttccttctcttatgaaacccaagtggagtgttataaagaaccagagtctgttctgctctgttcattccacagatggccccattcagcactctcagaagcagcagctccatcacaaccactacagctcccagcctcaggcactgactcctaagtgaggatcccagtctaagctgcagatgagtcaggactttcctgccccaccctaaccagctcctccccatctaggaccagactgaaggctgaaggggacaccacgggcacctagcagaccccagggcagcctctccatgcccagggctcagagttgccccagcttgccagccacccagcccagtagcctcaggggtatcttcaaagcctaccctggattgagtcacggtccccaccttgaacagcctggactgccaggatcgaccggctggtcctcaccttggctgagatgcctccctcacaagaggccttacctcccctcccccagtctcacctcccacctcccactctcacttcttcccatagccaacctaatcaccctcccagccttacctcctccaagccttaccttccccctagctatatcttccccccaacctaattaccccccagctttacctgccccccagccttatctctccccaagccttaccttccccctaacctaatcacgcccccagccttaccttccccctagctataccttccccccaacctaattacccctttccctgccagccttacctctccccagcctcacctcccctacagccttacctgccttacctgctcctacccttacttcccctgcagccttaccctgctctactccaacatatcccttcgtccctctggtccttggcacctccacttccttctttccagaatccaggatgctcctcccatgccagtgcccttttcccacattctcaccttttgccccaagtttgagtagtgcttcctcaggggccttcctataccttgcatctgaatggggtcccccagcaacaccatttcacatcttcacatcctcacctttttcttcatagacatcataatttgtgactcttcagtgtgactgagccattttttgtgtaatgcctacctcacctctagctgaaaactccatgaaagtgggtaatcatcaggtttgtcaccaccaaatcccctgtacctaacacagagacccgcattaaattccagctcaaaaacagaagacctgctgaatagaaatgaatatctggcatgccccctccatctccaattattcatcttattcctactcatccctcacaactcagctcaagtgttgcctcctcttctgacttccacctcctgctggatttaagtgaccccaccccactccccactactctcccaataccctgcattttcctctattgttgcaggtgtcaccctgagacccaatcattgattaatctgtctgatcctcaggggcagaggtggcttcattgtactttgtgtcccctacccttcacacagagtctggcaaaagtccagtgaatgttgcatgaatgaaatataaggatgaattaagtaaatatgtagggaagcttttttcagtcacttcagtctagaagctctgtaactactggcagaggctctgtgatcaaatgaatcatttacaagaagagaagtaacattttcacacttgcctgaaagtctgctccccaacctgggccttcctagacccctgggcctagggggactagggaatgactttaagcagagaaagtgtgatcctctcaaggtcaccgttgcccataggggatgaacagctcaagcactaagttcccgggcctcggctgtgggtttctgtccccggggtggctgagccacaggttggtggtgtggcctctagatgcacgtgggtatgggcgcaggaatctgtagggacttcacaaccaaagccactttgaccaagggatgctatctgtttatacaacttgggaggatttttaacatatccccaggatttcttttaatcaaggatggtgagatacacagacacagaaatgactcccatgaaggaagaagtctgttgtggtcacagagtcacagatccctagaaagaggaggcagggcacaccttttggggccacatggggaagccccagggtgagtcaggtcacagggagcaggaggaaaatgtggacaagagctttttgtgcggtttgtgagggaagaaacaggagaggcggattacgcaggtttaggattggctggtgtgaataattctagcaggctctgggtgttagggactatcgagagttgcctgctacctggcactggggtgatcagggcaggggaacagtggcttggccagtgagagttccacaaaggctgttgttggagtcattggctttggacaggttgtttggcatgcaaaaagtgtgtcacaggtgggtcatttgctgtctgtaggaattagcttgccctgaggggaaggctttccctggtcagtaaagctccaaaatgtcaaagcatcctaaaatctggggaatcaaaaacatgattaatacagaggggtccacagcaggggtccacccactggccacggactggtacctgcattttcctctgttgaacccaatagaggtaccagtccatagccagttagaagccgggccacacagcaggtggtaagcatcaggccagtgagcaggaccacctgagctccgccccctgttcaatcagcatcggcatttgattctcacaggactacaaaccctattgtgaattaagcatgcgacagatctaggttgtgcactcatgagaatctaactagtgcctggtgatctgaaatggaacagtttcatcctgaaactagccttcaacccccactggtccgtggaaacattgtcttccacgaaatctgtccctggtgccaaaaaggctggagaccgctgttctacaggaagggaaaagaaagcatgattttcatctaactgctaggatctgacagtttatatctctgcaaaatttacatgttgaaatcctaactcccaagacgatggtattaggacatggaacctttgggaggtgattagttaaagagagtgtatccctcataatgagtgccttataaaaagaagccccaggttgctcccttgccccttcagccctgtgaaattacagcaaaaagacagccgcctgtgaaccaggaagcaagccctcaccagattctgaatctgtctgcacttggatctaggaccagtctccaaactgtgagaactaaattcctgtagtatatgagccaccaagtctatggtatttttgttataacagttcgaacaaacaagacacctttgcaaattattcaaaaacatgacctgttgatcacattgccttagaaggaacccaggcaagcaaatggccctgaaacttaggcatcgttagcttcacaatacactcatctctgctcagcagagaagaaatagcccttcacgtgacaccagtaagccagtaaatgaattttattcttacactcaacaggtatttatcagtggcctaacagatgcagagcttgtatgaggctcagggggaataagtgtgatcaaggcaggaatgatctgccttcacacaggactcacttaaaggagacaatatgcagtgaaacaaggaattcaacaaatacgtgataggtgctaagacagaaacatagaaaacaaatcatgagagacgacagcctttcaaccgaggtgcccttaagaaaaaccacaaggaagcagccaaaacctttccaggaaaccagaagatcatgtgcaaaggccatggggctcgaagagctcagagtgctgaggaaggaaggaagagaggtcccctgcaagtggagagaggtgggcaccctgcaagtggagagaggtgggcagtagaatgcatggaggcctctaaaaggagcttgggttttattttaagttgaatggaacacctttgagaagtctgaaacaggaagtgatgtgctcacatttattataattagtttgttagacaatcggaaaccaatagaataaaaatataaagactttttttttccttcagtcattatccctggtcccagaatgatacccataactttaaggtcacttttaatcattaaaaagttcatgttcattttaccccatttaatgcttacctccactgtcccccaaggcatgggtaacctttgttctggggtaggaagcacgatcttgtaccaagattcctcttgcgccctccctgctccttggagcctccactcctctgacccatgagggaagggggcaagagtagagagatgcccagagttgcctgattgtctgtggatgaggtgaggtccctggcttccttctggctgggtctagttccttacgatgctggtggatccactgattgaatgtagaatacaagggaaagggggagatgtggatgatttctattttggactcaagcaaccagctgcctgtagagtcattctgagaggtgggcaaagtaggggaggagcaaagtagagaattctttttgggatatgctaaggccaagttgcctgtgaaacatccaggtggatgcgaaggctcacaggaaaagcctgggctagaggctaacatttggagtagattaatgtgcaagtacttgaagccattggtggagatgagaccaccaagaaaggagggaagagacagagaagaggtgcgggactgcccctctggggaggtggacagtgggagtttgggcaagaaagaggagcctgcgaaggaaactgccaagtcaggagggctctgggctgatgctgatatcatagaccaaagaagcaaatgtgtcaggaggcagtgcttcactgtgtcaaatgtcaccaaggtggcaaggaagaggggaaagagcagaaaattggaaaataggaagatggttagccctgacaaaggtcatttcaggagaaggagggtgaaatcagtagacaaattgtggcgggtggaaaatcagacaaaaggagagaaaacaaaatcaggagaaacagagcaatcactgaaaggggatgtggaaaatgtgggaggagggttgctttcttagattaaatgttctaaaacaagtttctaggcagagcagcaatgcaggagtggataggaagagatcagtaatgcagaagagaaatgtggaaaagaaaaggcaaaatcctagaggggaaattgggatggattcagggcagggggcaagtggctgttgcaagaacacttacttccctgggtgtgacaagatggggcaatgagccagctggtgcaagtgcaggtgggcttgactttggagatgggagatgagggggctcccatctgatggctaaataaggagggaggaggaggaggggttgaaaggagaagacaaagcatggaaaaggggtttagggaagtacagtgcaagccatggagatttgtgaggagcaataccaaggaagaccagcaccctggctttgtcattttctacagcaacactcagcactcaggcacaggtatgcaaaagaggatggtcaggcttagctcatgtgggagttttgcctggtgaatatcacaaagaaaagggaacaggaaaattgagtaggcaagggagagattattatgggtcagtatcttgaagcctcactaagaagacatgaagataagggttttgtgaaaacatgtggggttggaggtctcactaggaggtcactgggcatgagccagattggaggtgggaggaaagagtgagccagagtgttcagggaatgataacagaggggacagagctggcagtgaggatgaggagaggtggggggggaacaaatggtaagagctagaataagctagaaagaactagaaagaggccaggcacagtggctcacgtttgtaattctggtgctttgggaagctgaggcaggaagagtgcttgagcccaggagttcaagaccagcctaggtaacatagtgagaccctgtctctaaaaataataataataataatgagcagggcatggtggcgtgcacctgtagtctcagcaacttgggaggctgatgcagtaggactgcttgagcccaggagcttgaggctgcagtaagctatgattgcaccactgcactccagcctgggtgaccaagtgggaccctgtctctaaaaaataacaattttagaagtttttaaaagagctagaaaaagatagggtggtgcaggaagggaaagaaatggtttgcaggagataaagaagataatataaaaaggacacctcctgagggacacggaatgtgaagggaataagactttcaacttgacaggctatccccagaggacaaccggtttgagttaaggtaagtaaggtaagagaagaggaggaggccagggtatttgctggcctcagaacagcaggtacagaggacaaggggagggatgtgggagaggacagtgggcagaatctgtgcaggtgcaggggcagctttggccaaggtaagcaaggcagtaggatgggagctggcagatgtgtagtggggagcaggcctctaattctccgatcaatggtatgggccatcccaggacactgcctcacataggcaagccacagtgcaagggtcacttgtatgtgtaaatattagcaaatattttaaaagcatggacatttatatcaatcaaatggggtcagggaagcaattagtgttggaaacccactggtcctaggaccatttaatcctcctactgtcccatttaatcctcctacaagtctgcaaaggagctactactgctcctactctatacacaaggaaaaggtttagagaaactaggtaccccagccagggcccatgactagtaataagagaagaagaaggagaagaaaatgatgaagagcaccatttaaatttacttagcattttacttcatgtgagcctatggctaattgcttttacatgaattgtcctattttatcctaatgacaaaactgtaaagtaaaattacattatatacccatcttatagacaggagaattgtgcctaggagagtaatgagactcgcccaaaatcaaagccagggacccctttccgtctctgatgatgttcagtagatgatgtttccttgcatggcagcctgacacagaagtcatgtccaagccctgtcaggcagctgtcccatcaaataaccagtttaaatatggagcaggtgccccttccacggagatggacattgcaacttttaaccttgttggactcctgccctgctgagccatcttccctgatgaaccagctaatcaaacatgtcctgggccaggagctgcaaacggctttgatttttcaaacacaccaaacaacaggaaagaaaaatgagcaaaccagacccagaaagaggcttgacccaatgcctccaaacagctcttccagctcaagaaacagaccctccatctgggtttacagatgctgtgcagtgacccacagcatggcagcctgacctgccgggtctgctgtgaggatcccacagtgtcagcatctgtgagtggacagaggtaaggcagggtgctttccagaggacaaagctcacctggcatcaggccaacttgagattaaaattgtttaaaatccagcccattaacagccaataatctcaatcctagcacccgacatctctgcccttaaatcacacacctggaattagatgctggggaccacacagaaccctagctgcccacttcagtgataaccataaaactggccaaacccaagggatgctgggaggccctgaaatgaagaaatagaggtccattctggttggaatatggatacacacatgctgccacttattggtgagctgttagatactcagcacgtgattacgcagttgtggcagtggacagaatgctggggtcccccagctggtcgcctggtagtccagaaaccatggctgtaaactcatctccagctgtcagaaaagagtaggtaagatggcctatgcttttacagagacagcctactatggaccagaattccctacttttgaattcagtttaaaggttattgaagcaatcaaaagcacctaatatataaaatttattgagaatgcaagacagaatctttagtcaaaatgccatttggcttatatttttaaacatttccacctggctgaaacaactgcaaatgtaaaattaaccttcatagacactgtttgccttcacatgcttactataaatgtttttaaaggcacatagttgagttttatgttctttccatttattttcatgttagacttgcggatttttatgttaaaagttatttttcagaagtggaaccctgcacctatagaaaataatgctacagccatagaaaatagaagcttctcttataacaattcaacttaaaggcattattcaggaacaaagtcgtttccaataatctatcactagtcgtggaactttgatgggacggccacctatcagcaatcctgtattttatttctgggtagagcaagtgtcctaagagaatcctggaaagagaggaagttcccaactagcaggcagccggatgcctctgctcccaatctgttggctctgccttagttttcagggtctccagccttaggggtgaggaagagtttcggacccccactcacatgactccataaaaactatgcaaggggaaaatgttccccagttgactaggtgtgcatgtctgattaaggaacactgactaggtgtaatggagtaagagcacccaccatgattctcccctgaacatagtcataaaacctggacagaatgcatgtggcagctattcaaggagtctgatgagtaaacatgagcaggcagataggagaagaaaacaagaattcaaagaataccaaactggctgtaagtttaccaagcttttatcctctaaccctcttgaccccttgccctagaggcagatgcagccacaaaagtgtgcagcagagcaagaactccaaagccacagctgattggagaaccatcaaagagtccctcagaataggaaaagagtgaggatgtcacagagaaggaaaatctcaggaaagcaactctaacaagcggtttatgaagtcctgggctcactcctgagctgctcatacgtggataggattctaatcagtatataaaagctgtgaataaaagataaaagacagattaccattaggttccagactggccactgggtggcacacacaccagaatgattagaagagcacggcaaatgctttcaaacctgagctgacattggtaacagcccacaggcaacatgctggagcttgtggcctgaacttaacctgctaaaacaaaaatatcaacacctttcacagaatgtaagtgaaaccaagagtcataatattcaaaattcccaagataaaatccaaaattgctcagaataagaacaagcaaaatctaaactcacatgggaaaagataatcagcaaacatcaacccaaagatgacgtggatgtaattttctggcaaaggctttaaagtaactattataaaaatgttccaacaagcaattgtgaacactcctaaaagaaatggaaaaataaaaagtcccagcaaagaaatacaagaaacttttaaaaaaccaaataggaatgttatgctgaagtatacaataactaaaatttaacaacaaaaaaaatttcactggatgggctcaatgaagaacgatgatgacagaggaaagaatcaataaacttgaagacacatcaatagtaatgattcagtcagaacaagagaaatatatttttaaaaatgaacagagcatcagggacctatgaaacaaaaacaaaagatctaatatttgtgttatcagagcaaccagtcttgccaacatggtgaaaccctgcctctactaaaaatataaaaattagccaggcatgatggtgggtgcatgtaatcccagctactcagaaggctgaggcaggagaatcgcttgaacccaggaggtagaggttgcagtgagctgagatcatgctattgcacttcagcatgggcgacaaaagcgaaactccatctcaaaaaaaaaaaaaagaaagaaagaaagaaaagaaaaggaaaaaactgagaaataatggcttaaaacttatcaaatttgttgaaagacaaaaatctatagatttaagaagttctgcaaacccaaacagaataaaactaaagaaacccaagttcagacaaatcacaattaaactgctaaaaactagagacaaagaaaaaaatcttgaaaataataaagtctatatacaatagattcttctccttttgagttctctaaaacatgtgatagctaaaagtaaaaaccataacataagctgggaatggtggctcacgcctgtaatctcagcactttgggaggccgaagagggttgatcacaaagtcaggagttcaagagatgcctggccaagatggtgaaaccccatctctactaaaaatacaaaaattagctgggtgtggtagtgggcacctgtaatcccaactactcgggaggctgaggcagagaactgcttgaacctgggaggtggaggttgcagtgagccaagatcgcgccactgtactacagcctgggcaacagagcgagactccatctcaaaaaaaaaaaaaattataacatagttggataaggttttgatgaacgtagagggaactaaatggtggcaagatttctacactgcacttaaagtggcaaattattgattctcagtacactataaaaacgtaagtatgcatattgtaatctccaaagcaatattataaaaataatcaaagatacatagtaaaaatcacaatacataaaaccaaaaggaatggtaaaaaatgttttaataacccaaaagaaggcagaaaatagcaaaagacaaaaacagaggggaaacagaaaacaagaaaagggaagacgtaaatctaaagaaattactaaatgcattaaatgtaaatggtctaaacatatcgatcaaaaattgatggaatatgttttgaaaaaaacaagcaaaccaattacatgttgcctacaagaaactcacttcaaatatactgatataggtagattaatcataaaagaacggaaaaacatattgtggaaacactaatcaaataaaagccagagtagctaaattaacatcagacaaatgaaatatcagagcaaagaagattataatgcatagagaaatattatctaatgataaaggttatgtgaagcaaacactggaggaactaaaatgacaaataaatgcataattttatagactccaacacaactttctcagcaatagatagatttaatagacaaaaaaattatcaaagataaacatgaactaaacaaatccattaacctactagatcttattgacatttatagaatacttcacacaacaacagcagaatatgcttttttatcaagagcccacgaaacgttccccaaggaagtccatatcctgtgtcataaagcaaatcctaacaaatgtaaaataagtgaatcatataaaagttttctgacaataatggaattaaattagaatttggtatttgaaagataataagaaaatatccgaacacttgaaagcacacttataaataatccatgggtgaaaaaaagtctaaagaaaaattagaaaatattttgaattacataaagatggaaaacacaacactgcacaatttgtgagacacaggtaaaccagtgcttagagggaaatgcatagcaataaaatacttatactaaaaaaaagaaagatttaaaaaaaattaacttaagcttttagcttttatcttaagagactataaaaataaaagcattttattaactccataacaggcagatggaataaaataataaagatcagaaatcaaagaaattaaaaacctaaaaacaacagataaaatcaacagaaccaaaactgattctttgaaaacatcagcaaatttgataaagctctagcaaacctaacaaagaaaagagaaagaaaagacacaaataaccaattttagaaaagtaagataaaacatcacaacagactccacagctattaaaatgataagaagggaatactacaaacaactctgtacacttaaacctagcagcttagatgacatagaacaccaactcattgaaaaacacaaataaggccaggcacagtggctcacgcctgtaatcccagcgctttgggaggccaaggcgggtggatcacctgagatcgggagttcgagaccagtctggccaacatggcgaaaccctgtctctactaaaaatacaaaaactagctggatgtggtggtgcacgtctataacccagctacttgggaggctgaggcacgagaatcagttgaacttgggaggcagaggttgcagtgagccaagattgtgccactgcactccagcctggccaacagagcaagactctatttcaaaaaaaaaaaaaaaagaaagaaagaaagaaaaacacaaacaacaaaatttacccaagattaactcaataacctgagtactcctataagtattaaataaatgtaacacagttaaaagttttccataaaagaaatattcagtactagatgattttactgaaaaattccaccaaatgtttaaaaaagtaacagcaccaattctgcataatctcttccagaaatagaagagagaggtacactccccactcattttatgaggccagatttgccctgctaccaaaaccaaggacagtacaaaaacagaaaactgcagatgaatatccctcatgaacatagatacaaaaaattttaagaaaatgttaactattagcaaattgaatctagcaatatgttgaaaaattaatatgtcatggccatgttggatttatctaagaaatgcatgactaactcaatatttaaaaatcaagcaatataatacactatattaatagtctaaagaaaaaaaccaacttgattacatcaatggatgcagaaaaaaagcacatgacaaaatgcagctttctttcacaataaaaactccttgcaaaccaaaactaaaagagaacttcctcaacttgataaaaggtatctatttctaaaacctatgtctaacattatacttaatagtgaaagatttaaagctttcccccactaagaacaaaaaaaggtaaagatgttcacactcaccattcttattccccatcttactgggagccctagccagtgccataaggcaagaagaagaaatcaaagcgtgtacagattgcaaagaaagaagtaaaactgtccctattcacaaccaacaataatgtctatatagaaaacctcaattaacttacaaaacaatttcttgaaacaaaaatgaaatttagcaaagtggcatgatacaagatcatacacaaaactcagttgtgtttccatatactagcaatgtagaattggaaaacaaaatctaaagacaatactattcctaatagcttggaaaaaaaagttataaaactaacaactcatgcagaatctgtacaaaacactgatgcaggaaatcaaagacataagtaaatggaaagacaaattgtgttcacagactggaaaactcagtttagcaaggatgccaatcctctccaaattggtctataggtaacaaaatcccaagaggatttttcataatatggacaagccatttccaacatacatatggaaaggcaaaggaattagaacagctaaacactgttgaaaaatcagttgaagaaatcactctaatcaattttcagactcaccataagttatggtaatcaaaacagcatggtattggtgaagggatagacaaatgtatcagtggaatagaataaaaagtccaaaaatagacccacacaaatatagccaattggttttaacaacagtgcaaaagcaattcaatggagaaaggatagcgtcttaacaaatagtgtaggaacaactagaaatccatatatcaaaaaaattgaacctgaaattaagcctcacacctttcccaaaatctaactcaaaatggaccgtcattctggaaaagtttgatagttttaataaagttaaatacacacttaccatacaactaagcaaacccactcctgggtgttactcaacaagaataaaaaattcataccagaaaaagcttttagtggcactcttcataattaccaaaaactagaaacaaccacttgttcttcagcgggtgaatggagaaaccaactatgatacaccaatgaaatactactctgcaattttttaaaaaatgaactactgatacacatatcaatgtggatgaatctaaaaggcattattctcagtaaaagcagctggtctcaaaggctacatactgcttgcttctattcatattacagtctcaaaatgataaaaccatcatgatggagaacaaatcagtgattgctagaggctcagggtaggaaaatgctgtcactgtaaagggataatataaggaaattttttgatggagctgttctgtatcctgattgaggtggtgattccatgaatctttatatgtgttaaaatttagagaactgcaaacagcaacaaaataagcaaacaaaaaaaaatgacacaaaccacacaaaacaccccatcaattctcactcagtctctcagaagatacagaaggaagattgataagacattgaaagggcagaggtggaccttgaggacccacctaacttcatgtccaaattcctccttctgagcctggagcactgtttagccactttccctgagcttggtgactccttagagtgctgttcttcaatctttcttgtttgtcagagtttgggaaagatttcctgaaggaatttggccttgcagagaaagggcatctgttacaaatgcagattcagcttcagaggcatctgtgattctgctacaaagtttagcatccaatgatccagaaagtttccctagcatttgtgggagatgcctgacaattagcttgattgttgtaactgaacagctgcatcgagtgtattagtttgctatggctgctctaacaaaggaccacaaactggatgcctgaaaaaaaagaaacatgttctcccacagttctggaggctagaagtctgaagtcaaggtgccagcaaggccgtgctcccttcaaagtctctagggaaggatccttccttgcctcttccagcttctagtagccccaggcattccttgtcctgtggcagtataactccaatctctgcctccctcttcacatggccacctctctctgtgtccgtgtcattacatgcatttcctctttgtgcatgtctgtcttcaaattttcctcttcttatgagaacacaagtcatactggattaggatcaccctcatgagctcattttaacctcacagcatctacaaagaccctactgccaaacaaggtcacattcacagttaccaggggttaagtcttcaacacatccatgaggtgatacaattcaacctaaaataccgacatttcatagaaaatagacaatgacaggtaaaacaagaatgctggcattcatttgcttaatgtactaatagcaactgattctaaagctcactggcattcagtcctttctccctttatcctgaattgcatttttttaattgcttggaaaaacagagctgcccctgagttgtatgttttcctataatacaggctgcacctctttatgaagttttcaaaccagcactcacagacgtaaaacttaatgtctttttgcacttacattctccatttcctaagtatcagcaaaatgccttgtttaacctcctagccttttcacaaaattattacagtggttactgggcctgggaggagtataaacaaatgtctctccacttacaaccccccagactcagccacatgtcctacaaaagaaaggagccatagtgattgctgtgttattttgtttaaagggactgtgttgaactacgcacatattttttaaaaactgtggaattaagccttttaatatacagatacaaaagtggcatttcaaaaccgtggttaatgagaatcattgtgccttcctccattggtttgtttattccatcagtaaatattcattgtgcacatactatgtccacacctcatgtattgtgctggggatacaaagataaacagaagaaagccataaagactgatgaaaattcaatgtcttaaatgttctcaaggtacagcaagatcttagggttggccctaactccgcttgcagagcaagggatgactgtcctccagctagtttgattcattgcacaagtcaacagcaaacccacaagagcaaaaaagggcttccctttcttctgtctcctgaacccaatgaagcccagaaccagactaacccagaacctcctgggcatctgtagacacttgacacattcatttaacaaatgaaaatgcatacctacaatgtgtcaagcacgtgttgagccatggggatagagttgatgatgaagagccaggaggcagctgccctcactgaactttgtctaatgagacttgctcttgggaagtcagggagccaggagaacggggagcccttggcacatcagctggatgggagagcccatgaggcagctgacagctgttcatccagatatagccctgatgtcctaagaacatgtcagcttcttattcaaaaacaagaagtatttttaattccctggcacttgtgccccatttagaatattacttcagtgactaatcagggaagcccaactaatccagactcctgagagctcaggcagcttctgagagctgccaaggccaccagcagccagcaggacatgtggcagccactcgtggagcccaggtgtgcatgagtacttcccatattcacccagcccaagtacgcgaggaggctgccatcagcagacaccaaatgtgagagcagctctctttccataagggtttagaagccaatggccaatgggtacctaagaagatattcaaacatctataaatggagaaatgcacattataaggagacaccacttatacccatcttacaggcagagattttaaagtgtaacagtgtcaaccaaatatttgccaggatgtgaaaaataaagtgtaacgaacttggagatccctttggcaatagctaagaaacctgccaacttgcctgccctgtgccacatacatagggcacaaggaaagcaacaggatactgttcactacagcactgcccatttcagcaaaacattagaaactccccaatgtcttgcagcagagcaacaggaagaaggaaactgtgcacaggaatccaatcaacagataatcctcactgctaccctgtaagagaggtatactatttaccctcatttcccaatggggaaactgaggaacagacagggtaagtaacttgcctaagttccgtactaggcagagccagagttcaacccaggccacctgaccccacatctgtgatcttactcattctgtaatcctgcctctgcagaaatgtgcagaatggacatggaggaatattgcaattctcctggaggtttacacatgtttgaaaaatgtcccaattatcaaagaagagatagatatgctgccaaaaagagcttcccaaagtccctctgtaatggttaattttatgtaaacttagatgggccacaatgtccagatacttggtcaaacattctggctgtttctgtgagatggatggttttgggatgaggttatatttaaatcctctgactttgagtaaagcagattgccctccatgatgtgagtgggcctcatccaatcagttgaaggcatgaatagaacagaaggctggcctctcccaacaagagggaattttgcagcagatggccttcaaacttcatctgcattattggccctctcctgggtctccaacctgctggctcactctgcagatttcagtctctgtaattgtgtgagccgattccttaaaatctctctatctctctctgtctctctctctttctacacacacacactcacacacacacacacacagacttgattctgtttctctggagaaccctagcatcccctccctccagcgcttgcccagtattgcagcagctgatggacagatgaaaaatgacctcattgcactgttcctactttctcctttctggaatcttgagacaagaaggacaaagaagacataaactactgtaacatcacactctgaggaagctatcattgattccattttataaggagtaagactgaggcttagaggagctgaataacttaccaacgtcacatcaggaaagcaatgaaatattttcaggctcaaattctatatcttttctcccaaagtatatggcaaggacctggatggtgggcatgcctcagctctgctagcaatcaaacacaagtggacagatgccatgaatcctgacagctggtcggttttggtactaggatcactgaaaggaacagttctcctgcagaagactctatgattgacccacagttccagccagccaaccacgatggctcccatcttatactgtgtgataccccctcccccagggcatacatttgtaatgcttcccaatagccagctccattcaataagtacttgtaaaataaattgaaaaaaaaaaggcaaaactctttgccctctcataaaaggctacccctaagagagtaaggagaaagatcatgagcaagggtaaatgttgttggagagactactggttaatcatgtagattaggtagcaggggaacaagggtgtgaaactagaatatctaataacaaagcacaggatacctgaactaccaaaaaatgaaagcaagcactcataaaaatcactgataaattaaccaccaggatgagataagggatcccacactgtggtcaaattttggtgggggtcatagtgatagctccaaagcacatatccagactccttgatgtcagacaaccatcgccattatcttgagtaagagcagacatagaattcagacaagatacaagaatgtataatgttttgggggatagctcacagtatgatatggaagggtaagtgacaaagatttgcctgacagcaggcaagagaactattgaaacacaggccctatctggtctctgaaacacttaaataaatgaagatatataacatacttgtggataaggatacataatcttatgtagacataaattcttcccatacttatctgtatatttaatgcaattctattcaagattctgacagaattttcatgaaccctaataagctaattctaaaatttacatggaagaatagccagtacacttctgagaaggaagagtgaagaggtttgttttatcaaatatcaaaaattattatgaatctatagcaattaagcaatggtagtactagtgcagaatagaatacaaagtcctaaaacagatattattcataagtaaaaaggttctagatgtccaaagtggcaggtcaggtcatcagacagatgaggactattcaataaataggataagaaaatatgattatccacttgggaaaaaaggttaatttcaaaacctaactcattccaaacacaaaaattagctgtagttgtattaagaacttaaatgacagggctgggcatggtggctcatgcctataatcccagcactttgggaggccgaggtgagcggatcatgaggtcaagagatcgagaccattctggtcaacatggtgaaaccccgtctctactaaaagtacaaaattagctgagcgtggtggcgggcacctctagtcccagctactcagcaggctgaggtgggagaatcgcttgaacccgggaggcggaggttgcagtgagctgagattgcgccactgcactccagcctggcgacagagcgagacgccgtctaaaaaaaaaaaagcacttaaatgacagaagctaactttaggacttttacataggtgaatatctttctgatctaggggtagaaaaggattttttttttctttatgaacacaagtacatgaggtttatttgaaattccaatttattacaagttcaccctttaatggggcccttcctccttgaagacaattaaaaaaaaaaaaacaattcgggtgtcactgaagtgggaacacaggattctcactatgaacaagaacagactggatgtaggaggcaggggaagctggcggtggtggggttatgaagctgtgatgtcagtgccaactccatgcctatagaagggatggtaaactacccagcagctctggagcaatccccgtcgtccttgggcgggaggatgggggaagcaggggtcacactccgcagtttaatattgagaggcttgattctcatgttctaggagctgcagtccccttggtggactttaatttaaataggtacagaagagcttgtgtgctcaaaatttccaaattcaaaggtgataagaaaattaaacgctgttttgtattttatcaaaatccatcataaaagggaaagaagactacaaagttttgcctaaatataacaactagaactagatttgttgtgggaaggggctctcagagcttctctgccgctctctcctcccaccccccactgacactgaccgctggaatcctcaggttcttgagttccaagtctgaggtcagaagggtcatgggaggcagtggtcgcagcaccgctccgcacccccccacctccaatattgctgcttgcctcaatgagcctccaacccaactgctctgcaggagaatggatgggctgagggagaagccagggaagttagagcaaacacattatcatagaaactgtactgcacatgtgccaaagcgagatgtcaggagtatcttacaagatgttctttatacaatatcactgctgaaacaagcaacttttaataactagaaaagtcaattaaaaaaattaaatatttaaattcttcctgcttttcttctgctcccctaagagcttgtctggtatgtgggagggctgggctccaacacccctctggccagatccatcaaagtaaaggttatatgcatgattataagcaggaccccagtttctaagtgaagtgcctcagttttgttttttttgttttttgtgtttttttatttatttatttatttatttatttatttttggttagggggagttgtcacaaagaaggggagagagattcaagaatggctccaggacatgtccctttactctgccaagatcaactcaaaagaccacaaacgtttcatgatgctggtgaatacagaattctgtatggcactcactgatattgtcacctgagaggaagatggggtaagagacagtgtatgggcttaaagaaataagactgtatataaatacagattaaaaaagaaaaattgccaccatctcccctgttggcctgattacccctgatcctgctatgtaacagagcaatccctcccctggagaccagaggggcttggcactgtggtggaagccagagtgagcagggccttaggaaagaaggcaggaacaggaactgggttcaccagaaaagctagaccctcagactcctcctggaaaccctcagaaggagggttatagccctcttcatcccttaatatttctggacaaagaccaccaacccagtatcaagccccaggatttcttaaacaaaccaaaaaaaaactgtatagaataaatagtagataaattttacaatatccaaattaataacttgtgtttatcaatgaaaagcttcaaggaagtaaaaaagacaaatggaaaaataatagttgtaacacttataattgaccatgaatttatgaataatatataaagagcttctataaatcaataagaaaaggatcttctacccaacagaaaaatgagcaaagacacaaatggtcttctcacagaaaaggaaacacctgtgaaaaataaaactaagttctttagtctccttggtgatcagagaaatgcaaatccagaacacaataaaatgccattttatacacattttatggacacagattaagaaacctccatgtgtttcagagtatgtaaatcaagaacatctcccatattttgctggtagaagaataaattgatacaatcaatttgggagttttttggtttaatttaaatattcatgtccccagcgatccagcgccactccaagagaaactcttgcacatgtacagcaggaagcagcacaaaaatgttcataataacacagttcacaatagcaaaatcttgatatcatgtctaatgcctatcaacaggagaatggattacaaaggagacaccattcacaacagcgtcctattgtaatattatatagcattcaaaatgctaatgagctctggccacacacagcaatgatgagattgtgtcacaaaccaaggattatgaataatccaattctgaggtccaacttataaccgaaaaaaaaagtggacaattttttttgaaaggacacccatttccctggtcagacaaatgctgtgatctcatccttgcaagaagcgtaagtgtttgttgcagaagaatttttttttaacagcaagcccctcttgacatttctcaactcaataccacaaacgaaatttctacccaagcaacccacagtgagataaattgggatttaaatggcagaggctgggggtttagctgcaaccagttttatttatgcatgaattcaggcagctaggagaggattctacagccctgatgataaaagttaacaggaacatcaagcaacagaatttgggaaggaaatggcttctaatcaatccatctgctggaaccaattgcctgagataaagccaggccacgctgttgaagatggataatcgggagtttattggacaaatgaaacagcagtgatagaagaggtaaagtcattgccaagaaggaaggtaattatagcaggaacagcagaaaaagctgctattagatttcagttttcccaacactgtttatgttctttccctgcaaaggctttctcaccctcctacaagaactttggagaatcagggacatgaacatgttatgtggaattttcctaacccaacctaagcagaggtctgtaaacttcctaaattctctgcatcagacaccggaatggagaaaaaggagaactaacccaaaaagatgggtcatagtcattagcagatacataggcaagaaagttaccaggctgaaaacccatgtctcagtgatctccaaaggactggtacaaaatgagacctctccacttccttgactccagacagtgactttaaaccatcaggtacctcatccaggtttgcatatcagacacagaataggatccagggcaaaaatagccaggcaactctcaaacacccatgaaaagacaaactcagttctcttctcagctcaaactctttctcctccaggaagccatccttgactgcccctggaatccttgaagggcttcttatgcaattgacaacagttttagtatatactcctattttggcacttagagaatgagcaaacattacaatggctatcatgatgttattaattcattagacaaatatccattgaatactacttcatactagacagtgtgctgagcattggggctatagcagcgaacacaaacacatgcccattttcttggggcctacttcataggaagggaaaactgcttcaccagatggccataatactgtatgtttgattacaaatcaaagcgagggctatgaagggcaggcagggtgcccagggaccagaccatgttggcaggagtgggactgggattccagaaagtaaagtttaaattgatttctgaatatggaaaggaagtaatgaggccgggtatggtggttcattcctataatcctagcactttgggaggccgaggagaatggattgcctgagctcaggagttggagacaggcctgggcaatgatgaaactccatctctactaaaatacaaaaaaattagccaggtgtggtggtgtgcacctgtagtcccagctactcgagaggctgaggcaggagagttgcttgaacctgggaggaagaggttgcagagagctgagatcttgccactgtactccagcctgggcaacagagactatgtctccaaaaaaaaaaaaaaaagtaatgagttgaaggtgtgaaggcgtgtgtgtatgtgtttgtgtagaaaaaaataaggcagaagaaatatgcgcaaaattaggcggcagatgaatcatgaaggctatcaagattccagtctttgccctaaattctatagaaacctttaaaggagtttgggatagggatctttaaaggacagggtaggtgcaggagatgactttcacattttgcattttgaaaaaaactcacactggatgaagaatagagatggtcaaaatgaaaatgtgaggattacttaatagccgattgcaataagaagtaaggagagaaatctggggctgatattctaatctcattgagggcaaagataatgaaaatctaatttggattcagaaatgaggagctggaagccaatatttttgcagtgacgaaataactcactaaattagcacatgtgatcatctgaaataaactttctactagattgggaactccatgaaagcagagatttttgtcattttttttcatctgctatacctaacacctggaacaatacctagcaaataataaatgctcattaaatatttgtttagtgaataaaatgaattaaaagcaaaattttgggacagtaatgctcgactcccaaagaatattatgaaaagcatgaagagattaatgacaatggcatggattaggatggcagcttttaagtgctctgtataaatgaaggaaagaggaaaaaaaagtctcagatctctaaatctgaggctcgatgtatgaactgaacataaaggactggactctgagaagactattccaaggaggaaagaacgtaatttcagatcagactaaattcactgatatggaagcacttgccagaattctaaattcaatgtcctagtacaagcagctgagagtggttctaattgtttgctcagctatttaacagaaatataaactcaacagtgatgaactctaaatgaagttgagatgccaaacttctctgacataatgtagaggaaacagtccaaagaccaaaaaaatattaaagttgatgtatgtcggccgggcatgagggcttacgcctataatcacagcactttgggaggccgaagcgagcagattgcttgaggtcaggagctcaagaccagcctggccaacatggtgaaacccagtctctactaaaaatacaaaaattagccaggcgtggtggtgggcacctgtaatcccagctacttaagaggctgaggcaagagaattgcttgaaccactgcacaccagcctgggcaacagagagggactctgcctcaaaaaataaataaataaataaagtagatgtacctcaccctactcacctataaccacattcccaaaagccactcccttcggcaagtgttgataaatacaaagatgaggggagtgctagcattttggaaaaacatgttagtgcctggtctccacaggctgtaaagtgttggtcaactgcagttgaaactagtgccctgatttcaacagagatgggcagagcacccacacaaacaccaggagtaaagtacctagcacctaggtaatcggcagagccagaggggtcgtcagaatgttctaacccatggagagagctggcagaggttaattgaccctgaccctgaaccttttacaaggcaggaagacctcaactcacataaagcatcacaattaagtatcatgaatacttaatacttcttagctttccctaaagggacctgaaactatttgctgtgggctgagtgtttgtgtcccccccaaaattcaggtgttgcaatcctaacctccagggcgatggtattaagagatggagcctttgggaggtaactggatcatgaagtgctagaataggactggggctcttttaaaagaggctcctgagagcttttttaccccttctgccatgtgacaactccatgacaaaatgccttctatgaaccaagaagtaggccctcagcagacgctgaatctgctgggaccttgatcttggacttcagtctccagaactgtgagaaataaattactattgtttataagcgaaatcatttatggtattttgttatagcagcctgaatgatctaagacactatttatcaggataaccctttgcactgaaggaaaggaaataataccacgatctttggggtatcattgaatgctggatcttgactaatcctaattcctggacatctggatctacccatgggtcagagtaggggctaatgcaggtcaaatgaaaaatagagtttcaaccctagtcagtccagtgggacctcagacctattcaatagctgttttccaatttcccgagtgtctgtttggaatagatatcttcagcagtaagataaacttcccgattgactctccctgaaaatcaagtgagggctaataaggccaaaagggcaaaatgtaaactatttccctcttcctaccaaaataacaacaaaaaaacatgactacatccctagagaaatcagataaatttgcttcctcattaactatttgaaaggtacaaagcagaggattccactcacatccctatattaactttctaagttggcagatacaaaaagtaatgagttatatagattgacagtggatcatcataaacttaatcaagtggtgactccaattgcatctgctgtttctgatatggtctcttactggatcaaatcaatacagaccctagcaacttgtacatggttattgacctgtcagtatgtttttccctttatctcaaacaacaacaaaaattactagaagcagtttactttctccagatagctatagcaataaaccttcactatccttcctgaggtccatagcaactttctgtctctgagctacacagtccataagaatttgaccgtctgaccagttaagagaagaacatcatgctagtctaaaacattgatgacatcatgctgataagacagacatagagggcataagttagcaggtatgaagtgccttgataagatacgtgtatatatggtagaaaataacttgtatgaacctgcaaaacttagttaagttttgtggaagctcagtgctgtatggtttgtcagaatgtactctgcagaagaaaaaacaagatgctgtcccctgcatcccatgttattcacaaagaggcacaacactaggtgagcctttctggatttggaagcaacagatgccatatttgggtgtgctgctctgatccactcactggagaagttgaaattctgacaacttttaatggggcccagataaagggtaagctctctactttttccaggctacaggacagaggctctgacactcagctcccacaagtcaggatttaacatgactccactgagtgaggatgctgtatggaactcacacaagttaaacatgccagacatttatagggcttgggagccaagttatgccctacttggcaagaagctattctcatttttcaaattgggccgttcctgactttctaacagacttaggaaagaagaaatgcctaataatggaaaccatactaaatggaaaccatattaatgcataggctgagccacccaacatagactggatgttttcagattcactaagtgagtcaaaaagttaaggatatgcattagcattccatcatccagtacaagggcatatacatggtcatgcctgttcaggccctggagccacaagaaagtcaccagaaggcttctccttgcctgcacattctggccacacagcaggctctctctcagcccacatcaggactgcctttagcatggatgggaaaagcagatttaggcataccacaaagatcactcggcaagtatgtagatgccatccagaagcgcactgccatagcactacaattacactcagtcaatggctcactttctagccagaatgtcatagacttaaaaggagcaagttttcaggctgggcactattccctctgacttcatctcctactactctccttctggttcatgtgactctggccacgctggcctcttatctgattggaggacattctattcgagccccatttccatgtaagcccccacatctactcaagccctcacttaaggtctttatgtttactgtcctctctgccaggagcaccctttcttgagttattcagatactttgtttcttcaccttttataaagttttcgctcaaatgcccacttcccagtaagcttcctcttaccaccatatttaacattgagtccctctcaacatgttacagctccttttcctgtaatgttgtgtggcacttatcataacataccatatacctattcatcctgtttattgtccatctcctcaaagtctcatctgagcagagaattttatatttggttcactgcctcagcccctagaactgtgccagttccatagcaggtgctcaaaaatatgggttgaagaaacgcacacgggtgtcagtcagccaaaaaggaataatgtcgtgaacatttggctttcctttggctttccagccaccaaactccctttcagttggttagaaactcaaccacagctttagtcttcttagaaagctcattcctcctaccaaagatgcttaatggggttagatattttctctcccaatgctctggcagctatggcaaaaggtggaaacaggataatcttacccaactttctaaatatgatgaaaactgatacaaaaatgcaagcactctaagagaatattgacaccatgctagtgcaagccaatgtccagctgtggaggaagtggcagggcgagtggaagtggcagccacgttcagcaacagccctactgctcagccctactgtggctgaggggatccaactgctctggggcccagactcccttggttgctgctcattttcttaatcttgttctctggacttcccattgactctgtgacctgcctagtgtcttaacaatccgtcattttagctgattaagttagtgggagcggacttcatcgttgcaatctgaacctgacagtacagaaggtgaggcaggggaaattattacagatattattacagatgtggccagaaagcaggagctggagtcatttcagatgatgctaaggaccatgatggggctgtggaagtaggaagctgagggacagtggaggagtgggtcactggaaatcaggaggtcaaggaaatgtgttgaggggttgccacatagacagggaagttaccgagcattatgtctggacttgggctggtgaggaagacagttatccagggaccaaagtctcagaagagtggtaggaagtaaacaagaggctgagttaaatagtcagactgaccccaaagagcaccatcttttttttttttttttttgaaacagagtctcgctctgttgcccaggctggagtgcagtggcgcgatctcagttcactgcaagctctgcctcctgggttcttgccattctcctgcctcagcctcccaagtatctgggactacaggtgcccaccaccacgcctggctaattttttgtatttttagtagagacggggtttcaccgtgttagccaggatggtaagagcaccatctcttataagagtagcagcaatctctctttctgaatccctagagtgtagggcggcaaatgtttgctaaggaatcaagtgaagcaagccttcttcatgtgtaaccatgtaagtgagagttatgagtaagagttaatttctatgaattctctctaaattgggtagactttttctgtcttcttcactcctatcccccagcagccgagaacagcgtctagcacaaagtagtcctccataaatattagtggaatatacaatgaatgaaggaacttagtctttcttttctccatttcacatctttcctgcttctgtgatattttattttcaatggctctaaaaaatagtcttataccacaattgctctctcagatctctgcctcccatttctaaacccagcaccctcttttatgtgtattattccatctccccgcaaatggtgagcagctgggtggccagaaccacatggttgagggaccctggactttagagtcaggggtattatctctcacactcagcatccacagaatgagggtgctctgataagaggaggcattggtcttgagtctagcatggcctaagtcattcgttcaatgaacttttactgagtgctgttgtgtgccaatcatctgctaggccctgaagcagaaatagtctgaaatcccaggaagaagttacacacatgtaactacagagatcaaaggttacagacacaaagtattggacctgctgctaagtattcctggtttccaatttgaccccaaccacttacttgctatgtgtgataaaacatttgtttgagacaataactcaaatctctccaaggttcaattccctcattttacctatgggaataacaactgaaaatagaattccgggcacatgggtaagtatcaagagacatgtataacctgtccttattctccatcttctttctctgcttctctgggcagtgtgaccaggcacacagcaagtgctcagaatttgaattgtcaaagaaggctggactacagggtctcatgttatattttagtaagcactgaccccaccccagtaagtgctgacttttgctacagaattgcagccatcagcatgcggagacagaactacgcaccaggctgcctgttgctccagccttatttgcagaagcaggggttctccagccaccttccccaaaacccttgagcaggcacaactgggtcatggttcaatgtcatagcccatttggctgtattggccctggtgtctccaggacaaggggcaggtatggctggcagacattcaatccagagggccacagtatccagctgacaacacaagtgtccttccacccttgagttatttgtgtgaatcaaagtagctctccctgatgattgtgaatgattagtagttctgagcatgttgcaggtagaaaagcaggtgtggggattccaagtaggaaagagaaggaagatttgggagaggatgcaggtccagcctgggccttgcaaaggagggaaagagaggaggttggcctatcccttagtgctcacgtgtgtggaggcacttgccccatctctgagcccaacagaccatgcccagactcagtgctacagctgcctcaccgcagatttcctgtgccacgtccctcctcctcacacagactctcccaggcacttcacacccactctcccaggcacttcacacccagctgcaaggtgctgtacttgtcccacagctctaggaaaaagagaacgatatggagcaacagttcacatccaacagggcagtctgctcgcctctgttccagtggaggggtgatccggccctgggccatgcaccgcagccttctgatgagctccttcatgagcacacagacttctgatgagctccttcatgccatgagccacaaccaaaccctggcatcagaaagctctccctgaaacacaccaaaattgcccagcttggtcagaattctgtaagtgcctgtagcaggtgtgaggaaagcagactggctctctggcctcccataaccctgtcaggggagataagacaggcttatgtagcaaatgctacaagacagacggcagcccatgccaaaatgtctgggggaactcgagttacacatgcagtgttctcacacagcatgacaacctgtctctcactccaacaagtcctaggttcttgattgcagctccgaggccaagagcaaacagctggctttgttacatgcacgtgactgcaggtgcccacgccttccagagctgtttcttccaaacctcctgtgagtgcctctggagactaccagccctaaacagccagccagaatgctggggccacagacaaagacttgctgctcggggagctctggcctgtggttgagaggatcagccccgccttccagctccatctccctgccccaccaaaggctgtgtggcaggaggctgccatgtgtttcaacagttaccacagactcagggttttaacaccacccatacaatattgtcttcttttttctcatgatgcaaccaaatatttttctgcacttgggtaacttcaagagaggatgcaaattccatccatgatgggccttctccaaaagatactgacaatgtgggctgaggagtttgcagctccaaatcagaaggcacagtcaggacacctaacactggattctggactgtgcttacaacccaggacccagtgcctcttataggacaagatggtgcctttgatcaaggtgaagccttccctctcctataaaagtacagaggaaaagagataggcagcttgaactagaggcctagcagctgcctcaaagcccactcagaaacacaaccagaccagtttggcatctgcaccacagaagggcctatggacccctgcacacccgcatccccagcgctgacaatgcttgtcctcacacagctgccccctccaccccagctgtgctctgcacaggcatgtgcccccttggtatggtggtgctcccctgggaacctctctacaaaccgcataatgcctcagccacctgctctcatcaggatgtccatagtgcccccatcagggagagggctcctggggactggagggcttcggggcatggggcatttcccctttcctgcccatgacccccctccattccaaccacaccctggccagccaggaacacaggtggaatctgtgttctcaattcacagttgaggaaaagcaattcacatgcatgctaggccctttgcagattgtccatttaatcctcccagaactccactgggtggaagttggcatctctgtctttcacagattaagaagctgaggttcagagaaggtgtgtgacttgctttgagccacacagctagtgtgatagctaatagtggcaggtcaggattcaaacagaggtctggctccaagccaggtcttcatgggccaaaagaaggcaaaaatctatttggccaaggccacgaggcatcctcagcatgtatacccagggccagggtggttcgaggagcacactgatggcagcagccagctcactggcagccctggtacattgccagcttcatcctagtgattgcagagggaaatatggccatgctaggcacaatgaaagcttggaatgcccaatctgaaataaattagctctcctctaactgacttaccatggggaaaaccatgacagacgtcatatatcacctaagccaaattcaatttgtacccatttataacacaaacatgtctcaggtgtaatgtcaacaagcacgtttagcattctgcacactcccctcagagggctggcagtgccctggccaaggtgagacagtgcacatccacttatgagcaaacttgttccaatgtgagggaaaaatcagtttcctttagataacagagtgggaccttcacacatttgcaaagtgccaggcaggagcaaggatggagcctggcacaggagaggagcagaagcagagccggctgcctagattctgtgtgactgacaggatggttcctggcgctgaccgactgagccatccatgctggatgtgcaggagtcgacactcgcccatgcagctccagcctgtgggcccttgtgtgcatatgggcacagccccagcacagcctgtgggctcaggggaatcaggctgaactgagttccaacctttactgcttatttgctcagtgaccttggcttctctaagcctcaatttcctgcctattaaaatggagtcaagagtgtggaggtgactgtaggtcagaggaagtaacagatggagtggggagagtggaaagtgccttgtaattcatcattagctccatttctaccatttgcaaaatcctaaagcatcatctgaggtcagccagcactacaggcctccagcatccaaagcccacaggacaggcaggccccacaggataaggcctccctggggagaagggaagcccttctgggagcagcatcttcctggttccttgtgggtttgatgacagtgacagctgactctggagccttttgttaaactatgtttactgaagttataatagacatatagaaaagtacaaaaaccctaagactagtgaattttcataaatgaacacacagagatgagaaaacagaatattagcagccccccagaactcttggagaccactttgcaaggcgtttttgtcttttctgattctcatatgtggttaattcaacctgacctgcctgcctgcctgcctgcctgcctgggaggacgataaaagtgtctgagagccactctacaatgcaaagaccatcatcaaagcttgggaggaatccacttgcaattgcaggtgtgatttaaggccttaatctcccaaatggaagccaagcaaatttttaaaaggcattaactccctatctgggcttctctgggtttcctggtaagaatctcaggagagactccttggcgaacaggtgtctcctccctccagctgagccttttattataatactataatgtgctcaacaatgctgtgatctgatctgatcagcagacaccgcccctgatgagtagggattaattgaacagatttctttcccccagaaaaagatattgatgacaccctgagatgtctgtttagggtttttgtttgtttgtttcattaattgtttttcttactcttttcttctgcttgaggctttttgttttttaaaaggacttcatttttaaaagcagtattaggtccacagcaaaactaaacagaaaagacaaagatttctatatcccctcagcccccacacatgcatgatctccacattattaccatcccatgcctcagtaccatgtttgttacaactgatgagcctacactgacacatcattttcaccccaggtccatagtttatattcaggttgatgtctggtttaaacctgcaaaattttcccattcacctgcgtagtatattctgtaagtgaaccctggagccatcggcttctcagaccacaggctacgctagaccctccccagaagatttggagagcttcaccctcaggtgtgtctgcaaagggcttactagctcttagtcagctgagggtgagctgcagcctgggtcccgggctgtctagagcagccgcatctaaaagaagtagaatgcaagctgcatattcaatttaaaattgtctagcatccactataaaagggtaaaaagaaaccgattaataccacattttacttagcccaatatgtctaaaatattatcatttcaacatgtaatcaatataaaaactattaataagacactttacattcatacagtcttctaaaccagtgtgtattgtacatttacagcatatcttaatctaaacgctaaattttcatcagaaatacttgatctgattttatattttataaaatgtatctttagaagagtcacataatcaagttgttccaaacatacttaaaattttttctaatacttgaatcaagtgtcagtttttaaatttaaactaatttcaattccatattattaaaatttaggtgctcagtagcaccggccccattttaagccctcaatggccacctgtgtctggtggctcctgcgtaggacagtgcagggccacagggtgaggccagggaggtcccctggtcagccatgctgcctcctgcccataagggtcattagccccaaaccccaaagtcagttaaaggatgaaaaaaaaacacagggcagttctgacgctcttttttttccccgaggtctctgtgagaggctagctcaaggccactaatctactggggaatggatggtgtcaaaaattccttttttggccaggtgcagtggctcacacctgtaatccaagcactttgggaggccgaggagggtagatcacccaaggtcaggagttcgagaccagcctggccaacatggtgaaacctcatctctactaaaaatacaaaaattagccaggcatggtggcaggcgcctgtaagcccagctactctggaggctgaggtcgaagaattgcttgaacccaggaggtggaggttgcagtgagccaagatcgcaccactgcactccagcctgggtgacagagcgagactccatctcaaaaaaaaaaaaaaagattaaaaaaattccttttttaagacctgcaagattcttgagagaccagcacccaaacaagggtcatatgttggggggccacaggatattgtaatcactgcctcctgggcagagcgactgcagctctcccagcctccaaaccccagcccagggtgcttggaggtccctgtaactcctcacgctgccacctgccactctgtcctcaggggttcccagcttggagaaatagaggccctgcggagggatgcagtagagagaccctgcccctttccacactaagatctgacctagtccgaaggtgaaatgtatgtcccaagaaagactgagaaaactaatcaaggcagaataacagtcatcactgcaatccacaccagcaaccaatatggcctgcgggctcactgtgtcctgtgcttcactgtaagcccttacctcgttgaactctcacaaccccacaagctaagtactaatctgatcccactttcaaagggtgctcttgaactcctgctgtctttgcccatcccgtctccactggctcagtccctcagtccagttttccctctaaaccttctctcagcaacctgctccacacccactgcttctccaggtccctgtccagacccctctcttgaacaccatttctttattacccactgcttgctgacaatacctgcacacataaaccgcaccaacactacacacccagcatgcccaaggccagactcaccacctccccctgaccaaacacattcttcttcctgacttcttgtgctccctgaatcatgtatgatttacacagccacacacgaaagaacccaggcctcctcccagactccgccttatatctcattggtctcctacctctctaagttcaattgcatctattcccttcagatgaatcaagtaagttcccttcctgtcccggcactacacatgacaagggcctcaccatgtctcacttaggctgcagcaaataaacagataagtatacaaaaataataatcatcatcacagccatgtctgtatgcctaggccatgagtgagtactcattaattatgttaaattaatgccttcctcttcttcctcttcattctctcctctacagtgcctctgaaccaaggccagccacttatgtctccagttgctgaggatggaataagagctgtcagatttccctagtcaagggccccatgagccatgaccagggttggaatgggcagtccgggatgagatcatccagtttacaaatgagtatgcagagacagccagacctggttagcatccgcaaaataacttgcttatttcctctttcccattcttcttccgctatcacccagccgtctggtgcaaacgacccatttaaacacctcagaagtgatgataagaagcaagataataaggtagccagcccccagttccccaggcagcaatcacggtgtgtaggatagagtgcaggggcctctctgtcgctctcatctgtcacacatcaagtgagaaaagatctattttttccctaggcagcatgcctacaacttcaattggcctaaaataagcttggctaaattttcttgtgagacgctctaaatggtacacagtgatccatgcaaagtcactgcgaggagcctcaccatgacgtggatggtgccggggctccataagatgagcagatctgagccaggtgagggctccccccaaaagttagtttcccttgttctgagccccacctctctggctggctgcaacccagacttgcttctgtccacaactctgcttcccagcagcctcacagttagccggctgggcagagcctctcctccctgcccctagtggtttcctgccccatcactcacttctggtccagcatgcaagggtctgcctgcccctagcccagggaaacagtgggtgggtatccccacccctatctgccaagaaaacacccaaacagggaaaacatccacagagtagataagatgaggccagtcatcctaggatgtcatctgggccccaggagtctttataccaggctaattccaggaaagctagcctgaggagtttgcagtgtcagtcccaatgttagtctcccaaccacacacatggtttgaaactgctttaaacaggaatcatgtgataagagaggctcaaaatgcagcaacatgtccccatgtggccagaatagtttgcgagaaagcagccctgatggagaagtcagtccacagaggctggactcaaatcctggccccctctcaccagctctgtgacccggacacatggcttcccctggctgagctgcagaccacgaatagtaacagtaccaagtcttccttttgggagcactaggtaatataatgcatgtaaatgtagtggttatggtggtttgctcgtttctgaagcattgtcctgctatcaaaactatgcagctcaagtgcagagaccaggccttgaatacgagtgattccaacaagagtaacttgactcacttgactcctcacttcctagtgatcacaagcagccttattagaattggcttcccccttgtagctttcctacgatagtagtcacaatcaaggggttccaccaattgggagcacattctatgtaccacgtgctttccaaatgctgtcctttctaccccaaccacaaccccagaacaggagccattatctcctcggtttacaaataagaaaacagactcagagagggtggatgtttccttcaggtgtcatacatatagtaagtggcagggctgaactttgaacctggagcagaacctgatatctgtgccctgcactgtgtatacaagcggatatcatgcagctcagccagtgtgagacttcagcctggacagtggggcttctccctgtgaatagataatcaacccagttttgggacctggaataatgcctctggcccaatcactcccctagaactccagtaaaattgaattttgagcctgcaaaattgaaaaacacacctctgttctgaggaacctgcctctaagctctgtgcctcagggtatagtccttctgtgccctggggcaggggagcagccactttccaaggccacaccaccctctggcttgttcctacagcaagaccttcactggcactgccctcaaggcccaagggggtgttgctaacatgcacaacacaaacccatccaatcccagagttttgatgataattcgctccaactaacatatgtgcaacatctatattattgcataatttatatacgtttcacactatttgtttgggatataagcgccacaccacaaactatttgcatatagatggagagttataaacatatgcttgtatttgatgagtaatatctgaaacacacacgcatacatattgctcttacaagcgcagaaatgcttgctttctgccacaacttcaagtgcacagtgatcctttaacagtttgttaattttcaaaatttacaatactgaattgtccatttctgaacatataaatgattttcaactgcttgatgagctgtggctgtcaagtttcagaggaacggaggatgagggtttcaagcagctttacttcagagaagctaggactcaggctcgcttttgttgaaatctccactggtgctggctgtcaaagagaaagccattccttcgatacagtttgccatctacaaccaagtcaactatgtcagtgacaaaaacctaatatgtacttaacaaacacacactcagcttctactctttgccagacactgtactcagcataggggacccagaactgaacctaactggtgagaagcaacccagacctaccctggagccagcacatagtaaatgctcaataaacaacagtggctatgctggatgaccagagactggtgcttatggtggcaggtccagccctcatgtggagacgtgtggggtgtgaatcccagttcagcacatgctggcctgggactggagaaaatgcatgacatgctctcagcctctgttcctggcctgtaaagtaggagagcaccactctcacagctgcgtggagacaaagaaacaacctgtctaaagcatgctgggctaagtctggctcacagtggggccatgggaggcaggacaaagagctccactcagaaggagcagcctgtcttgagggtctcctggagtaaaatcccagacttctctatctgattattttctaattgtgggaaaatatacatgacataaaatccacaattttaatcatttaaagtataagatgccacagcatttaatacatcaactgtgtctagttctggaatatttttatcacccccaaaggacaatcttatatccattagcagtcactctccatttttctttctccgcagcccctgcaaccactcattgctctctgtctccatggatttgcctgttctggacatttcatattaatgcagtcatgggatagtagtccttttttgcctggtttctttcacttagaataatgtgttcaagttttatccaagctgtaacatgtgtcagaactgcattccttctcacggctaaatactatttcattgtatggatatgccacattctatttatccattgagcagttgacaaatatttgaattgcttccattttttggctgttgtgaacagtgctgctatgaaacccttatctgattttagtggctgagacagctttagttccagtttttcaggtgttatattcctgaactcagatcatcatatcctgcttagggagtctgcagctgcttctcccaaggtccatttgagaccaagtttccttcaggaaaagccacagctgacggcttccagtcacatacattgtttgcctttgttttgcctacacatcagacatcttgtttcctcagctcaggtttcctaattgatttattggcataaaatcaacactcacattatcacaacagtcattacagaaactgctcatcattaacctgtacctattaccatcatgaatttctcattggctgtatatagacaagagaataaacattgatgaacactgggtttgtaccaggctgtgtgctggctcctttatgtacatcatctgactaatccttctaaccactcctggaggtaagagttaataccccgtgatgtatggatgagaaaattcggctcaaagatgtgaggggactcttctcaaattacacatctcacaagacgctgagatgccattcacccaccaggtgtgtgtggctctaaagctgcctcctgcatctccacccaatacttccttgacaaataattatgagcaaggagccaccctagcctgctcccactgcatatgtgtgctgccccaccaaactgtgcactacagcagctgtgcaagtaatcaaagcttccatctttgtatgctgtttgggggcaactctacccctttcattctgggaaggttatggaattttatatactcatcaaggctatggaattaaggtcccaggccatgggattagaagccagggtcactggtatggaccgatttactgtctgacttcaggtgagtcagtccaccgaagtgaactggccctggtcttcctacaacaaaacaggtatctgttatctgccctggaatgctctagaaatgatgagaactatctttagatattggaatctttaaatattcatgtgcagattcacatggaatagctgggctcaaacctagagaaggggggagcatgtgatgctcagtctttaccagagatgacttgctcaggacagccagggctcccctcagcatacctcttagccagtgcccagggcactggagtatccacccttctctctgaaaagccacctggtaggagggactctgggaaagggccattttcatctcaaatgacaggtttgtaactaaataaaaattgtgtcatcatgagcaaaatatttatacttaaaaaaaaagtcccagctcttctagtagacttccaaattgtaaaatctaaaggtaagaaatgtcccatgaattctgaaggatgggaggcaagaaagctgattgctttatgctccccacttagcccttacagcaacccttctgatgccagtccccagatcccttctcctcccttaagcatccctctaatgctatactatggctatccacagtgtctgtgtgctggtgagtccccaggtgtacctgcagctccagcctctcctctcatctccagcatagtagatccagctgcctccttcaagcttctaattggatttctcaaatttaacatttccaaaaacacactggtttccacttccccccaaaacccactcctctgtcctccttgtcattgtagcaaatggtctcaccattcttataactcaggccaaaagtgatggcactgtccttgactcttctctgaagactcacatccaagctctaagaagattctgtcaatctgccttcaaaatacatccaaaatctaggagaggatcacccaactcacaggtatttgagaatatgaacccatgtctgagctcacctttaagaggtcttatctgagattccttgtggaacagagttccatcaaagccaatccaaaaggcctaataatcattcttgtactttatgcaaataatcacgccaagtataagactaaagtttattctatgaacaacatgtcccatcataatttgtttttaccaaaaatgaggactggagagagaaattatactccaaagcttatcatacatttgtcattaaatcctagtcacattaattatttttaagctttttgcctatatttagactaaccttgcttattcttgtgaatctagtggtgatcttctgaagcttgaaaaaaacaaaaagggatgggtaacatagaaatctggatcaatatgctagttctgggcaattaacctgcaaattctgccaggtaatgaaagtgagtagggtgtccataacccagaggtttctttgtttgggaaaataaaaccaaggaacttcatagacccccagagggaaattctatatcttggcaagtaaaattttagagggaaataatctactatgttacccttgcaggaattgctatacttactctactatttgcagtagagctatacatggtagcaccttctaactgaaatattggacagagaatttccattgctgtagaattttgcttaattcttctctttaaagaagggataatagttaccaacaaaaaggaagcatgaaagttttactatcactgagtctactagaacttctttttggttttggtagtatatcacaccctggctatgtaaagaaggttataaaggaaagagattttatataagaaaggatcttgtatggtaaatgcttttcctaaagagaacggttggtttaaaacaaggatatttaggacaagacagaaggtttaagcatgtcttagatggtctgtggaagtcacgaagggattaataattgcaggaaagattccccaaaggttaacaataaagtttctctaactacccaaatccaataccatttatcctaaaaggaatgttacttgtatattaacgtttcagctacatctggtggaggcaaaacagtgttactacccatcagaatggttgacagcaatcaaactccaaatggtgctgcagatagaaccatgcatgggcatgccttcttccagggacccttagatcaaccccaggaggagccctagctgctattctgcacatgatgccccttttcagcagtaagtagccagaaagagtcatcatccaacactccctaacagcagttagggttaccactccagagtggggaatgatataggagttaagaagaaatcatttaggcagatagtaagggtatgggagtcctcagtaaggctttccttttgaatgaaaggcagctccaaatcattttctaacaaagagcagcctgtaaagtcaggctgcagacatagacaagcaagctgggagcttgcacaggtgaatgccagcaggaactaaggactagacatgttcaagatggtggctccatcttccttctctttgccagccacgtgtacagtaaggagcaaacaagatggtgccttctgcgtgcactatgtaaacatcatacctgatcaaaccaatctgtgagccctatgtaaatcagacactgcctcctcaaacccgcctataaaatctggcacatttgccaccagctggtcctttccgcttggagaccttcgtttccacagagagagctgtttctctttctcttttcttctgcctattaaacctccactcctaaatggaaaaaaaatccaaaatataaagaaaatatggtacatatacactaggtaataccgtgcagccatacaaaagcacaaaatcatatcctttgcagcaacatggatgcagctggaggccattattctaagcaaactgatgcaaaaacagaaaaccaaatatggcatgttctcacttgcaagggggaactaaatgttgagtacacatggaaataaagatgggaacaataaacactgtggacttcaaaagggggggcaggaggagggtcaagggttgaaaaactacctatggggtactatgttcactacttaggtgacaggatcattagacgcccaaacctcaacatgatgaaatatacccacataacaaagctgcacatgtaccctttgaatctaaaataacaaaaataacaaaaaagcaaaatgcatccagaacctgaccactgtttaggttttccacctctgccccccctcatcaaagcccctaccacctcttgcctgggttgcttccacagtgttctcaaaggcctccttcctttcccttctcccaccatggtctgttcttcacagcagctctgctcaaaactctctaacagcttccatcttaaagtacatttctttgtacttttgtaatttctttacaaagtcccacaaagccctacctgacctgttgctgaggtgtttcttgcatatggcaaatacacccctgctcagagtctttgcactggctgttccctctgcctaaatgttcttcccctacgtcccattggttcactctgtcaccaccttcaggcctctcaaatgcccccatgtcagaggggccttctctcccctccccacctttctgtaatatgaccctcaccccatcttttccccttactcatcttcaccatatttatatctatgtggttatctggttgttacctgtcccacttcactgcaatgtaggctccatgacaaagggggcttagtctggcttgtggccatctctctctgaatggcatgtaataggtgctcattaaatatctgtgagagggagggaggtgggggggcagcccccgcccggcagccaccctgtcctggaggtggggggcgcctctgcccggccaccccgtctgggaggtggggggcccctctgcccagctgccaccccatctgggaggtgtacccagcagctcattgagaacgggccatgatgacgatggcagttttgtcgagtgtaagggggggaagtgtggggaaaggaaagagaaatcagattgttgctgtatctgtgtagaaagaagtagacatgggagactccattttgttctgtactaagaaaaattcttctgccttgggatgctgttaatctataaccttacccccaaccccttgctctctgaaacatgtgctgtgtccattcagggttaaatggattaagggcggtgcaagatgtgctttgttaaacagatgcttcaaggcagcatgctccttaagagtcatcaccactccctaatctcaaatacccagggacacaaacactgcggaaggccgcagggtcctctgcctaggaaaaccagagacccttgttcacatgtttatctgctgaccttccctccactattgccctatgaccctgccaaatccccctctccgagaaacacccaagaatgatcaataaatacttaaaaaaaaaaaaaaaaaaagagtacctccttgataccagctaatacccattcagtattcaaatttccctgattatctcaaaaatgtcatttctatcaggtttttaaagaataaatcaggatccaatttaaaaaataaatataaataaataaataaataaatatctgtgagagggagggagaagaaattttgcaaacatgaaaattcaagcccagaaacttaagctttccaagattcaaacagctagaagacagagaagctggaatagaagcctggcccacccagctttgtggcctttgctctttcttcagtaacgaattgcctctttgggccacattctttgcaaaaattgaaatcactgtcctgagtcaagcagaagagctggagacagatgtaatttccaagaaaaatgtgaaaagtaaatgttatggtaacaaattgcccatgatctaattatcatcatcaaacatttctattaagagcccatgagcacttgctgcccggcttggtacgctcctcagagggagagaggagctagaacagctggtcatggaagcccatgaggatgaatgatgcttcagtctctgggtcatccaaggggtgggaagaaaacaagagttggagaaggctgggaattaggtgtagatgagataagaagtggacttcactttcaaaaatacaatcaaactctgcagggagaccacctgaagcccttgcaggggggcagcagtcttgcctgcagaagtgtggactataagacagccccaaggaacatccagacagaaaggaacctctgtgtcctccccatagtcccaggaagatgggccacccggagccctctcagttggccactgggcctccaggctggacagggctccaggccagcaagaatgtcagctctctctcccatcacacccacagaaccagtggctcactaggggtcctaacaagatggaaatggtaaccactcctaccacagcaacaagtgcccaattcccaccaaccagctccagtgttaaacatgctggctgcattccccctgagttaaggaaaaagaaggatgccaatcagagggtgtcaccctgtgtcacctcatccccattgaccctggggctgcccctatggaaactgaggattctgtgtctacacttggattcattgaaaaaagtcttcaggggacaatgttattcaaatttacaacttcagaattataaattagcttattttaagtaaacttacccttcagagtaatcaaatggaaagcctacagctcccgctatgttgttaatattcgatttttttaatgaggtacttatagatgtgctaacgtagctaatggcatcgaggtaacagatgtccttgtgagttgcccagaaaaagggagaaatttaatgctgaattgagagtgttaaattccatgtgtgtgtgtgagtatgtgtgtgcagaatatcaaatatataaatatttttaaacaagatctgtatttcattttcaaaagtaaccaaagaaggcaaatggagggaaagacaccaaaatttacccaccagctgctaatggcaggcattctgtcaggccctgcacagagatcacctcactgaatctttccagaagcctggtgggtttagctgtctccattttagaggggaggaaaatgaaggctccaagcagttgcccatagtcactcagattgtaagtgatagagcaagaattcaaatccatttctgactagttccaaagcaaacattctttccgcaataccacactgcttcccgggaaccagttgaggctttgcttcctggtaaggggccttccctgggctcccctggcatctaggatgtcccctgtaatcattttatcatgtgattacaattacaatgatctgtttcctctttggcctgcctcattggcgtgtgagagtttctgaaaataagggccttgtctatcttttcctcagattgtgcctggatgaacagatgtatgatggatggatggacctactgatgaatggatgcaatgaatggacagatcaatgggttggtggatggatggatgaatggatagatcaatggattggtggatggatggatggatggatggatggatggatggatggatggatggatggatagatggttggatggatggatggtgggtggatggataagtatacaggtacatggaatcactggggacttactaaatctaggatctaggctccagggagcacagtcatttggaaaggaggtttttgggactgggctgtctttgggacaagatctctctccctggtcagtgtctataaccaccctctcactagcggccttgattttacctaatcagttctaataggcctgttatcccttcatcatagctggggctgagactttacctaacagttcaggggtggatttctctggaaagggaagctccatgctaacagatgttattcttattcgtagagctttctaatctcttccttagtcgtgctgaattatttgactcaatatcctgaaggattgagttccaaaggttgattaataatatgttgccaaaaaagggtgtctattttaaatttgcagccttttaatttcatcaagtgccctcttgactatgaaagcatggatggtagagagtgtgctgtgcaagatccagctccagacatgtgctcacaggtcccaacagaggaggcactggccacacaagcaccatccactgtgtccagagtcaaagcaggctggcagcacagagcaggtctatgaagggttcccagagtcccctctcaatgcaggactttttgtacattgaataaatattttattggtgaccactggtgccaggccctgggctaggcactaggtgtgctttggtgaacaaaacagcatagtccaggagggagacagataatgagcattaaagtaaataaataaatatgtttataatataacataatatggaacataaatctataaataataataaatagatataaggtgagatacacaggcccagtgaaaatagcaggtgctttaagagaataaaataggggtggtaaaatatggggaaatatcagcacactggcaccatcaaacacttggaatgggaggctcaggcgaaagcttttgagagccccctgcagcccacctcaagtggacctgggcgtgtcttcaaaaggcagggctgtgagggcacatcgccaaatgcattacaatcagttaggaaaaagggaaggcaggtgatcagcctggtatatggagaaggaagcccagagaaacagaagtcacagaactcatgcaatgcagttgggggaaaggtgtgtaggaccccaggcctagcctgctaagccctgggcagactggtactgggtggctacgacaagggacattaccactctaagacagtccgccttgggctgggcagactctccatgaggccatcagatgctgtcctgggatttctggccttgggtcacacatgggttttcttggctggttgctgtgggtttgtccctggaaaggaagtccttctaaatgtcctgacaaaatcgagctttgaggctatcagtccaaatgcccaaccctgcaccctggcagatttcccaaggaatgctgccatctgagaagttttggaacgcagccgcaggcactgtgaccacatcgccgttcccctgttcacctcgagcctgtcacctccagccccaagaaggaccagccagaggtacagaactgatttctccagagggccaggataccctcctgtggccctgtcctgcctccctgtccctgaagggctcagaaacaaaaggcttcagtgccaccttgtgagaccttctcactgcagcacggtgagagtgtccaccagctgataagcaggaaggctctccaccgcccacttggtgaaaaaggagtggacggggacttccagccttacagagcagatgaggatcgactgaaacacacacttgtgacccaggtaacccagacaccagcccacggcttctgcagcctggagggaacactccagtcccccacactctgccacttcccattagtggttaaaacaatgtaggctacattacaaatcaaaataagcaacaaagcattttataattagccataacttgacaaattaattagtacaacagcacagtgtgttccctgaagcatggctcactatattttgcttagagaatatatgtcacaaattacagatgtgttattcaaggtacttatgcaatcagagtgagttctaaaggtgcccttttgataccactttctggaacggaaaatggggctcgaggtagctagaaatatcatcgaacctgccgtccaagctttgagcaacaaaggtacttgcaaagatgtgcttcttttccagaaaggggaaccaaggctgtcaaggaccaagatctggctttggaaagagttaatcacactttgttacttgaggtggtatgaaataagggaacatccgggcctcaaaaagcagggagcctgatgatcaagaacatgcaagcttggaatcctcactgccatctagcagctgtgtggtgtcaggcaagtttctcatccagaaaaggatatagtaataataatacccaccttgcagagttactgtgaggactgatgtgctactttatgcaaagtgtttagaccagggtctgttccataggaagaaatcaataaaaattgctactattattctaagatgtgcttcccttagaaggttcaagaggttattgtcttaggaagccttgaggttggggctaagatgcactacagagacatccctttccccagggacaggcctagtattagccttgttagttcagaaactcagaaactgtttatctttgaggaataaccaagttcaaagaaatggatgcatacaccaaaaaaaaatgagtggggtggcagtgagagctatagtcaatggtgtgttggtaaatgtttaacatccagctctcgggtgggcgtgggaagccctgagttgtgcatttgctggtttccatgctataaatactgccattgtatgggctgaatgtgtccccccaaaattcatacgttaaaggcctaatcctcagtactttggaatgaaactgtatatggagataggatctttaaagaggtggttaagttaaaataaggtcattaaggtgggccctaatccaatatgactggtgtccttataagaaaaggagattaggacacagacactcataaggaagatcgcatgaagacatagggagaagataacatgtacaatctaaggagagaggcctcaggagaaaccaaccctgccaacacctggattttgaactcctagcctccagaactgtgagacaataaattctgttgtttaagcctcctggtctgtggtgctttgatatggtagccccagcacactgatactcccaccgtggccagtttcaagctatcagtgtaatgtctccaagtgatacaccattggaagagatgcatatgattggctcccatgaacagctacaagccaggtacgattacaaacaccagctaaatctgagactcagattgaaatcttgcatccactggacatgctacagtcttttcttggaggtacagctcttgggctgctgaatcagaagcaagaggtgactaatgggacaaggggacttagccaaatgtacaatcatgtgcagagctgccatgtttgctcatgagcctcaaagcccattagctttcaggtgctgtgccctaaacaggtgatggcactgccagtgaaaccataccctggaagtccagggatcaagctccaggcccctttgcactgtgttcagacacacatggccaacattggcctctgaaattcctttgtcttttcttctgggcagacaaacctctacttccacttctcagtccttctaaatatcccattgtgtcacttctctttaacgtaactttgtgcatgtctgtgaggatctattgtgtgttggctaaagtgatgacttgcagaagatggtcttatttctgatttcctagttcttgaagtaggggagtcatctcacaacagcccctacccttctcttcaacaggctaaatctgtaactccaagccctagtccaagccaacgttattcttgtggtgagcaaaccaagcaacaaacaagcccagccaatttcgctttccaagcaggtcagaaatccacccctattctcttccacctctacggtatatccctaccaccacttctttcctttaggtcttgaacatctgccaagactattccattgtctcctagctaaccacttttctttcatctccccacttcccttccttccctcatatgctcaactagaaagagaatcagaatgcaaataggaccttgtcattcctcactcctaacctctctatggtcattttcccctattcctccaccctcaaccttggaagttctggagttcatgacacagctcatgtcaattcaccactctgtgaataaatagttccacttaaaattcccttttggtacctattggactacctggaacagctcctcttcacccttcaaaacccctttctgagtttttctagcccatgttaatgaatcattatgagggaccacttgctccctttccccatgttttatctcagattttaattaagaaattttaccccttaaatgtatttttaaaaagctgttgtccttttcttcacctttcacaagcttctctccttgggaagagaaaggttttacctgcttggtgagaagggaagagtttgacagccactggctcacctaactctagtggtggccagcaagagtgagtagaagggcgagctgaggcccaggctgggatcccccagcagttgaccaaacaaggatcagatctacagaccaactgtctcaacgcgtaggtcctaagcaatgcatttgtcgggaaatagtggaaaatccatttttggtctcagctccaaaacaggtctttaatccaccaataaaatagagacgtttctctctatctcacttgtatgtatgcttctgaattagtgcagaactcacagaagagtcaggtataaataattagcccttggaagccagaacttgtgtgacaggaaaagactagcacatggagtggtaattatctgtcaacttgtcactctccccctgtggatcagaagcccctggaggagaggtctgagtcttttctccacagaacgggatgcaatctgagaagcactgagtgcctgccgcatttcaggtagggcatccactgttgtggggcctgaaaaagcagagttaagatggtctctggaaatgggaatccttatacactgttcatgggaatgtaaatgagtatagtcatcatgaaaaacagtatgcagtttcctcaaaaacttaaaaatagatctactgtatgacccagcaatccaactacagggtatatatccaaaggaaataaaatcagtatgttgaagagatgcctgcactcccacgtttattgcagtgctattcacaatagtcaagataaacttagtgcccatcaatggatgaacagataaagaaaatgtgttatacataaaacagaatactattcagccataaaaaatgatgaaatttgtcatttgtgacaacatggatgagtcattacgttaagggaattagccaggcacagaaagccaaatactacatgatctcactcatatcttaaaaaaaaaaaaaaaaaaaagcccatctcatagaagttgagagtagaattgtggttaccagagactgaggagaaaagggcaagggggaaatggggagaggttggccaatgagtacattgttaacgtttgttatgttagataggaggaataaattcttctgatccattgcaaagtagggtgactatagctaacaatagtgtattgtatatttcaaataattaaaagagagaattttgaatgttcccacaacaaagaaatgaccaatgtttaaggtgatggatatgctaattaccccgatctgataattacacaatgtatgcaagtgttaaaacatcacacggtacccccaaaatatgtacaattattatgtgtcaatttttttttaaagttggtctctgggcaacaagatccaagtgctcagcagcccaaggtggggctgtctccacaatggtagaattcaggtgcagctgcacaacttggctctctctgggctctgcctccttctgcctctcctctcctgcgcagttcctgatacttgtcctctttcccactcagcctctctctcacacttgcttacatgtgtcatgcaagatgtggctgtccatttgtgttggtgctaaccacttcactccacctattcatccacacggagacctcccagagctccttggtccagccattattaaggcaggtctgctgacatctgtttcctgcaaaccaacccagggtgtgagtggttgggcaggcccttgagccctagtgaggcctcctggaaggcgtgaagtcttgcaaacaccacaacaacagagcaaaatgtgcatctgcttgcaccattactgcctccaagggcttagggagaaatgcaagcatgtttgagctgcaagtgcattagccacatcctgttccatgatccacaagaaagctgaccttatttagaaacctccctggccagtgctgtgtattgggtagagacctgaaaagagggggcttgcaggtgccgatggattgctttccatagtggggccagtcaggggatgcacctggagcagcctgagtatcctgagtacaggcttgggagtcactcttcctgggttcaaagcccagtaccccatcattctagctagataacccaggacaggtcccctgaccatcaagcctcggtttcctaatctgtaaaatctgttgtgtcactcagagctattacaatgtgtgagacagaacactaacatcaagtctgtgacccaagagtcactatgtaaaccccaagattatcagctttgtcatctgaaaggaggagcgtgagtgtagagctgcctgctggagccctgacaatttccaccacttttcacccaggatgttcacatgtcccttaccatggatatctggcctcacgctgcctgctactgaggaccctgtcaggcctcccacctgggtaggtgaaccttcctatcttgctgccagctttaacctggggatttatttaaggggaccaatcaaagccaaccctcttgcttagtggcagccctttcccaaccaccaagctgaaagaggaacaggtccaccagctcctcagacagccctcgccatgcaagggggaaactgggagggtctccagaggggccttatgagggcttcagccaaattctctaaagaagttcatccagtccttaaagccaccttccttccagaaagatggctttcgcaatcccccctgggacagacaggaggtttttctgtgtccctggggtctctcctcagctgagagaagtcagcctggcctgatactcacgcctctggccccacagactccaggctcacagcccaagaggatgctgaagactgggaggctccatgagagtcagggaagcctctgggtgcacagtgtgggccacagtacctggaggaaagggataccaggaagaggggcttcaccaggagagataaagccctacctgagcagagtcccaggaccaaggggagagcaggggctctgtgggcatcaactggaagctcagtggtccaagaagcttctggagcatgggggcctggaaatagcagggggtattgtaacacccaaactgtaggctaacagcaaactcaagacctacaggatgcaccaaagaactccacaggaactaggggacttgccaggaggaggtggtggccctgcccttgcttgaatggccaagctgtactcagagcatcttcatctttacctctaaacatcatagaaagcccaagatgccaacacagagaaaaaactttctgagaagccatcaagatgtttattctagcctgggcacagtggcttacacttgcaatcctcgtgctttcggaggctggggcaatagcatcacttgagcccaggagttcaagatcagccagggcaacatagtaagaccccatctctacaaaaaagtaaaaattagctgggcatggtggtgtgtgcctgtattcccagctactcgggaggctgaggtggaaggatcccttgagccagtgaggtcaaggcagcagcgagccgagatcaatcactccactgcaatccagcctgggtgacagagcaagactgagtttccaaaaaaaaagaaagtgtctattttattagacatcagagagtggagttacataccttcgtacacacaaagatatacctgaaatccccaactggggaacattctcccaagccccaagcccctcatcacaggcaaccagccagggactttctcccggaactctcctctctaccagcccttgtcctccatcttgccagacccctcagaagaaggctatcaagaatctggggacaagacactggaaaagagctccctctatacctcgatggaattagactgacataaggcagaccttcctgacagccaggggcatggagctgcacctggaggaagccagggagcccaaggcagtcctcccctgggagtgcatcctgcaggcctgagcctgcagctctcctgcgggcctgttgctggcagcctggtgatccttgccctcattactggcaggctggggcctggaggagcaggaaagggcacaggtgggcaggctgcaggctataggtgacctaccttggctctgcatccagccagagcttcaatctgatctctggcaaattcacagctcaattgaattcaataaaaccgctccggaactgtacaatgcatcataaataatccaactacaggatttttgaacactttaacaaatacagtttcttctcacatcctccatttgtttcccaaatgtcagcccttacactgaatctcacaaatctacaaaaacttgcattttctagaactttaaataactggatctttacctacaaggtgaattatccccaagcgatatgagcatgtgagatttcaaattttagtgatgattaatgcatgccaatagaaaatgaaaatgaagctcttttaacatgatcattgaaagacttaataaacattacctacatgtgctcaatagtaagaaagtgagttacagattattatataataccagttttacatctgttttcaatagtccactaaagaaatgtcagatattttaccaagcccccacacagaaacactgctcaagatagcagggttttcaaggtcaggaaatgaactacactgtgttaaactccatccccagagtctagcaagtggcaagcacataataagtgccatataaatgtttgctgaatgaaggggtgaagtggctaatggcatttcattgcattgtttatttttaaaattctaggtaaagacctgcttcgtttccctacttgcttgctaatcatagcacataaacttataaaccagcattggcttaatggcttttgacatgctagtgagtgactttacctcggttacattttaattgctggtctttttgctggtctttctgcagtgctagaactgggacattgctgatcaacagaagatacccgatttgcttagtaaagaagaattaggcattcataaaagctaccctctcatctgcatgtccaccgagggtgaattatagcccacctggttttcccagggtcctgagacctcacctcccctaaaaaccttactcaaaagaggcacatctatttatcatatcacagaggtgccgttacagggtcccccatggaatccccaactcttagagatgtgcaaccatagtatgtggcaggggaagagagcaacatgagtgatttccaggcttcgggggaccttgcagaaatcacacttttctctgctagaggagaagcaataccctttgttcttgggtagaacttggtggctcgttttgcaggttatctcatacaggccaaaagtacattctgtgtagactgccgaactggatgctgtagcaaggagccttggtggagcgcaagagcatcccagggccctgagtcagtgccaggcagaatcacacaaactcattgcatattcattcctcagatgtttattggcaactactatgtaccaggccctcctcttgacactgggatgcaaggaccacaaatccttgctccggcgcagcctgcaatttaggggaaattgttcatatgcaaagagtatgtagcaagtgttgtcaagagtcaatactcttgatttgtattaactcattcaatccacacaataacacattgtggtagattctgttattgcttccagtttcacatgaggaaactgaggcatggggagattaggttatttgcccagggttatgcaactattaatggcagagttggaattcaaaccctgactctgcttcggaaatcttcacttgcaaccactgcagtggctttttggaccgaggtctcgaagcactgggtgaccacatctacacatgctggagcagtactgtagagcaaaatggacatacaatgtgtcgatcaacagagtaatatggtaggggaaattattttgacaagcgagactgcgattttccttaggaagagacacttagggcaacaacagacgagtcacgtcagtcctcagggtagcctggctccaaagcttcagaggagaggaatgtggcttatataatacaagagaagcatatggggctcctgagaccctctgggaggatgaagataagcaaaagagatggagagagagtggggagagagagtgagagagtgagatggtggaaggaaggcgaggcaccgagtggtggttgactgtctctgaatactccatccagcaaatcttaaggaacatctatcaatcttcatgaccaattgtcataatgactggtcattggtgtgaaggccgttgttatggttggaaacagaggaggactaaggttcacattgggaaaggtgtggtgcaagacagaggctgcactggctgaaaccgtagtttagagagaaaggatgccagtggtttacaaactcttggggagatctctgagtgagctttggacttccactggccatggacttgagcaggggattttcaggtgattttgaagtaggaggtgggactcaactctggagtcagggctcagacaccggaccaaattgaggactagctaaaacagggatggggcagaagcatgcttttcataagacacacccaccgttgtgccatgtcagtttaccattgccatggcaacacccaggagttattgcccctttccatggcaatgacctgaagacccagaagttactacccttcccctagaaatttctgcataaaccgcccccgaacctacaagtaattaaaagtaggtgtgaatatgactcccgaactgctctgagctgctaatctcagcacactgcctgtggagcaccctactttgcaggagcagtcactgagctgcaccaccaccagagctgcaacactgctgcttccataaagctgttttcttctaccctaccaccagctcgcccttgaattctttcctgggcaaatccaggaaccttcatgagctaagccccacttggggcttgcctgccctatatcaatttcacctagatcttagtggcctgtggctgagttccaggttaatagtcagcatgatcacatcaggtagacaattacaaatttctctcttcattctcctcccaaagtttattgccccccatgagttggtctaataaagattggatataacagttaaccctagattcaccttgacacctggattcatctccccatcccaccagaggaagaagggattgttatcttgacaagtgaaactatcaaaaaaggaaataccagttgctcatctctggacaattatccctacaaaactcacaacttttgatcacttatgtgcaatctctttacatctgtaagtgctttgaatcccaacaataatgccacaaatttttaagcccatttcaaaaaaaaaaaaaaaaaaaagacagagactcagagagatcaaacggttagcaagcagtcaagtggggataccacctaggtctgcagggcagcaaaaaggccacatgcgctcccccagctctctctagtcaggcagtggccacaccagaggttgcaggacttctccatggctcagtaccatgttctctgagcatcagaacaaatgattgccttgaaactaattagctgctcattctcaaaactaattaatctttgttaagctcactgaagtctcaccttcaatgactgaaaataccaaacttgagttcatcatcaaagacagctccccagcaggaaacatactcatctaaatgactcagcctcctgagctacctgggccctggtgggagaaggtagtctggcaacaggcagaactgtaatccacaagtgtggagcagagccaacccctgcttacacagactggagctgggcacacattattaaaacataagctgaaaatcacttattctgctttaggtgattaatagagttggctttttcctgggacatagaggcagccctgagaaatgaggcaattattcccagtgaatggggatgttaagggacttgttgctaatagggtggtgtgtacaatttcatggttaattagtacttttgcggggagcaccgctacattgcccagcctaaacagagttcctaaccctgccctctccttgccttcaaattgttatgaagtaaacattaaggactgaggagatcaaagaagctctgggttaattggaacccagcaatgatgctggagatgatttttgggttaatctcggaggagccacctcagtgccctccatggtgcagcagaagcactcagagatgtggtttctagggggaaaaaaatgacttttaatcaagactgcgaaatgaaattacgtgtctaattagatagaaacaaccacaaaaccacaaactagggagctcgctgtaatattgagcttctgttctcagaggttagcaagaacttaggcgtaaactctgctgatgaaggcatttggatttttgttctctggccgactgaaacttcccaggaggaaaataacggttgttttgtcctcattggaaacacctgatgtggcaatgcggtgactgcattccctttgtcagcttctgctttttgctctcctggccctgacctcaagttcaccatccttgcacacaaatgaacatgtgttcattttcctcactttgggaagcaaattccagatgcccagtgaagaagtcaaagtattttgaggttccaggatcagagatcaccaggaaggggctctaatttgcatttatttcatttcaagttcataggcatacgaagcagagtaccatattttttttaatagagaatagaagacattgacttctttgacctctagaggatcacttgagtgcccatcttaggtaaaagtagggcagagaggcagccactcccttgggattgtgagtctatttacgtaattacttcctttggagccttcaaaaccttacagaggcctctaagagaagaggcaccaaaactccaatacctgcaatttaatattctaagttacaggcacttgtcaggggaggccagagtggctcttccaggcccaggagcagaggcatgccaaaagatttgggaataaaatcatttcaaggaaaaggagatccaggctaggggcctgggctgaagccccagcacatgaggctcatggcaacactcccagctgatgctaaaggcctctcccctctggagccagggttctgggtgagtgcttgtgtttggaaataccatgtgaaggggtggaagctgaaaatggtagatccacatggcttaaagccacactcactttttattcaggacacatcccactgaagactcaccttatttatagtgtcaacatgtaataataataacattatgggacactggaggacatgctgggaggtttgcaagctcaaaggccctacaggctttggctctttggttccttcccctttctgaagctcagtcccttctctacaaaatggaaatggtaattgacctgtctcccagaatgagtgcaagaactgaaaccagaaagagcccttctatgcatcaagccttgtgccaagttcctacctatgttgtcttgctttctgtcattccatgaggctggagctaccactagccctgtttcacagatgaggagaggaggctcagggaagttaagcaacttggtactgaagtcattagccagtaaacggcaggactgagaagtgaactcatgtattgacaacaggcctgtcaccatcacatgatgctgagtgtctgagcaattgaccaggcctccagcagcctcttaagtggcagccacagcctcatccccctctactcctaccaacatactttgattagatgagtgggatggtgcaggaggatctcttacacattgtattgatccatatcaaattgtatcttgttagacttgacccaacgttccagcagtgtagatatttttgacccataaaatttcctcttaaagatattatttcctgaataagaataactggtggagatgcggctactatatggcccaggaaaagcctggcctgattgtgagattgggggactgaactagaaagcaagtccggctatgccacaccaggaagagacgtgcttaatccctggataaggcaaaggctgcttctcactggcactgagaaaatccagccattacccagcaatgggaaccctgccagaatcaaggtgactctagatgacatgcattttccagggcactaggcctgtcagtggttatggctgcattgcttggctttgactacctctgggaccagattcatccatgattcttacttgtccaagcctttgagaaatacataacctcctcttggagacatatttgggctctgcctgcaactcacctcttcttcttcttctttttgtcatcgtttaagcccagcaagctattgtcagtgtttctttaatagaatgtctatgttgccccttccacagctggtttgcaaaggtgagactctcctccgttcacagggacacatgtgtgtacatgttaaacacccaccagagagctcaatctgattttctgatcatccatctttgtcaaaatgtgtggcaggcaaaggagaaatgatggcatccatgcacacacacaaacccaggtgtgttcctaccagactcagccaggcgtgattccacagatggctcacagggatcactggaaaatcaagtcaatacacttaagaggggtgaccaaggagacagggcgtcagtaacactttataagaaatgtctgtgtttctaacatttagccacttaagcattttaaaaggaggcacacaatttctctattggcaaaacctacttggaatttacaatgctcaaaagtatttgtaagaagtatgtgtgtgtatatatgtagtgtttagtattaaattaataaataattttacacattttaaacatttatttatttaataatgtgtggataagttttcaaatgtgtacccatggctgaacttgtataagaactctgaaaaacacatgaagaaatgctgatccacttctggtaagcaaaaaccagaaaatttaacaagagtgcagtacaaaatcaatattaaaaggtcagtaattctcatagtcaaacaatgatgaatttgaagatttagcagaaggggaaaaatttacaaacccagatagcaagataaaatacctaggaataagctgaccttgactgcataaatctatatgaagtcagtctcttaaatagcagcaaaaaagtgcaaaaaaaggaatgaaaaacatggaaagatacaccaagttcttgggtagaactcaatatcataaagattggttttccctaaactataataacttataaatgtaaagcaattgcaatggaatgtcaataggctgtgttttgggcactagatgagctgattttaaaactctaaaggaaaaacaaacaatcacaagaaccaggaaaaaaagttaaaaaaaaaaaaaaaagaatagctggaggtgcacagagacctaatcagaccaagtattaaaatatacatattattgggaggctgaggccggagaatcacttgaacccaggggacagaggttgccgtgagccaagattgcgccattgcactccagcctgggcaaccagagtgaaactccgtctcaaaaaaaaaatgtgtatatatatatttaaaaatatatagaataaagctacaataattaaaacagtgtggtacagacatgtgaaagacctcagaaagatcaatgaaacagaataccatttctagaaacagactcacatatacacaagattttagtatactataaaataacaatgaaaatcaatgaagaaaagataaacttccaataaacgggatttagataattatataccaaaaaaaaaaaaaaacctttaacaggacctcagatttaaacgtttaaaatggaaccataaaaatacttgtaagaaaagtgagggaaatattttataactttgtactagggaatgttttcctatgaactaaaattcagaagacataaaagaaaaaggaaccaatgattttaccatatataaatcaaaccctgtttcatgaagggaaaaggcaaaaaaaaaaaatcaatgaactggttcaatattttcaacacatgccaaaaatcaaggtataaaacccctgctataaagatttcccaaaaatcagtagaaaaataggcaaagtacatgaacacatgtctcgcagaaaatgaaatacaaataactcctgagcatgtgataagatgcttaatcttgttcaaaagagaaatgcaaattaaaactgtgctctcatactatttttatccatcagattggcaaaaatccaaaagtttgataacgcattctgttgataaaactatggaaaaacaggcacgcttatacattgctggtgggaatataaattggcacaacccttctggaagagaattttgcagtatctaccaaaattacaaatgcaaaaatcctttcactctgcaattccatttttatgtatttatctttatagatacacttgcaaaaatgcaaactgacctaattgcaagattattctatgcagcacaatttttcatagcacaagaatgggtggaatctaaatgttatcattaggaagctggttaagtaggttatggcacatctacacaataaactactgtgcacctgagaaaaataggcaagcctttctaatacggaaatacctcttaagacgtgctatggaataaaaaaaaatcaatgtgaagaaaaagtatacatagcatacctgtatttgcatacagaagtgaaggaatgtgaatttatactcttatctgcttataattattttaaaaatctagaaaatccccctctaaaaaattaataatatatttatctgagggagtggggaggggtgaaatagagtgaagcttgggagaatttttacccaatacctttttacactgttaatttttgaaacttttcaaaaattaaatgaatatgttaaagttatttcttcaaagacagatgatgtctgtggccctaccaccctgaacacgccttgtctcctctaatcttggaagttaagcagagttaggcctggttagtacttgaatgggagactgcctgggaataccaggtgctgtcggctttttaaatgaatagacagatagatacatatgtttaaaaaaaatgagataactaaatgttaatggaacagatcacagagaacacaaaaataaaagaaactctggtactacagagataaagaacaaacatagagaagaagaatgggaaagggagtcaaactctgtggaactaaagcaaagtgctagaggcagataattgggattgtgaaggaataaggcatacaattatacaccacaacatgtttgaactattcatatacattacataaaactaatatgtatgtgcacacatatgcagatttcataattcaaaacatttcaataggcaatgaatgccctttgtccccagcaattgtagatctagaaatctttttaaagaaaatcactaagaatgtgctcaaagacaggtacaaagctgtacctcacacacaaatgctcagaaacaggtgattaatttagtaagtcatggcctcccatacgatggaatgccaaggcaccaaatttatgctgcagcatatttagtgatacaaaaagatgtttaccctccgctgcaaaggtatacactaacatattcactgcagttatcccagggaatggggtaatggatgacttttattctttttgcacattaatattttctaatttttctacaattaatatatattccttgtgtaataaaaaacaaaagttatttacaaagaaaaaagaaaaagctgagctttgttgattgatatctgagatagctactctcgtggacatctacttgtctcgattctttgctccatttttttttgtttttttgtttttttttgagatggagtctccctctgtcacccagactagagtgcagtggcgcaatcttggctcactgcaacctccgcctccctggttcaagcaattctcctgcctcagcctccttgagtagctgggactataggcatgcgccaccatgcctggctaattttttttgtatttttagtagagatggggtttcgccgtgttggccaggctggtctcgaactcaggagatccgcccgcctcggcctcccaaagtgctgggattacaggcatgagccaccatgcctggcctttactgcaatatttttaaaactgtgctatggtgaaatccaaaagctttcctcagaggctttcctcaggggctgctgagggcaagagagacagggaaaggggaaagatgcaggatttgaggctgtcctccacatgctggcccccatccctacacagacacacacacacttacacatgcatgggcacacacatgctcatatgtgtgcataagcacatgctcacacacgtgtgcacacatgcacacacacgtttacacacatacacaagctctcttacacacacagtcagccagagtaattccactttcccatgttttgtaaataggccttctgcctaaaatggaaccttaataaaggagtctgtagatggaaaaaaaacacaaatactatgccatgaagttctgtccttatgcctagtccaggctccaaaaagccacttaactctcatgaccccctgaaaatgccttctcagaactcatatagtaagccagaagtgttatcatcccaggcaggcaaaagagcaactctgaaggcccagagtgcgataccacaggactcacagggaggcagagagcaggcttttctgtctactcgagttggggctgggggttggggtgggtagcacccagcaggcaaggtgaaaccagagtgggcatcagagacaagagaaattcctggaagggagtcaagccccctccagctgatgcggttggtctttgagaatatgctgaccctcttctctcatcaaagatgacttgttgctggatttaggcaacaaatttaggctgatcttcccctaactctaaaagaagatcaaaagcagtgtcctgccaacccccttctgggtgagggcccctcacttatccacagctttcctccctgggtgtaaaggagagagcagtgtgccctgcaaaggctcaggccagagggacttctcattttggcccctggctgcataaagtggctgaccctgtgtctagctctgcaaactcttaagtgtaataataacataatagcagctatctcttaatgtgttttcactatcaagcactataagaacacaatcttatttaagcctcacagcaaggatatgaggtggtgtagaagattcactgtaaaaatggtcccacttcccagtcctctctgtatccctgctcttggccatgtgactttgcagcttctcccattagggggtggggtctacatttcatcccttgactttgggcagatattgtgactttctttggccaatagaatgaggcggaagtgacgtgccacttctgagcctagatctcaagagctcttgcccatttccactcactctctgggaatcttgccatttccatgagaatgagcctgggctagcctgctggggatggaagaccatgtggagaaaagccacatgagccaaggccaccctcaaccagccaaaacttaagctgaccacagacatcagtgacctcacccacgatcagccaagcctgacccaggaaagcaaacctacccagctgacgtgtagtatcacgagaaataaaacgtggttgttgcctaaaactgcaagtttggggagagttacactgcattattatggcaataaataactggatacaggtgagtaccattattgctgctaaactcaagttgagaaagaaacttttctgttatggattgaatgtttgtgtcccgacacccagaattcatatgttgaatccttaaccacccagtgtgatggtatttggagatgtagcctgtgagagatagttaacattagatgaggtcatgagggtggggccttcatgatgggattagtgctcttttaagaagagacccctgtaatcctagcactttgggaggctgaggcaggtggaccacttgaggtcaggagtttgagaccagcctggccaacatggtgaaaccctgtctctacaaaaaatacaaaaattagacagacatgatggtgcacgcctgtaatcccagctactcaggaggctgagacaggagaattgcttgaacccaggaggcggaggttgcagtgagccgagattgtgccactgcactccagcctgggcaacagagtgagacttcatctcaacaacaacaagaagaagaaggagaaggagaaggagaagaaacgccagaaccagagagcctgtgctctcattctctctctctctctctctctctctcatgtgaggacacagaaaagaggcagctgtctgcaagccagaaaaagagcccttgccagaaaccaacagtgctagtaccctgatatcgaacttcccagcctccagaaatgtgagaaaaacaaatttctgttgtttaagccacccaggctatggtattttgttatggcacactaagcagacaacgtctcacagctggtaggtgacaaagttagattccaaagcttaataaggagttcacagcttcctgcccagcctcagggctgtgaccagagcaggtggactccactccacttcaaatttctcagccacacccttggggctgcctcctgccttgagttgtcccagaatcctaaatgttctaggcacatggaattccaaggctggaaacagacttggagggcattaactccaacttcctggttctatagatgatgatgctgaagaccagatgattcaaatgaattggccaaggtcagactgtatagaaaggcaaaagaaatgttgcaacaaagatctcccaaggaagtgctcatttgtccaaaccaagctgatctgcttttccaggtgtaataagaacaaggaagaattgtccttcaagaattctcatctcatttccaacccgtgtcccaagggtgccaatcttgagttccagaagccagaactcttaggatctgcttatgaattcctactcccacctgtccccattcccaaacccttccccataaatcagactgccgagccacacagttaacatagcacagacagatggtaggacctgggtgtctcctttacagccaaagaaatgaagttgcttccgcccaccagcatcattgaggcagcagctccctgcatgcagcagacagagcccccaggtcacacgcacagcctctgcaaagccacgtggtggatcttatagcagagactgtagcttaaggaggctatttggctgttgcccatacatatggcagcctggcaggcccttccaagggcttgaaaaccacatagcaatcaggagcccctagggcctcgggcccatctgcagtgcaaagacagagcctcatttgagatgccacgaagcatcagaagatgccttgtgcttcctgcagagctggcgaactgccccttgcctggctttagactgtggtagaactcttagcgaaggtgaagttccttcagcacatccataaagggctgctgtccctgggactcaggctgcattccaactaacaagacatggtcctggccctcgagaaccctccagtgagtggagaggactctacagaggtttctacagggttgtgagcccacagagagggcaactaatcctggcttggagagagagacagagtagaaggagcattaaagaaaccttttcagagaacaggacatttgggtcttcaaggagatccctcctgcagtcacttctctgaagatttcacagaagtcacctaggattcaggtcaggaatgaggtggatgagaactctgccttctgtggtaccacatagtaacctcccagatgtgccaggttccccagtgtctgggatgaccttcttctgcaatggccagacatggcctgtatccccatcctgcttagtgcagctgcactgcatcaaccaagccatggctcttctctgttcttaaataaagatgataacctttgacgacaccctgcagtctcaacctttgcctactccattggccctcgggtgttcactgtagccttcccttgctgggttcccaacatcccaatttccttcagttcctcgactaacatccctcagcacagagggatcagttttcccacttggttcagttttcccactctcaggtctcacctcaaggaccactgcctcagggaagtcttccctgaccctccagtttcgggccatttcctcagttactccctctcagaaccacatctctttctttctccacactctaatgcatcttgactttattctcctggccatggaactgtttagttaatgtctgtctttcccacaagtcagtaaaccccaggagagtaggagccatgcctgctttggcttacgcatgcatgttgattatctaacactatgccaggcatgcggtgtgcgctccagaaatgttcgtggaattctaactaggagttttgccttgggaaatggaggatccattgtgtcataggttaggtgtccccagaagcagatcttgggatcaaaatttgagtagaaatcagctttggggaagtaaaaccagaaaaatctgatatggaagtggggaagaaagggaggaaggaagggagagaggaagggaggaagctggagtgcacaaatgagacccctgggccccccttcctcccccagccctcctatggaaaggaagagagaaagcaagaggctggatggaacacttgtgtgcagaacaggtcaggtagaagcaaggtagaactcagctcatttctgtgtgaccttctagttggtttggatggttccggccccaggttccaggcatgctgacatgagagctatcaagtccaacctctccatgttcattacaactggttccccattagcccacaacttcagcttctccagtacagtgatcttttaagataactttcagcccacactcctgagtcccagaaataccaaaactggctgattaaactaaaaggtccaactcactctctccagagaaagaagtgacacattgtatagagacaatgaccacagctcgaagttctgggcatccatgtaccttcatttcctgagcccatcagatctgtgcaaaatgacagaaactgacatctgccagagacctgcgggaggggattcaagacccaagaagcaggtcaggatgttaagatgccacccttcatcttccattaaacttcttaatctgcaggcaccatgaactcagccaaacatgcagcaaatattttcttgagcacccgctgtgtgtctggcaccatgctcagcatggggatcacagctgtgaagggacaccaggtcccagcccttgaggagcttataatttaggggaggacacatgcatcaatcaaataatcacccaaatgcatgctaaactgcagctggataaacgctaggaagaacaggtactgggccctgtgaggacataacactgggcagcagatggagtttgagcagggatgactgatctcatctagggaccagaggaagtcaccagagatggatatgagctcatgaggaggaggaggcaggggaaaagcattccagcagaggaagcagcacgtgcaaagcccttgaataagtcatgacaaagcggacccatggaggatgaggatccatgtggtctcagacaaggcaggcaaagggagcaggtgcggctggtccacaagcgttctgagtctcgctgtgtgagtggatatcaagaggtcttgcttgtcaggggcctgattacatcatgagtgagagagggtagacaaaagtaacctgcaggtcactccttaaatgcaaagatggtaaagatacagtggggctcaggaagagaaaagaactgtcttcagttcgcacctactatgtgccaggcattctgccatacacaggtatttatgaaatccttagatttgcgcattcattcaatgtaacaacaattacctgtggagccactgctactctctgtgaccaagcaaaaggcaaaggtaattttttttccaaaatcatccttcaataagaagagtgagtgaacttatattcaaattcctgacaaactctcctgttaaagggcagttctctcatttactttattttaaccaacaaagtaccatttggggaaaaaacattagcctgaaatgacctcaatcaatgctagttttggatgctcataagagtttgcttgatggaatcgttaaaagagaaggcaaagatatttaacccctatttaataattattcctgggtttgaccttagaattacaagctggggatgttgttctaaacaagtcttttacaaatcactttaaaaagcaatatcagaagtagttacactatgaagatcatagatatatacctaaagaaaaaaatgaaaataaaaaaaacactctcctaatattatgcaaacgagtatacgtagcttgtgataaattctccagtgacagcattttacacaaagccacaaagtgttgggtctcaaacaactatgatggaagtggagattctgtgccctggaaaattgtgttcaatgctacgcacagtggctctggcaatgatggggcctgggaaggctttgaataaaattgctccataactgccagaaggggaaaaaaagcagatttctaaattaaatactattttacatggcatgggaatttaaatatgtatgtgtaactaaattaataaatcaaatgctacaaatagacataaagtctttcatctgcttccctaagagtttttatgttcaactacaagttgaccccctcccctaaatataggatttccccactgggaaaatgcataaagcactttctattaggagatgttctgtattccagcatttataggaactagctacaggggcgaagtgggaagcttgcccaattctacccacaagatagatctgaacccaccagccagagcacccaatgtgggcacccagactttggagggagcatatccccagtatattggtgagagatcacatccagggaggccttggaggctgagcagctcaggggcacaggcacaaaagtcacagccaggattatagccccatctgccccgctctaaagcccgggtcacttaaccatgtcaggtgtccccgggtgtcggatgctccaccacagcagggcgctggcctggactggtttcagcacatgaacagtgctcctgagtttgtggggaacagaacctcaggctgtgtctcactcagtccctccagaggacacggcacctagtccaggctcaagactccagcctccaggccacagctactgcaccatggccagcaagctccttggatgccttgtactctccatagactggtcccctgtccacaggcagctccctccttgacagatgtcaaggcctctgggtatccacctcccaacagagctggcaggcactagcagatcagttgactctacaatgcgcccctttccaaagagaaggcagagcagcctccaccccgcaggactccctatgcctccccagttgcctgcaccatccttctagtggtctctctcaccttggcccccatggcactggcccttcctggtgcctccactatccttctcccacccccacctcctgggggtactctacaggcttcactttccactcacatctgcagcactggcatctttctctgcagagctcaggaccctccaatccaattaccttccagcagctccgagcagctccaccacttgaattgccaaaggcagctcaagagaaccaaataacaactcccagctcccactatagttccacgtctgcagggcactgcaaagaatccctcaagccttggcctggcctctgactcttccctcttccctggccccttcccaggaagggatccagagaggatcctgtctgtctaggactccctttccattgtgaaagcagccacctcccagtagacatcagcttcaaaatagcagccctgccgtctggctcgccctctccaatctgtcctgctcaccactgccaggttcctattcctcaaagaaaagccagtgagatgcagtcaagacccctctccactcagcaaggtgaagcaaagcctggcactgtgattccagatggctgctgctcccccagacccctctggaggtccccatcatgcaggactcacctgcctccctcagacccagcctgcttctgtccctcctgccagtgctccaagggccatccctgcatgctcaggcttcaccaagactcctcctgcaggaatccacctggagtgctcccattccccaaaggccagattcacctctctatgtcacgagcctgttcaacctgccttattttgttgttgttctgtttggttttgttttgggcttttagcaggctgaagcaggggttcttaatttctttctctagtgataagcagaaaagagatgaggaagcagctttactggcccaaccagaaatagaaactaagagcccatgactgtattctctcccttagacacccctatggacatcagagaaagcactcaacaggctgagcgacaatcctggctttcccacagtctgcagatgagcccaccatctgttctgtgctttcgcttctccaactgtgcaatggggatagcaacattctggttaaatgagggcaaaactttgttgtgctttgcatcttacccccggcacctacctggggctcttattcagagaatggctttctggctcctggagccatgttgcccgcaggcagagaggcctggaagggcctgagcatctcatacacacacacagacacacacacacgcacacttaagatgagggtgagggtatgatggcccagctccctttgcctcggggacattccagggtgtaactcaccccccagagcacccggagctcggtctgacatctaggggtcttctccggaggtcccactcagattcgcttccacccctgcttctggcccttccctgtcctgttttccccacccttcccagactcctctgcgagcaccttcttaggaaagacttgtaccagaaccctcatttcaaggtctgcttggaagaagcctgccctagacaaatgcctaccttgctgcactgtcatggggagtctgtgtaggaatacaaagtacctggtggagtccccaccatgattattagctcccagagccatcgccactatgccagtcaccagcttcactcatatcccaccagtcatgtgctctcacctacccttccagaccgtaagctccttgaaaggggagactatggcttccacatctgtgtgaaccccatgcccagcacccgtctggcacaggcagggctgttgtgggtcctgtggccgtggctgaccacatgcccagggctaacagcagcctctcactggggcccaaagctttccctcactatcgctcactggggacagatcaacaggacccctctccccttgcctgagcatctccaaggtcttcagggtggtgggtcctacccagaacttgggagggacccactctgggatgaatacaggggtccgttcaggaatctgtcacaagccccagcccaggaagagagacaggatggagcctccacctccaccccacctggcacccatgtgtcttcactactgagggcaacaatgccactccctcttgtcagaggcaggacaactgaggcaactgccctggaacacacttatcaaaagcaaggagaaaataaagcctgaagtccatatgcttgtgctcaggtggaaatggtgagtacacacaatgtacataaaattgacaaagtaatagtggaaaacccacaggtgctagagaaacatacgccagccgctgggaagcataaaggagctcatggtgaactggacaatggagaacatggactgatgggaaatgccagaacgggaacctgagagggcccagagagagcagcctgcacttctccaataactacagtgcccagactccaaaaaggttatttcaaaactgggcaagtgtgcaacagtgtaagatacatcttatcctcagcatcatgtttcagtaaaaatgaattggaaaagcatccaacagtaccagatgcttaaataaattatgaatagaaccataatgtgcttaaccaatctgctattgtaagatatactttgcagcttttagaaataaaaatgtaagtgaatatatattgatatggaagacttccatgatatactgtgatgtgaaaagtcagaccaaagaagaaaaagtaggaatacttccatatttataaaataaaggatacatggaactttgtagaaagtctagaaagagggtcaacaaactcaactcaggggcctgtttttataaataaagttttattaaagcacacccatatgcatttgttcatgaactgtctgtagctactgtcaggcctaagtatagagatgaagagttgcagcagagaccatatatgctacaaaccaacgctatttactacctggccctttaaaaaagagtgtgtcaacccccgatctagaagaagagatacaaagatattaatgatgtttatctcaaggtactgggaacttgtgtaattttaaattgttcgttttttttcctttatggctgtttatatatttatgttttctctgccatgataatgtataatctcctaaaaagcacatagcttagaaaaacaatctattggcctacttacattaaaaataattttatcaatgttcacaaacatttttcccattttatagctgaggaacagagtttgagaaagttctagcaacttgcccaaagtgcacatgagacccagcctgagtctgtctgatccaaagaccctctcaggacaagatgttgagcacaacgtctgtgatgaaaaaaggcctcctggttcctcttctggggagacagggacaagaggtccctcccctaagggaggcaccgctgcctcacagaagctggcctggaagggatgcaagttaccagaggtgctaggcatcagaactccgcatggctccctgagggcacagtgcctgcctcagtgtgctgggccagctgcaatgggtatcaaatgtttcctccatcccagaacacagaggaaccaaggttggtaggcaaagctggccatgctggagtcagaaatcaaatctaaaccttctccaagctccatgggcccttccctgctacctctcacctctccgacaactcctcctttccactccccagtacccagcaaccatgatgctccagccaatcagaaagcctcacacttccccactcagagcatcttattccaggcatttgcacctgtggattcctttgcataaaagtcctttccctccccagctgcctggaaaattcctattcattctttaaaagaaagaagacaaactgaaaactcgctggccacatgaagcctgcaaatgcatttcctcagacccatgtggcatcataaaaataacattttatattaaaaattgagattcccattctttccagactgagcagaaaatctagtaacgctcatcccacattaccatgtagcagccagaggctgtggctcaggagcagctgttctctttgcacggggtgcatgcttcccacttggctgagcaccccactagggccaccacccggcctccctcactggcctccatagacatctatctgagattgcaaccctctggcaatcctctggcacagtggttctccaagtgtgctcctggaccagcagcgtcagcatcacctggaaatgtgctagaaatgcaaattcccaggtctgtcctagatctactgagtgagaaactccaaggttagagcccagaagtctgtgctgcagcaagccctccaggggattatgatacctgcccctctgagaacttctgctgcagctctgtggactctggtccaagcagcaaggccaatctgtgccctctgccacccttctctacctcatacccccatccttccggccttggctccagcacagctgagtcctgggccagctcccagccacatgcattcaaattctgttgcatgcactcccctgccctgtggccaggtgctctttacctgtctatttcctagccagtgggatcttttggggcaggagctatttctgattcctgcctccctagcacctaacacaaagccaggcccttagtcagggctcaggaacttctgcagaattaaactaattcacttggtgattatttatacccctctaatttggagcagcaagactgaccacgaggcagcctcagccctcttatgtctggcatgacaaggatggtgacaatcaaatgcttgcagctccaaggagaagtgatatttcagcagaagatgaagtaattcctattcaaagcatctgttaatcactcaagatccttctagatgtgaggggctacagaatgaaaggtgttattaatgaaactgtacagactgggaggcagttctgaatagcagccctccttcctaacaatgcctttccctgcaagttaatcccctgacattattttaaattcttcaagtgctggagaagtcatgtaagttgttttcctgagtagtcacttagctgacaagcattttctaattgacagaacattctgaaaagacagattaaagagggggaagagcggtattaagatggtgcaattgcccacacatagcaggaggctgagttgactgaaatgtaagactcgattcggaagaaagttatttatcacatcccccagcccggcagccccttcccagagagacgaattcagggatgttgctccacggtggctccgacccaaggacctgccaggagggactgcacacatcccacaagctcaaacccaagctgggagttgaaatccaggagtgataataagaactgttactgacagttgagcagctaatatgtgtctagaattttccaatgggctgtgtgccaggggtattacaatttttagccctaagagaggacactcatccccattttccagatgaggagactgaagaatgcacccaagtacccaagttcacacagtttataagtggcagagctgagggaggtcaaacccaagtttgtatcctggctctgcccatcatgctatggaagctcagcaagttccttaacctctgagtctctggcccatcagctgcaaaactgggtccacaatactcttgcaggtgtgatgtgatataatgtgatatgctcagcaaatgataactcagttaacagcctctgaaagcaacactcttctgcaaattcaagccattgcctaagttaggaggctctgtgtgctctttcctgtcatcaggccacctcctcccctttaaggaaatgtgcctagatgtcactgcagagtggcaatgggcttagatggcaaacaccaagagccacagcccagaacgcttggtaggggccgcgccggcacaagcatcccataggtgctggtagggcctggggctttccgcgggccactgtcacacctgtcatgaagcccttgaaactacaaagcctccagataggactcacctatcaatcaccccttccttaatagcgcatagagctgatggaatcccccttaatggtcctcaaaccatgcacactttgaacaactaatgaggcacgcaggatgccttcgccatctaatgttttcagatttcctagcgtgagataatgccactgacaagggagtatacactgagccgtcccaagtactgataaggtgttaataaaccttagcaaatgctgattagaggcggctccagcagtacagagcctccgcgctctgcatgcacgctggagggttggccaattaaacctggggagcttctcaatttggaactgatcctgagacagcagcagcctgcatctccaccacttttgagtcacgaggcaggtcaggcttgccctgtggctagtccaggatattgcgcaccaagggactgcgtaagtaaagagcgtttcacagacctcaccccaaaaagccagagaatctacaaactgggaggcatcaggtatttgggaatgtagttaaaactttcttgagcatgcttatatttacagctgattttttaaaactcttgggataaaaggttttaaaataggcaaggggaaggtgacaggcactgcggttccccacccagatcccctccaccaccgggtgtgcccatccccagcggctggggcaaaggcccctgagaactgcaaaggcctctgcctcacacagaaaggcctggaaggctatgccctccaactggggtggcccacagtcagtgagtgagcactatggggcacaaaactccagccctttagcctcaagccatgatgactctgtggtgccattcctatgccagagctccccttaagatcaggccaaggcctgaactcagctgagaccccgctgtgccaagcttcctcccctgccccatcctgctacctccacatccttaaggattttaccagagagctctccctggataaatcacttctgcaatgccaggctctgcttccaaggagtcagacttaagcagggagaaaaggagaggggattagaactacgatttttggaacactgttttgtgcctggctctgtgttagacactttccattcactatttcactaacgttcctcagcaaacttgtggagtatgggaaaacgtcgccatttacagataaggaaactgaggctcggaatgggacagtgacttggccaaggtcacatggctcctcagtggcaaaggcaagatgtgacccaggtgtggttgatgctgaaattcatgcaaacatatttgcatgtcaccacgttacttccccatgtttacaaggggctatgtgaagtcaggagaagagagaatggagctctaaaaaaagatctgaaaatatataccagactgaaagctgaaagaccagcagggagagagaaaacttccccccactgaggagttcaaatcaccattctgtgcgttcctcgccatccccaaatagaaccttcacatattgcttggcaagaaactaaccacttgccacctctctgattcccaattataaaacataccctacattttaattcagaatgtatatttcactggtcaatagattgaggcaaatgttcccacgtggggctcctgcctaaagagctaacagcttcaataaaggtaaagaagcctactgccagcgacggtgcctcagatactgtcacacacgctccagctgaattaaaatgtgctctgtgatgagcgtctagggaggcaacttgctcagatggtgtcacccaaggacacaggcatcctaagaaggcagatagcctcactccaatcaaaacaaaaccaacagtgaaatgtgccacccctttgtaggtattaattactgtccaagtgccctctctgctggcaggcagcatgcgtgatcaggagttgggaggaaagagaggctcctttctcacgggcttgccattctgcctccaatcaccccctgcccagtgtccagcaagtcctgccacagtcagaaactccaatctgctccacaggcccctagtctccagcttgattagacccaacaatttcctggagaagctgtgggaagggggagtatatgcagactgctggggaaggttaggttgggaggactgaggatgggccagggaagggcagggcgtggaggtgtttatgcacttcaggctctctaatgacagctgctggcaggagggggctctgctcacctgggccaggtttgctgcaaacctgccactgcagacacgatgatgtaacagttgccaaggggaggtgatgtgagcagaattataatcagaacccagctttcaggggctggggaccaggggatggagctgctccagaccagagagcctcgccctgagagggctgcagtcaagagtgcttcccggccaggcacagtggctcacgcctgtaatcccagcactttgggaggccgaggcgggcggatcatgaggtcaggagatcgagaccaccctggctaacacggtgaaaccccgtctctaccaaacatacaaaaaattggcacggtgtggtggcgggtgcctgtagttccagctactcaggaggctgaggcaggagaatggcgtgaacccgggaggcggagctggcagtgagccgagatcgcaccactgcactctagcctgggagacagagtgagactccgtctctaaataaataaataaataaaagagtgcctccttccccgacatcctgaacggccaagaagcttcatcagtaagaccatgctgaaccttgttttcagtggaaaagatgtccgggaagttacaaggcaagctagtccagccagcgtcttcatttcctgttagccataacactcctctatgcctcagctggggtgtgatgtgtagataaaaatcattcctggtgcagaagacccagaaagccccaagtgagtggtgcatgggtgaggggagaggggccactcactcttggccatgggaagacagggatgccgaagaagaaactcctgggtcattgtgggtcgtgatatggtgcctgtagagggcaatgagcttgcagaaggaaagccaggagcctgggtagagaggtgctgtggttgtgccagctctttggagtttgagagaccatctctcagaagtgatgtggaatggaaagccgataatttatgcttcctgcatctcatgcttacctccccattggcctgttattcctcctcagagcttggaagcgtttctggaattaaattcctctgggctgggctaaccagaggagtaacagccatccagccttggaagaaggcattggggcactgggagtgtctgtgccagttgtggaaatcaaagcatgcacccctgatgggagcagggtcagactgtgtggtccataccccttgcccagccccatctctaccagagagtgtctttccagaatcaaaccttccatagggaggctatttcttcctggcataaattaagattattatcttaaatgctgccctgaccaggctgggatgggcacaggcaccagatgccttttcctgacatccatcctgcctgccattagtgtctggaacaggagctggtgaagggaatcctgcagggtgccgaagctcctttctctccacagtggacactgggaactatccatcagccttctcagaaccttcaggacagcccacaagaaagcatctctgtgatatgacccagacacttcttcctggcccctcatccatccctgcacacatgcctacatccacccactcatctgtgtgttaagtagtctttcaacaaacattcattgactattccaggcactgagctaggcccagctgatacagagagtaacaggattaatcccatcttgctcttaccctggaggagctctcaggctaatggagagaaaccaataaagagggaagcatctgggaagagaaccactgcatgcacatctccctccctgcaagccactgaaaaggcattcatctgtgacctgcatctccaggggccaatcctgcacctcaccctgaccccaagctgacacactgcaggtgaatttgaaaaaaggtggcctctgggtgtgcaaccctcagcttatctgcttccagtattgaggtaacttatgtgaatgtttttcattgctttggctgattttaaaattccaacaagaataactgcttaggaacaggctcaattggagaatgcccccgcttcacaataggcacacacaggtacagacaacccatatccagcctgtgctgagagagctcactgggacagcagggaaatgggctcactgtcctgggaagatagagcagacctgctgccactcagaatgtccaccccacctggtataactgcacagatctcaaatgcaacaggctggtagcacaatgacttgcatcctggctctgcctttcatgttatagaagctcggcaagttccttaacctctgggtctctggtccatcatccacaaaactgcgtccacaatactctcacaggtgcaacgtgatatagcgtgagatgctcagcaaataataactcagattacagcctctgaaagcaacacctttctgcaaatccaagccattgcctttttctagttttgcccttgctccattaaactcataagccttccttttttagtaagccaacattgacatctttctttttacagatgataacaaatattttcagagcactcattacctgccaggttctgtgctataggcatgctgagggaggtggtggggaggtggggcaagtgcagccttgaagagctcatggtctacttggagatacataaatgatccatattgtggtgcatataatttgggatctagtaaaggagagggaaacccagactaccatgagaggaactgccccagccagtgggagaggtggtcaggaacagcttcctggaggaggaggcagaacctgagtaaatgttgaagggtgaaaggaatagtgaagtgaaagagagtgggaggcagagacacctgcgtgagcagatgccaagagaggggagaaggggctggtgcgaggaagaaactgtgagtcatttgctgttactgtcaggtgagaggaagatgggaggaaccgggggtgaaggaaaggtagcctagtctctaagggccttctgggagctaaaggagcaggacattattctggggtcgtcaggaagtgtggatatgttttatgcagaggaacaaggtaagttttatatttcagacgttcaagtttaaggtagtgtctggcaacaatccatacctcagtcaactttcctccaaaaaaaaatctatcatagctcacacgaggatgaaaatggtaaactaagatttatcactaaccaagggccaggtgccaggagaagcttctgcaatttgaaacaggtagggagctaaaagaagactcatgggaaaggcaatgtccagccatttttcgggccagtcgatgttttttctcagacaatacaagttatttcctcatcttacccagaggagtccataactactctttcgtttttttttattttattgggtaaagaaatgtaaacacatctcaggaaatacagatacgttttcagtagcagaggtaattaaagatagcagtatagaaataaagtaagatgaattctttccaaattagtaaggagaaaataattaccctcaaaagcccaagggagctcggtctgattagcacattgaacatctctcctttttaacgtcagcttttcttcatgggttttcatccacctaccccacccctttccacggtctcagacctaactctacaccaaggagatagtatagggcctttgctagtgtacaaaaacaagtggtttacttgtcctcactgcacacacactgctgcagtctaggaaaggcgcaggtgcctgtatagcacacgctagtgcctacacagcacggaggtgagatgaaatgctttttaattctgttatgtcatctacccaatgccaaagccataatatttggaaacatgaagatagctgatggaatttttccagaaattctcatccagatgtgtggctttgtgagtattgagaataaagaataaataaagagctacaacctccactcatgtttccagtttgtaagttgtttgttagtaattaaaaaatctttgtttgttgaagggatttaggaggaggcattaacacccccagatattgcagtaagtgaaataaattctgattaaaatgattagccaaatggagactccagaaacatctaaacagacgaatccatactcatcacacagcctttctctccaacagagcacccctgagggagggaccaatttattcagcacaacctcctttcagttacactccagctctgtgcagcagggggactggtgtttattccctgttacacactggggtagggtgaagccagacttcatctgtgtgctgggagagtagccatcgcacagaagccactggcttcttcctgggacagttttgctttccattgtgcaccccaacagtataactgtctggtgggttccctgggggtgtggttatgcagcctggaaacagggtttgctagtgatgatgttttcttgcctcctgctggaatgatccagggggtgaaggaggctgggcccggccctgctggcaggaagctggcatgcacacctgtcttccagggacaactaagggcactctcaagctccattgagctccggatcataaggtgggcaccacttgatgccagggtgaagctgcccaaggcaccacgatcagtgatgaaacatcatcacttggctggaatcctcagagcaagattaaggacctggacacaacagagggtcaaaaagaagagacccacatgccctgcctggctgacaggactgagcacctgggctctctctcctcttgctcagagatatggacagtcaggaccgcagcagacaggcgctctggttttaaacaaatgcacccaggacagagctctccatctgaccagtctgggggagggtgggggaaattcccattattctgagtagaagtagccaagaaatcaagtgacagccactttgaagaagtggagatagctcaatagtccatctgttcaaaacaaatagtagacaaaaataaatccctctccactttcttttttattattttcttacgtgcgcaaatgtatggggtgggtgagaaatttggttacttgcatgttatgtgtagcgatcaagccatggtgtccatcacccaagcacaatatgtttttgttaagtatagtcaccctgctctgacatcaaacattgaatttattccttctatctttctaaatgtttgtacgctttaatccacttctcttcatcctcccctctccctcccactcgtccatctcagtctctgagaactatcattctacccgctaccgccacgtgttcaaatgttttcattcccacatataaatgagaacatgtgatatttgcctttttgtgcccgtcttatttcacttaagataatgacctaatttatgcaatgacataatttcattgtcattgatgatgaaattgacataatttgcaaatgacataatttcattctttttatggctgattaatagtccactgagtataccacattttcattatccattcagccactgatggacacttaggttgattccacatctttgctattgtgaacagtgccacagtaaacataggggtcaagtaaccctttgatataatgattccctttccttggatagaactcagcagtgctcccactttctgagccctgaagagcactctgatggaaaggaatgtgttattaaaatttggcttcagcttttacacagagatggtgcaggacagggctccatctgcccttgagaagtgttcaaatgaatgaatgatgggatgagtgtcgatgtatgaatgatacagggaaggaggaagtcattgaatattattgtagttgctgaatgaatgaacaaatgaagtgcataatgtgtgaatgagcaaatcagtgtgggaatgagccactgagtatcactgtgcagctgaatgaatgaccaaatgcacaaaaggaacgagcaagcttcactaagcatgacaccccacagtgagaggcctgggaggagagtccagctcaactcacccaccatggtccccgcggaaggctcctcgtttgtcactgtcccaccctgccagtttgactcagtatgagttgaattgtgtccccttccaaaattcatatgccagagttctaactccagtacctgcgaatttggccttatctggaaatagggtttttacagagataatcaaattaaaatgaggtcattagagtaagccctaatccaacatggctggcatcctcataagaaggagaaattgcgagacagacacagggagaaggccatgggaagaagaagccagagatcagggtgatgctgccacaagccaaggaaggccaaaggttgagcaaaccctcagcagctagtacaaaggcagggacaaatccccctcacagccctcagaaggaaccaatcctgccaacaccttgatcttgaacttccaacctccagaactgtgagatgatacatgtctgttgcataagccaccccatttgtggtactttgttacagctgccctagcaaactatcccacaggcacagcaaggttcctccaggtgcttcccatgcctagacactgcccgtggccaccataaatcaacaggatggagggcttgtattggaagagatgtccaaggggaggcaagcatgaggcacatggcacttcctcagagaacacgcagaggaccctctgctcataggcaaacagaaaacaccacatacagtgagtttggccaggaatgtaaggaaacttcagatgaaattgtatgtgaagggcaccatagggcagctagaaataggcctaccactgggcctccccagcacacgaatggctggtgtcttgactctccccacggagccaagcaagttggggccaagactcatgctggtatccccagctcatgccctaggcatggcacctagtaggtgcttagtaaagttttaaaggagagagggaagcaaggaggaaagacttgtgaaatctaaatcaaatggcccctattttctgggaaaggctcacctattctcaacttgttattagctgccacaagttctatcagattaaacatgggtaggacatgggcaaacatttttaatagtgatctatctattttaattaattataattgggtaaacattccctgctagtatatccaagccatgatttcaagaaaattatgattgaggatgagacaacatttaagtaatgaaacagtaagtttaaagaaagaaacagtaagtaattaacaggtgatatgaagatatgataaaaatgtggaagtcggtcatgaatcactggagttcaggccagctggtctggggtacctgaagctcggcagctgctgctctcagcaacagtctggccaaacctgatgtattagtcaggcttctccagagaaacagaaccagtaagaagtgtgtgcattgagagaggaagaggcttattttaaggaattggctcatgtgatggcggaagctggcaagtccacagtctgtgaggggggctgtcagaccggagacccatagatgacctcatgttgcagttcaagttcaaaggcagtcctccggccaaaatctcttgtgctggttggaggtcagcattttgggccattcagtccttcaactgattaggtgaggcccacccacatcatggcgagcaatctgttggcaggattggttccttctgagggctgtgagggggatttgtccctgcctttgtactagctgctgagggtttgctcaacctttggccttccttggcttgtggcagcatcaccctgatctctggcttcttcttcccatggccttctccctgtgtctgtctcgcaatttctccttcttatgaggatgccagccatgttggattagggcttactctaatgacctcattttaatttgattatctctgtaaaaaccctatttccagataaggccaaattcgcaggtactggagttagaactctggcatatgaattttggaaggggacacaattcaactcatactgagtcaaactggcagggtgggacagtgacaaacgaggagccttccgcggggaccatggtgggtgagttgagctggactctcctcccaggcctctcactgtggggtgtcatgcttagtgaagcttgctcgttccttttgtgcatttggtcattcattcagctgcacagtgatactcagtggctcattcccacacttgctccaaatcacctacagaataagcctcaactcctcaggacagtctccaaagcccttcctgatctggtcaccaccaagtcttccaacaaaccttctgattcaagaattccaaaacacacccactgcctgaacacaccctgcagtctgcagcaaccacacctttgcacaccccattattccaacctggagtgcccttcccactttgagctcggtcccacctaaacctagtgcactagggctcctcttccaaagcattccctgctccctgcagacgcaatcatgctatctgctacgtctccatgtgtgtagacatcctgcacagacctccattcgaacacatattgtgtggctatggccagtgattcgtgtgcgttgaaagaaaaaggagtctgtccccactctaatttgaccactgtccccacctgtagactgagagctctttgcagccctctgagaacctatattgggagctggatattaggatgggaagctgaggaatacatagattgaaagcagacaaatcatggatgggaaaaaaaactcaacctcagccccacacacagtctgcatgaaacagggcatggacattaagtgactgaagggacagtgacagtaaaatggttcacttggcctggcctacaaagcaagcctaagaagctttgactccaaggctcactgggaaggatcctgtgaggctgcccaaggggctttcaggagccaacatcctgatgcatggccagcctggccgctttgagactcaagggttctccaggacctgggcttagagggaactggcagtgccagggccggcactcatgcctcccttggcaggcctgatcctgcccatccatgggccatctccaaggaaatgcatacggattgattttcatctccacagctagaagagggctgtgatcatacagcttatctttcccagaggccaggagacagcgacaactccagggatgtgcttagcaaagccctggaacgattttaatggacaacacaattgatccatttctgcctgggctttttgcctccttccagtttcctgctaaaatgcacagctgcttctttattgcaaagtgtgaaatctgtaaattagaaatgtcctcttggggacggtcagcagctggctgccctgggcacagacagtgggtggaacgggtgctccgcggcctgcagcagcttctccacaagccatccccctgccctgcctcctctcacactctcatctctctgtcacataaacctgggactcataccttctttctcaaaagacttcatgttctcaaaagccttgcttcctgtcttgtcttccctgagcaaggaataagacatgagattgataatgggaacacacagccctgccttcagcaccggacccttccactgttcaaagaacgcttgggggcctagggctggctgggcaatgggagccaggcatgagggctcgggagaggcaggaaggtgtctggccccagccttctccatggaacctaggacccccagccccctggccttgcagctaaatccctgggactgtgtttgccttcccccagcacccagcatggatgcccctgaggggagccagcaagggtttcctctcttgtgcaaacctgacaggtagactccctggacccagctctatgtcagaagctgtgtagactcaggtccacccttaagggggctcaacaggcataagggagacctcctctggctgggacggagctacccccgtcagcacagcactcagaaactgggtaacagcccagcagctgctcatcccccgcacacagcataaacagactccctgttgtacccagtaccttgaactgaagcagcacaggtttcagagaggtgagtgtggggacatggggcccaacacttccaggaagcccattagcagctcaacagcaccagctgagtcacagcagcctcctggagcggcctgttgaattactcagccctgttttagcaaatggcctggataggggctgattaccctttgaacacagttccgaaaaggaatctctgaagtcatcctggttctccctgataaaggctgaatgttctaggctggtgggggcaagggctgcctgcgagtccctggggctcctcactgtagatgatttaatcatgcatttcgctccagggctccagggctccagggcttagccaaatcaaggggcttgggcactgggttggagggaataaaacatccatcagaccaggaagtgagggaaatagaagccaagaaagaaaccagggtccactttgaacacagctgtctcagtcagcagctccttaaaagaaatggaatgtgacagacacccggctccaaatcccagcaccaaccctgggtgcccttgaccaagtcatgcaacctctctgggcctccgtgtcctcctctgtccatggtgataaaaagcacctccatcatgcggctattttcaagatcaaacgagttaatgggtgcaaagtgaccagagcatgtcagacacttaaacagggtcacttccccctttgacctaacagttatagagtaaattaactcccactcttctttaagcggacgttatttcctttctgtagacaatactctggttaacctccctagcagtgggtgcaaggggcaggaaggtgagaagcagctagcagggaaatctgaaaggaccattcggtagaggaggaaacccaaaagggaaccatgtcccaaaggacaagtgcaaggaagtgaccaccatggccgaaggctgttaagaaacggagtaagggcctggcacggtggctcacgcctgtaatcccagcactttgggaggctgaggcaggtggaccacctgaggtcaggagttcgagaccagcctggccaacatggtgaaaccccgtctctactaaaaatataaaaattagctgggcgtggtggcacacacctgtaatcccagctactcaggaggctgaggcaggagaattgcttgaacccgggaggcagaggttgcagtgagccaagatcgtgccactgcactccagcctgggcaacagagcaaggctatgtggaaaaaataaaagagagagagagacaaaaaaagagagagaaaaaggaaaggaaagggaagggaagggaagggaagggaaggggaggggaggggaggggaggggaggggaggggaggggaggggaggggaggggagggaagggaagggaagggaaaagggaaaagggaaaaggggaaaggagaaagaaagaaggaaggaaggaaaaaaggaagaaatggagtaagatgaagcccagggtttttcaccactaggtttggcccccaggagcaacatctgtaggatgcccggcatcctcctgattggagagtggagtgtctgagtgggagtccccagaagcaaactctgacacaaggagtcaagtgcaagaggtacatttgtgctacgcagggaaaactggggggattaggcaagtgggaaggaaaagcagcacactaagaaatctccacacagacgactggagcttcctctagtagggaaacaatgcagaatttggaccgccagattttaccaccaagggacaggggacagggtatctacacaccaactccaaccatctctgattgaagaatgctcccaggtagactaattccctcacttccaacctgctctgagtgcaagcaaaacatggcctttaaggttccagaaaaagccccagacacagagaggcagatgctgcagagcccactgacaagggagaggaggaggatgggcggtgatcactgccagcatctgctgcagaggggttcctgagagaatgggaagagctgcagtggaaacagcaagtaaaggtaactatctcattattattattattattttgtgatggtctcattctgtcgcccaggctggcccaggagttcaagacaaggttaactattttgaagagttttgctcaaagaggagcagagaaatggggctggggatgaaaatggatgcaaagagggccgtgcagagatggtgggtattacagtgtgcctgagagctgactgatatgatccatttgaaaaggagaaactgacaatgcaagaattccacccttatgtaggtgacagggaattatttctagtatccaaggggttgcctttagaaggagcacacggtgtttctgctcaacatcagacagaagaggaggctcatggccacagacgatggaagctgatagacatggcagtgaatgcacagatcagctctgccctcatcattcccgttttctcagtaaattaaaaagcaaagtcattgtgtttatagcagctttgtccacaattgccaaaatgtgaaagtaactaaaatgtccttcagtaagtgaatgaataagctgtggcacatccagacaatggaatattattcagcactaaaaataaatgagctatcaagccatgacaaggcacggaggaaacttaaatgcatattgctaagtgaaagaagccaatctgaaaaggcgacatactatatgattccaaccatatgacattctagaaaaggcaaaactatagagagagtaaaagaatcagtggttgcctatgaataggcagagcacagagcattttcagggcagtgatattattctgcatactactaataatggtgaacttatgtcattacacatttgtccaaacccataacatttacagcaccaaagagtgaatcctaatgtgaactatgaactttgttaataagaatgtacagatattgctttattggttgtaacaattataccacattaattcaagatatcaataatagaggaaattgggggaaagtgaggcagttacatggatctcactgtactttttcctcaatttttctgtaaacacgaaactgctttaaaaagtaaagtcccttaattttctcaaaaaaggaaaaataatagcaagacgtaactacagaagaagcagtttcagaggtttgaggggagggaacacgtgatataaatagccctgggcagtgcagtagaataatcctgcagcatgaaggacccatttgagggcaggtggagttcctagaggccagttgcagcctggctatgtgttttctgccaacagcattccattgcccaggggcagcggcaggtgcagagcagggagggagttgggtttaagcaaaattgtggttgctctaggcaagcatgcctccttggaaattcccctgcaccctgtcctcatcatctctcacctgggccattgcaataacttctaactggtccctcagactccaacccatccccatgttactgccagagacagcctcaaagaaaactcatccaacagggccactgcccctcttcccaagttctggaggtgccccgtttcccacaggataaagcacaggctccttcacacaacccacaaaaactttttagccccccaggccaaagctgactctccaacctcaagtccccaccctacgcctccctctgccccaccactcagtgctgcccaaaccatgactctgcacctgtgtacagattgtcccctctgcctgcactgtcctgccccctttctttgcttccattctctgaaatgtggctcaaatgtttcctcctttgtagtgtgttcccagcaggcaaggacagagcgggtggaagcagctgatgatctcagctctgggtttctgtttctattcctgcaaggaattgtctgccttttcactccactagaccaagagtttctggaggatgaaagatgtcacattgctcatctttgtcactacacccagcacaaagccagacacatagtgggggctcagtaaagtctgtgaaatgactgagtgaacaggtgagtgcaagtggactgaaatgtcacgtggcctggctcccatctgaacttggaattcaaagcagcattttcttctccccttgaacattatattctcatgcagttgtatctaaagcatcacttattgggagatgccctttcttagaagggtaccagggctctcgtagcggttgaggactggcggggagaacttgtccctgagtgtgtggccacctgggagctccatgccatcgtttccatcttctaagcccagcgtggtgtcgctcatgctatctcctgtgctgctgtagaacagcagtgaagtgcatggtggttttgcacaatgtgacacacagttggtctcaaccgcagccagtgaatttcgctcctcgctgtcatgagacaactgttgtcaagaagtctgatccttaaatcttgtttcagaagcggacattgcacgaagcgatggggaacaactacaacttatattccttttccaagtgatagtaaaagtccatcctatcttcagatccaagtctctggtccgttctgagaaatgaagggtctgtcattaaatcacaaggaatataagttatgtcgctatcttcatccctaggaagaagaatgataaatctgccagcattaccttcaggaatcaggtcaccttggccaacacagccaatgacctccactcagcatgcaccctgcaggcagctttccacctgaataccccaatccagtgcacaccaaactccagttcagctcgtaagttgtacttgcgtgttttcagccatgagactttgcagcaacaggaggctgctttctagggttgcacccacacccacaaaaagctttccaggtgtcccaagggaaggggcgaggcttctttcactgcatccggagtccctgctggacatcagcctcggtctggttgttgtgcatccactccacaaagatgtcctgtgtgcctcctgtgatcaggccctggcatggcaggaaggacatgcactgaatatctggtgtgtccctcgggactcacaaagcagtgacggggtagtaggtacacacacaaatgcaatcgagggaagcctagggcactgaaggaggcgccctaggtgcccagccaggctgtgagcaccaccgaagacttcctggaagaggtgatgactgacctgtgtctttaaaaatgaggaggccttatactcattaggatggctactatcaaaagaaagaaaggaaggaaggaggggagggagagaggaagagaggaagggagaaaaagaaagaaaatacgtattgttgaggaggtgaagaaattggaacccttatgcactattgacagaaatgtaaaatttctatcaataaaaattctgctgtagaaaacagtacggcaattcctcaaaaagttaaaaatagaaataccctatgatctagcaattcaacactgaacatatacccaaaataagtgaaagcagggtctcaaagagatacttgcacacctactttcacagcagcattattcacaatagctaaaacaactcaagtgtccattgacggattaatgaatggataaacaaaatggtgtctatccatgcaatgaatatgacttagccttaaaaaggaaggaaattctgacatatgctacaacatgaatgactcttaagaacattatgctaagtgcagtaagccgctcacaacagaatactgtatgatctcacttacatgagttatgtagagcagtcaaattcacagagacagaaagtagaatggtggtttccagggactgaggggagggaggaatggggagttattgtttcatgggtacaaagttgcagtttgggctaataaaaaagttctggaaacggatggtggtgatggttgcacaacactgaaaatgtacctaatgccctaaaaatggttaacgtggtaaatcttatgttatgtattttaccaatacgcatgcaatgtatatttaaacaaataaagaaagaagaggagtttccagggaagagcatttcaggaagaaacccccgtgataagcctctctctcactgcttcgatgagccccagacatgggagggcagagacacctacctttggagtgagcaggaaaaacccctccaggaatagctggagaggcagcctggaaccttgggtcctcggcttgtttccctgggctttcggggctcagccagtgtctgcctgcccacaggggctctgccctgccactgccattccgtggacctccagtgccagcctcagaaggacggcgcaggcacccaagggcaagaagttagggtggaactggcagatgcaggcaagtgtgagaaaatgtggaaaacaggcatgaaagcaggaaaggtcgagagagcacagctggttgggccggctgagacatgtgtactctcccaattgtactctccaagagtcctggtgctccagggacctgggtggggaagatgaataccctcaaaggtaacctcctgcctgacccctaggaacaaagtaaataaagttgagtcttctcacagaatgaaatggacagtcacagggaacatctcctttatttcctggtcaccaggaaggcaggtggcagctcagagctgtcacctccatccaatggtctccatatccctggggatcccaggggtcttcaggacttgcaggcaggggacatcagtccgaaggtccctgctgatcccacagcccgtggcatcaaaccaggaacaggctggggaattaggaagagttctgatactcaccgagccccaagagcagaacccaggctctcccactgccatcgggacccatggcctgggcattgcccagcatcccgagcttgcttcagcccattcttttctcaggtctccacaccccagcccagctgggcctttctgttcctcaagctcaccaaactctttggagcctctagtcctttgcactcactgtcccttcccatcagagtgctgttccccatgtccccagggctgacctatgctcttccttcaggcttcagctcaaatcaccacccccaagaagccctccctgaccacctagctattctccatcacatcccttggctccttcctgccacagaactcaccaccctccacaattgtctgctccacttataccatctctgtttattcatttactgtctctcctccttctactttgtggttccatgagggctggggtctgctcttgtctgttatttttggcctggcacccagatttggcactagacacttaggagtcaaaaatatttgtagaatggatgaacagatgaatatgatctgccaaacacttccgcacccattgttttattggatctatcaggagattgcttttaaataggaacgactgttcccaccctacagatgaggaaagcgagcccagggagactgagtgccaccatcacacagatagtcagcgacagggctgggactcaaagccacacctgtctgagggttctgcagaacccacagggggttataagcaaatgaaacaattgagtgtgcctgtgtgcgcaagtgtgtgtgtgtgcaagcatgtgtgtgcatgtatatgtgcaggagtgtgcacaagtgtccatgtgtgtgcatgggcatgtgcaggtgtgtacttgtgtgcaagtgtctgtgtgtgtgcatatgtgcacagatatatgtgtgtggacagtgtgtgttggtgtttgtgtgagtgtgtgtcagtgcccccaggctcctgaacatgacttcactttgaaagtccaggagctcatggaacagaaggagctcatctttttcacagctgtatgcccaggacattccacagggcctgcagttgagcatcagtaaaagttggctgaactaattgcaaactcaagagctgtacatacatgcactgtcgttgttttaagttcctttgctttcttgcctgtgtatgtcaaaggaatgaacacacctgagtctctagagacaaaattaccaatagtttagggttaaaaaatgaatgtatttacatggaaggcatggggcatggaaccaatacaagcttctgattcctttgtaatggctatacacacttatacacacttcccatctgggtcttctccatcctgcctctatgctcacctctatattagaagatggatggatgtgtgtgtgtctgtgtgtctgtcgggggagctcttgtgtctgagcatctatgtgtctgtgtgtaatatgttagtatgccagtatatggcatgaatgtacatgtgggtttgagtgtgtttgtgtgtgtgtgtgtgtgtgtgtgtgttgtgagtgtctgcataatggagtctgtgtgtgtgtgtccggggtgtctgtgtatgtgtgtgtacagacctgttgtgataggttgttcctgagactgtttatacctgtgtctctacaagaagatccaagtgtgtgtgtgtgtctgtgtgtgtgtgtgtgtgtgtgtgtgttttctgcctcccctccagagtgaaaactgacaagacagagaccaggccagctctttctgttttccttcactggccactcctatgtgtccaataatcacaaccaactaatttgttcattaacagaaggaaagctcagaacacccttgggtccctgtccacacaatctcccagtatcacagagatgtgcagcccagcacagatagcacaagggagaagctcccattctctaccacatggctgctggcccacctccctcccagcccgcaaccactgagaccccaccgtgcaaaggcagcctaagttttcatggctctgctcaggatggtggtgcagccaccagctctgggtcaggcccctatagtgctagttcctccccaccccctctgtcctctatctgcttatgcagagcacgtcctacagtcagtgcagaagcaggaactgtctgcagagctcccaacactggccgcctctgtcctcgccaacaaccgcggactgttccagccccacaaacgcttccgtggctttgtatccattaaaggcacaatcttgctcaaccaattaatgaagcaccttctctcacccaattctcaagtttccccagagccaaatgtaaagtctatacaataattaacacagcccgctgtttgataaaggaaggcttacatctttaataattctcaatgaaggaacatcctgtgaaggaattgtttaattaaaagacaacaatgggataaaaggtaaataagaaggaaaagagagagagggagagggatagagagagagagagagatcacatctgttaattcagaactaaataaatatcccccacttgagattccttactttcttagaatccagatatacttgtttagcatgcaaatgtattctgtcattaaacatgtttgaaaaatgagcaactgtactttgactaattttgtatctctctgcttaaagaacagctgtcacgtcccagagagcatggggatcccagctctgaaacagtgactccacttctccagggcaaattagagattgctgggaggaacttcagatgaaaactttgggggttcatggttgagggcaggccagagtggggacttctgctcccagggaaatggagtagacatactttttccttattctccccactaagtacaactaaaaagcccaaacattgtacagaaaacaaacataagaagagtctggggattattcaatgaagagaagaaggcagaccagctcaggacctcaggacctgaggaatgacatgatgttgaggtctggagttttctttttgcctcatattttgcagacttgcagcagaaaactcagcaacccagaaagatcaatagatgcaggcaaaaaaaaaaatgctatcaacagaagtcctgctctatctagccaaaggtccaggaaaggggtaggctaccaagacagaaaactttcagataattgccaccacactccagccaaacactccagaaaggaagtgcggtttcacctccccaacaccagcaaagcccgagtgcagatcccagactccccatcttcaccaggctgaaatgaagtccccatttgcccagctgggtcatatccaaaagggtttagtatagagtcagaatttataccactgccataaagagttcacaaacacaccgcccccctacatggtgtcagtgaaggccatctggggagcagtaacgatgcatccctacttctcccagccagggaagggtcagtggtggcttcagtagggagccagaacttccacatcttcccagcagcaacacagaacctccacctcaggtttcaaaggaaaccaagaggagaacctggacttcatttggaacctggaaccctcatttgacaataatgagacagcaaccccctcaccagagtagtatcagaagaaaccagctaaaacagaaggcgtaaggaagacccatgagcctcataacgtaattccccagaatttccaggtttcaaatgaagatcactattcacacaaagatccaggaagaactcaaactgaatcaatcaatagattccagcgctgagatgatgaaatcataaagaacaatctgacaaaaatttttaaacagctagcataaaaatgcttccatgggcaattgcaaatgtatttgaaccaaatgaaaaaagaaaatctcagcaaggaaatacaatatataaagaaggaccaaacaaaaaaaaattttttttttttttgagacggagtctcattcttgtcacccaggctggagtgcaatggcgtgatctcggctcactgcaacctccacctcccaggttcaagtgattctcctgcctcagcctcccaagtagctgggactgcaggcacacgccaccacacctggctaatttttgtatttttagtagagatggagtttcgccatgttggccaggctgctcttgaactcctgacctcaggtgatccacctgccttggcctcccaaagtgctgggattacaggtgtgagccaccgtgcccagcctggaaattttaaaactaaaaaatacaataaccaaaaataaagctcagttgaaagaggagacagcagaaagaatcagtgactaaaagatatggccgtgcctggtggtgacgcctataaacccagcactttgggaggtcgaggtgggggaatcacttgaggccaagagatcaagaccagcctgggcaacatggagaaatcccatctctactaaaaatgccaaaaaaaaaaaaaatagtgggcatggtggtgcacacctgtagtcccagctacttgggagaacttcttgaacctgggaggcagaggttgccgtgagctgagatcacaccactgcactccaacctgggcaacacagtgagactgtgtcttaaaaaataaaaaataaaaagatataataatatacattacccagtctaaacaacagagacagaatagactgaaattttaaaaaaatgaacatagcctcaggaacctgtgagactatgaaaaaaaaaaaagatctaacatttgtgtcattggagtcctggaaggaaaggagaaagaagatggggctgaaaaagtacttgaagaaataatggctacagggaaacatgacagacaggaggcaggtcaagactgcaggtctagacagagcaatacagaggcttgcattgtgaattttagctccagattgactccaagaacaaaccagcaattccgagaggacccacagaccctctgaaggaagcaaactgcttctgcaggacccaagagacaccccaaatactgtgaatatcccaactccagaagtgggaaagggagaccctcctctcctgaacacacccccactggagaagctgaaggtctgtttgtgggagaagtttccgcctttacctggagctgaatcaagttagaggaccgagtgaaatacaggggtataggaagcagcagaaggccctgggagctcactgggtcccctagtagcccattccttcctggaaccacagggatccatcaggatggcagacagagaagcagggggtaaaactccacagggagaaggaattctctagctgaactttttaacaatttgagcggggtgagaagactcctggccagaacttggggaagggcacaaatctggtgttcagacttcacaggctgggcaagaaccaagcccttttctctcccaggtgggaggcagatagccttgggcaaattttcaagcccatctcgcactctgcctggaaacagactcagggctattgtggcgggcaccgtgagagtgagaccagcccttcagtttgcgtgggagttgggtgaggcctgtgactgccagctttctcccgcttccctgacaacctgcataactcatcagaggcagccataatcctcctaggtacacaactgcagtgacctgagaatctcacccccatcccccacagcagccacagcaagactggcccaaggagagtctgagctcagacacgcctagccccgcccccacctgatggtccttccctacctaccctggtagcagaagacaaaagacatataaccttgggagttctagagccccgcctagcaccggtccctctccacagtgctacagctgatgctttccagaaagcatcacctcctggcaggagaccaaccagcacaaagatagagcatcaaaccaccaaagctaaggaatctcacagagtccactgcaccctctgccacctccaccagaacagttgctggtatccatagctgagaaacccacagacagttcacatcacaggactctgtgcagacaacccccaataccagccccgagccgggtagactcgctgggtagctagacccagaagacagacagcaatcactgtagttcggctcacaggaagccacatccacaggaaaagggggagagtactacatcaagggaacaccccatgggacaaaagaatctgaacaacagccttaagtcctagaccttccctctgacagactacccaaatgagaaggaaccagaagaccaaccctggtaaatgacaaaacaaggctcttcaacacccccaaaaaaatcacactagttcaccagcaatggatccaaaccaagaagaaatcccagatttacctgaaaaagaattcaggagcttagttattaagctaatcagggaaggaccagagaaaggtgaagcccaatgcaaggaaatacaaaagaatgatacaagaaatgaagggagaagtattcatggaaatagttagcttaaagaaaaaaaattcaggaaactttggacacacttctagaaatgcaaaatgctctgggaagtctcagcaatagaactgaaaaagtagaagaaacaaattcagagcttgaagacaaggtctttgaattaacccaatccaacaaagacaaagatagaagactaagaaaatatgaacaaagctgccaagaagtctgggattatgttaaatgaccaaacctttatgtgcataaagactcacataaacttaaagggtggaaaaaggcatttcatgcaaatggacaccaaaagcgagcaggagtagctattcttatatcagacaaaacaagctttaaagcaacagcaactaaaagagacaaggagggacagtgtataatggcaaaaggccttgtccaatgggaaaatatcacaatcctaaacatacatgcagctaacactggagctcccaaatttataaaacaattactaatagacctaagaaatgagatagacagcaacacaataatagtggtggacttcaatactccactgacagcactagacaggtcatcaagaccgaaagtcaacaaagaaacaatggatttaaactataccttggaacaaatggacttagcagatatatacagaacattcaatccagcaaccgcagaatacacattcaacagcgcatggaactttttccaagatagacaatatgataggccataaaatgagtctcaataaatttaagaaaattcaaattatatcaagcactctcccagtctacagtggaataaaactggaaataaactccaaaaggaaccttcaaaaccatgcaaatccatagaaattcaatagcctgctcatgaatgagcattggtttgaaaacaaaatcaacatggaaattaaaaaattcttcaaactgaatgacaataatgacacaacctatcaaaacctctgggatacagcaaaggcggtgctaagaggaaagttcatagcccttaatgcctacatcaaaaagtctgacagagcacagacaatctaaggtcacacctcaaggaactagagaaacaagaacaaaccaaacccagaaagaaaataaccaagatcagagcagaactaaatgaaactgaaaaaaaaaaaagacaaatgaaacaaaaagctggttctttgaaaagataaataaaattaatagaccattagcaagattaaccaagaagagagaaaatctaaataacctcactaagaaacaaaacagtagatattacaactgataccactgaaatacaaaagatcattcaaggctactatgaacacctttatgcacataaactagaaaacctaaaagagatggataaattcctggaaaaatacaaccatcttagcttaaaccaggaagaattagataccctgaacagatcaacaacaagcagtgggattgaaatggtaaaaattaccaacaaaaaaaagtccaggaccagacggattcacagcagaattctaccagaaatcaaagaattattggcatcaatccttctgacactattccacaagaaagacaaagaaggaaccctccctaattcattctttgaagccagcatcactctaataccaaaaccaggaaaggacgtaaccaaaaaagaaaactacagaccgatatccttgatgaacatagatgctaaaatcttaacaaaatactagctaaccaaatcctacaacatatcaaaaagataatccaccatgatcaagtgggtttcataaatgggatgcagggatggtttaacatatgcaagtcaataaatgtgatggacaacataaacagaattaaatataaaaatcacacaatcatctcaataggtgcagaaaaagcatttaacaaaaatccagcatcgctttatgattgaaactctcagcaaaatcagcatacaagggacataccttaatgtaataaaagccatctatgacaaacccacagccaacataatactgaatggggaaaagttgaaagcattccctctgagaactggaacaagacaaggatgtccactctcaccactccttttcaacgtagtactggaagtcctagccagagcaatcagacaagagaaagaaataaagggcatccaaatcggtcaagaggaagtcaaactgtcactgtttgctgacaatatgatcatttaccttgaaaaccctaaggactcctccagaaagctcctagaactgataaaagaattgagcaaagtttccagatacaagactaatgtgcacaaatcaatagctcttctatacaccaacagcaaccaatcagtgaatcaaatcaagaactcaaccccttttccaatagctgcaaaaaataaataaaatactgaggaatatacctaacaaaggagtcaaagacctctacaaggaaaacactgccgaaagaaatcacagacgacacaaacaaatggaaaaacatcccatgctcatggatgggtagaatcaatattgtgaaaatgaccatactgccaaaagctatctacaaattcaacgcaatccccatcagaataccgccatcgttcttcacagaattagaaaaaaaaaaaaaattctaaaattcatgtggaaccaaaaaagagtccacatagccaaagcaagactaagcaaaaggaacaaatctggaggcatcacattacctgatttcaaactatactgtaaggccatagccaccaaaacagaatggtactgatataaaaataggcacatagaccaatggaacagaatagagaaaccagaaataaacccaaatactcacagccaactgatctttgacaaagcaaacaaaaaaataaagtggggaaagaaaacctccctaattcattttcaacaattggtgctgggataattggctagtcacaggaggagagtgaaactgaatcctcatctatcaccttatacaaaaatcaactcaagatggattaaggacttaaacctaagacctgaaactataaaaattctacaagataacattggaaaaactcttccagacattggcttaggcaaggatttcgtgaccaagaataaaaaagcaaatgcaataaaaacaaagataaaaagctgggaactaattgaactaaagagcttttgcatggaaaaaggaacagtcagcagcataaacagacaacccacagagtgggagaaaatcttcacaatctatacatctgacaaaggactaatatccagaatctacaacaaactcaaacaaatcagtaagaaaaaaaaatgaacaatcccatcaaaaagtgggctaaagacatgaataagcaattctcaaaagaagacatacaaatggccaacaaacatatcaaaaaaatgctcaacatcactaatgatcaaggaaatgcaaatcaaaaccacaatgcaataccaccttactcctgcaagaatggtcataataaaaaaaaatttttttaaaagtagatgttggcgcagatgtggtgaacagggaacacttccacactgctggtgggaatgtaaactagtacagccactatggaaaacagtgtggagattccttaaagaactaaaagtagaactaccatttgatccagcaatcgaactactggatttctacacagaagaaaagaagtcattactcgaaaaagatacttgcacacacatgtttatagcagcacaattcacaattgcaaaatcatggaaccaacccaaatgccaatcaatcaatgagtggataaagaaactgtagtatatatatgcagccataaaaaggaatgaattaacaacatttgcagtgacctggatgagactggagactattattctaagtgatgtaattcagaaatggaaaaccaaatgtcatatgttctcactgatatgtgggagctaagctatgaggacacaaagccacaagaatgatacaatggaccttggggacttggggggaagagtgagagggggcaagggataaaagactacaaatatggtgcagtgtatacatggatgatgggtgcaccaaaatctcacaaatcaccacgaaagaacttattcatgtaaccaaataacacctgtaccccaataacttatggaaaaaaaagaaataatggctgaaggagttgcccacaaccacagactgttccagccccacaaatgtttccatagttttatctccattaaaggcacaatcttgctcaaccagttaattatactggaccacttccatcagagaagtggcagcattttgcccttactggaatagccacttagtccagatacggatttgctatgcctgcacacaatgcttctgcaaaagctaccatccgtggacttatcctctgtcacagtattccacacagcattgctactgaccaggaaactcatttcacagccaaagaagtgtggcagtgggctcatgctaatggaattcactggtcttaccatgttacccatcatcttgaagcagccagcttgacagaatgatgggatagccttctaaatacttagttacaccaccagctaggtgacagtaccttgcagagctgggacaacattctccagaaggctgtatatgctctaaatcagcacccagtatgtggtactgtttcttccgtagccaggattcacgggtccaggaatcaagggatggaaatgggagtggcaccacttaccattaccccaagtgacccactagcaaaatttttgcttcctgttactgcaactttatgctctgctggcctagaggtcttagtttcaaagggactgtccttgggcaacaactccaggcttcccagcctttggactccagtacttaccccagtggccccctggtcttcaggcctttggccttaaagtgtgagtgacaccatccacttcactggtcctaagaccttcagacttggactgagccacactaccagcatcccaatgtctctggctcaaagacagcctgtcatgggacttctcagcctccataatcatgtgagccaatcccagacgatagatatataatagatgatagatagatgagagaggatttattaggggattaacaaatatatcgaaaactgctaaaacttcagttgtaatcaaagcaatgcaaattaaaagaggatgccatttttcaccactcagttaaagaacatgcagtgctggggagactggtaaaaggaacacttttatcccctctcatctatctatcatctgtctaccgtctatctatctaccacctatctatccatctgtctatccatctatctgtctacctatctatctagctatctgtctgtctatctatcatctatctatctataatctatctatctgtatcctattggttctctttatctggagaactttaatacaaactcaaatagaaaaatgcccaggatatatagctaaatgaaaaaaaaatgcatactataacacaatctttgttttaaaaaaagaataaataataactatatgacaccatgtatgtgggaaaaggtggacagatacatattgaactcttgacagtggttatctctgaagagggtgagacaaagccaagtccactttcaactgcatgtgaatctatcatggctgaagttaatataactttctcttgtttttcaacagaagaaaagcattccaatcacttcttgagaaaaagagacagtaataaataaccaaatgtgaaacaaaaaaaaattccagacatgaagaaaatacaatcgagtggttattttccagcatggcttatcttcagaaatcatccctttgttttccacaaagtggattttagataaaaataccacacaagataagtagttctttgactcagttttgctaaccatggcacctctgttccagtggcatctggcctccttttatatcctcaagtcaatgtagttaccatattatggttctgatatgaaaggagtacatgcttactattaaaaggatgatcttaaatcactcatattcatcccaccatcacacaaccattgttaacattttctgttttacctctttccatatttggctttatgcaaagatccctacagaatcttacatagttgtaataaaatatgtgcattcttgtgtcttgcttttcccttagagcctacacagtcatctgatgcgatttggcaagcactcatcggtccctgcaggatcctctataacttggatactgtcattgccttaaccacacccctaacattggctccttagattatcacccattttttattcagctgttttgaacaacttcatgcagaaagcttccttagaataatccctctggagagactcctagaaattgaattactgggtcaaaaggtacaaacatttttatagttccagatactcattactaatttaccttccagaacatctccaccaggttacgggcaagtgttcattttaccaaagtctccccagcactgcatgttctttaactgagtggtgaaaaacggcatcctgttttaatttgcattgttttgattacaactgaagttttagtggttttccatatgtttgctaacaagctgcatttcctcttgtgatttgtttgatcatgttctttgcacgtttacctactggaaatgatcagtgtcatacttaagcttctctaagccctctcttttgtcacacttctgctacaactcccctatttattgactgccattgatgcccacttgaaataatattagtaataaaatttcagacctaaagagcactcaacacaagcacactctggtttgattttcacaaccctcttctttgtaagactaatgggattcgtaatccccattttacagagcagaaagcaaaggtccaaagtgattacactggcttttccagggtcacataaccactaaccaccagtgttggtaccagaacttctttcaatttcaggggacaaggtagcacagtggttctgagtccacatctataacccagctctgccatccccagggataacagcaatttcctcctggggcaggtaagagtcaaatgaatcatagatgaggggtgctgagcaccctgcccatggtgactgctctataaatccttcatttcacaaacacatgcagatgctgttggggccaagcatcctgatgagcactggaaatacagagaccagtagttcagagtctggcagagaaaacagacgaacacaccactacaagaaaatcatcatggcagggccctcacagatgtgtgtacaaggcaccgagaagccacgacccaggccccttgtcccttcaccagggcagaatctgccactcaaggtcaaattcatctttctgaagtttcacattggagcacagtctggctcctccaacccaatgtcatccataaagggtcacagaccaaatgaaatgactctcataaatttccccacatcccatccatcaagccctccctctgtgactctcccctggcagaaggggcctatgcttttcctgagcatgtgtgtctgtgatctccttagaccagaggcccagccatctgtccatcctcagggtccgactgcttcagagtctgcagacagcagcttctctggggtctccatgcacaggggccactggtggctgggggtggcacaggacagccctcagtgttccagaggccctgcattgcaactggcttccagataactgggaggggtatctggggccaacttcagcaccctcatggggctggggctctaatatcatcagttattttgactcctcagggatgctggtgcagggaaggaggccagagcctggtaactagcatgcaggaaggtgtgggggcagcatagcatggggagaagtgcatgagcttcagggcaaagagaccctgactcaccaagtgactctgggcaaataacagcctctccatgcctcagcgccttatctctgaagccaaacttaaagcagatctggcttcaaaggcttattgtgcaaagtattgtaatcacacacataactgagccttgactctcccaacagcatgcaggctgtagaatataagagcctccaattaccgagcacttcttgtgtgcaggactgtatttgaaacatgtctcatatatcatctcaataaattcttagcataaccctattcaatcatttagtcaaatatctactgagcatttttcttaggtgctggagatataggattaaaaaaaaaacaaataaatgtccttgtgctctggtgaaacttacactccagtgagtggaagacagaaactaaacaagattaatcaatgaaatgtataataagttatacagtcaggagtgttaggaaagcaataaagcagagaggagggagagaaaatggcaagctgggggctaaagttttcacaggttggtcagagaagccctcattgggaaggtgatggggactgtttggattattggtaatattcactcccctccctgtaggtggcgtatactgcacagcttgacttgctgtagccaatgggatgttaactggcatagcacaagcaaaagcttgaaatgtgcacacgcaggacgtgtcttcttgtgcttgtgccatggccaaaagagagtgtctcttgggtagctgctgctcttccaatcttggccttgccgagatgctggcaaacagacccacagctggaagcagagcccaccaagcccagcctggatgaggcacctccaccaacctgtagggtgcatgagatgctggattccagtgagacttgaggctgtttgttatgcaccattaaatggtcactggtgactgatagggggacttttgggtaaagactttaaggaagtgagagagaaggggctcgtgactatctggaagtcgatttttccaagcagagaggaaaacaagtatagagatccatatgcaggggtccacctggcatattcatgggacagcaaggtagcctgggtggctggaataacagatccaggagaggagcagcaggaggtgacatcaaagagaggatgaatcaggtaagatgttagaggttgaatgaccgtataatttatcaccctaactaggacttgttttttaaatcaaagtgtaatttacatagcaaaatgcattattttgaatgtataatcttatgagttttataaacttagacagtaatgtaaccaacaccataatcaagatacggaacagctccattgcccacagcaattccttatggctctttgtagtgaatcctcctatccctaggcctggaaaacaccaatgagttttctgcccctatagttttgccaatcaggaacatcacataattgaaattatggagtatgaggcctcttgagtgcagcttctgtcactcagcatatgcttttgagaattatctcatgttgctgtatgtaacaggagtttgttcctggtttgtttttcattattcctttttttttttttttttgagacagagtctcactctgctctgttacccaggctagagtgcagtgtggtgcaatcatagctcactgcagcctcaatctccttggctcaagagatcctcccacctaagccttctgagtggctgggactacatggcatgcactatgcctggcttggctaattttattttatttatttatttttttgtagagacagagtctcattatggggctcaggctggtctcaaactccctttttaatgctgaataatattccattgtatggctgtaccacagtttgttatccattcaccagctgaaggacattgggatggtttccagtttgcggttattacaacaaagccgctataagcattcacaaagagcaaaccaggatgattctgagaacgaatatttcttctggaacaaaaggcataagtggggaccatccctcatagaccaggaagtgtgttcgccctgctttgtccacacagggactccagctataaccccagtgagacaggaagactctgagcagggtaatgacatgatcagctagaattttaacaggccactctggctgcctcagaatgacaagctgcatggagcaaggtgagaagcaggaaggcaggtcaggaggctgatgccagcaatggcttagaccagggacatagccattggggtggtgagaagtaatcagaatccagacacatggtgtcagaactgctaatggactaattatgaggggcatgaggaagaagcagcaaagacagcatcaagatgttgggcctgggcagctgaagaaagggtcacaggcccatttcacagagatggcttagtgtggacaaggcattaccccatgcccactcattgacagggaaaactggggctggtgttccagagccctgcccggcgctgccacaccatttgctttatgttaaacagagaataatcattcttcctctaaggaggaatgcaggcctgatccccacaacataaatgtgcccagtcctggaaaggccctacctgggagcagtgccaagaggcccaggggacgggagccaggcctccccagccatgtggaaccgtgaatctattaaacctctttttctgttcaaaaccagactgcgaggcctatggaagggcaggtgatatggtttggctgtgtctccacccacatctcatcttgaattgtagtgcccatattccccacatgtcatgggaggcacccagtgggaggtaattgaatcatgagggcaggtttttcccaagttgttcttgtgatagtgaataagtctcatgagaactgacagttttataaaagaacaattcccctgcagacgttctgttgcctgctgccatgtaagacatgcctttgctgctccttcaccttctgccatgattgtgaggcctccctagccatgtggaactgtgaatccatttaacctctttttctttataaattacccagtctcaggtatttcttcatagcagtatgaaatgggctaatacagcaggaaagcaagaggacaaagtcagcatgggcaagcagaaggggctggcagctatgaccacacccctcactggtcagcccactaagcccctgtgtgcaacagaggtggagccaggatagaggacagcaccagagtcggctgccactctgccacctgaggctgacctcctggggccagagaccagagctggccatcaattccctatagggcccaggtggggaattctgaggccctcagtcattccctgtgagcctgtgatgaggcccgcagttccctgccaccctctcagcctcagcttagtgcccagggctagattcacattatgccatgtaaggaggctcaactgcacccccaggccacaggcctaggctcccccaagcaagcgtcagccatgggagctggagcccatgtggacaagcagtgaaactgcagacaggccccggaggaagaggactcccgatgctgcttatgtaatgccttcttaggggacaggaacaggctccccttcattccacagcatctcacgttctgctccagccatggctcttaaacgtttgccacagtggggggcccttaggaaaggtgtgtgccttgtacctcaagggtagcaaggacagagggtaaggccaccctgggacactgcccacctcccctggcccaaccatgtcacgagagagagagagaatcattactaaccactgttgggctgaaccctgcacatggggcaatcaatcagtcatccagtgacagatgctgggcacagccctcatggtgttgcctcccaatctcattcatcacaactgttcctcctggcctcaggaggacagctccccctgccgcacttccctcataagcatggctctctgatgtggccttcagactctcttcagctacacacatgtgtaagggtgcacatgtgcatacttgttccagtctggcagagaggtaggtgccttatcccacggggtaggcaccactccactctctgcccaccctgttctttaacaagaacaggcttggagacatacggaccagggttcaaatccaaacctggcaggtagaaggggctagttcctcttgcaaagctgctggccagcccagctcagagctcagggtgcagttgggaccccagacccaaccacgcctgctctgtgaagttccctccaactctggaagccaggcctcagcaggtgcaggggtggccagacacccacgagaaggcccggcacaggcatcccacacctgtttcctccaacccacgaggggcacaactcacacccacttgcttagccagggcataggattccctcccagggtaaaggtccctgctgcaaggatggcccagacaggtgcatgcccaccatgctcagtgcttcacaaggcccccagccctagctggcagcagacaggcagcatgacacaaagggagcaccagctcctctgcggccagagaacatttccatgccatacatcaggggcaatcctcggcagactgaatgcccagagtcattcctgccttgttccatagggcctggcccagctgccccaccctccaggccctcaggaccacagggctctgcctctgtcccttcaatgttggacacaaacccacaccctagcatgcaccatggtcaggtccagctgaattcagcctggtatcttattcccaggacccggcctgagacagtgcactggaccttcatgcatggccgatgaagtgcctagggtgtgcgacagcggacaggggggcaaaaggtacagcattgagagcaggaagccagtgaagcctgcagcaggtgacaaggctgtgacaggcctcgtgcccccatgtgcctccacttgctgtggagattaattcacctgacaaatcaatcctacccacttctgacttcattacatagtcacataattacacacaagtttgggatttttaaggaagtgatttacggtggctctgaagatctggacagggttagtgccatcctctttcccaggaagttggagaagcacttttcaatttaacgagccatgttttctcaagaactgttaccccaaatacctgaggaaagagctgcatgaaataggcactgggatagcttcagtctgcccaagaagacagtgagggtgggcaaggttatgcctgtccattaaggcctggagtgtgcccaccacagagaccaggaaactgaggcccagagggtgtagcgctctggccaaggtctcacagttgtggagcacagagccggtcagaagcatggtctgtctgttacagatgccctgtttgattctgcaccacgctatctcttcagaacacacagcactggctgttcttgcctcctgtggctctcacacaattcccacacttgagtcctagccttctgaggcacacatctagattgggtggggaacacgctcttcaatgaaagcagagccctaggggccagctgcccctccccagcagtgtccggggcacacggagccttcattccccattcagcaagcactgaagcctcttctgtgtgccaagcaccagagccggcactgtggagagaaagatgccatcccccctctccagcaaaggttggaatctaggggagagattgacatcagtcaaataagcctgtgacagacagatcattgcagagtgaagtctgcaccctgagggaaaagcacgggcactgtgcatgtgtctaactggcctgggcaccacaggtcacccaggaatgctgccctgaggagccgcgatggggagaggaaaatgatggtagagttagcatggtatgcaagggggacaagaggatgggggctgcttcagggagaggaagccttgtgagagaagatgttggaaaggccagtgttcccaattgcaaaggaggatgatgatatccactgctcagcatggcagtcaagaccacggtcttggggaccatgagctccagggtctgagagctccccaagtgtctgtccttccctgaccctttgctcctgctctaggaaatttcctgtcagcaataatccaaatgagaaaaatcaaacactgcacatgcaggtttacactgaacaccgtcaaaaaaaaattgaagattggaaacagtcacaatgtccaacaacaggaaacattaggtagggtatgcaataacaattcttcatctcaatgcaatcactaaaaatgacgattagaaaggctttgcaaccacacaggaaatgtttatcccaggatgttaggtcaaaaaagcaaaacacaaaatctcatctagattatgggatggagggaggggccagcttcaggtgtgggaatacagggaggttctggcttcaggtgtggggatggagggaggggcctgcttcaggtgtggggatgggagaatgggcctgcttcaggtgtggggatgggagaatgggcctgcttcaggtgtggggatagagggaggagcctgcttcaggtgcggggatgggaggagggagccttgagttcaagtcaaacatttcttcctgggctgcacacttgggccaagtcattcacttctctgattcctgatcatcagagatgatcaggaatgtgcagtgagaagaggggtcttggtgaggtgcacgggcatgtctacggaagcaagggaacgaagggcaggactgcatggccgctggcaatggagagttccgggaatgggcaggctccaggatgaggccgttggaggtggcggctaagatgggatagagaatggagctggggaggtgaaggagcccaggggtgaagaggaaaatgaattgacaacaaggaggaggtgaggagagaggtgaagttctacgagagaggacttctagatcagaagcctagatgggtctttgtggtgacagaatccagactcctgtggagagtgagggccagacctgcctacggagaacaccaagtgacacaaatcctgcatgacaagtctaggaaaaggaagctttcccagtgcaggcacagcaggaaagcccagcctggaacccagatattaggcctggtgacagctcactgagtattagcgctttgccttaggtggcaccacggcacacctgcatcctatccaggtgccttcttctcactgcccgatagctgctctgggagggaacctggagccctgtggccctgccctggcccaaacagctattctgctggagacctttgactgctggaggtgtgccctgataacaatgcacagccatgaggaccgtgatctgaagggcgtcccttggcaggtacgatgtacaagcctcacaaatgtcagtggcaaaccccacagggtggcccaaaccttggcctagttatattgatacaggaggtgggaagggaagggcatgggccctttaaatgatacagaatgggggaagggaagggtgtggtccctggctagggctccactccctggcctgtgcccatggacctaagtgaagacaggcatttttgttttcctgcccaaatgttgcatttcccaagacctcccctggcctgccatgcccctatcctgtgcccataaaaatgctgagaccctaacaggcaaacacacaggcagctgaatattgagaggagctcatcatcgggggaacacacaggtggctggacatcgagaggagcacttcagcaggtaccgggaggccagccagccactgaccagcagaacaacgcagaatttggccagggcactcagaggagaacccaggctgccaaacaacccaactccaggggaaaaccatctcccttcttgctcccccatctgctgagagccactcccactcaataaaaccttgcactcattctccaagcccacgtgtgatccaattcttccagtacatgaaggcaagaacccgggatacagagagccctttgtccgtgcgacaaggtagagggtctaattgagctggttaacacaagccgcctacagacagcaaactaagagagcaccctgtaacacatgcccactggggcttcaggagctgtaaacattcactcctagacatcgccatggggtcggagccccacagcctgcccgtctgtatgctcccctagaggtttgagcagcggggcactgaagaagcgagccacacccccatcgcacaccctgcgagggggacaagagaacttttcccacttcaatataacctctttgcatccagcttcccccagtaaaacagagattttaacaaaaccctaccttgtggaatttaggggattcgacaagataaacaaaaaaagtgctcagaaaagtggtaagcctcaaaaggttattagctgttattattctgcgtgcttggaatggagctttgtcctatttttctcctctgggactggaaacttccatgacagaaggtgttcacacatgcatgcacatacacatgcacacccacacatgtgcacacagacatgtatacacaatattccagaaggagctccatctccccaaaagagcagaatccctgggatggagcagtgccagccctcacatgccatccccagcaccagactctgctctgcttttctccttgggattgtttgcatttccttatctgcctcccttctagtctttctgatttcccacttcctttgatttgcaggtcctatgtttaacaagagaggtctttgatcactttcagaatttcaccagcatgttttgaaaaaggcccaggcacctaagggcacaccaatgcctgtgagtctggcagttgtgtttcgatcactcagttttcctgagttgtcttagggcagaccccaccgaggttggctatcataagtgcccaccctgtccggcttccctctccgagcccctccccaacccatgccatccctagcgtgtgctgccttcactgagttctcactgcagcccagcctgcacacctcccacattaaagaaacccaaacattcgttccaccttcccttcatcgaccttttcttctgttctcctgacccttttttaagcaaacgttcttccagctgtggttatagattgagtatatttcacaatatgtatctgctctcctgtttatcttgcttcaaggtagtttccctcctctgtaagccaaaacaaccattcccttaactccagcgagggcctcagcctagcagctaataagacatggtgaacaacagaaggaaagagcaaatctgacgtgcaaagaaaatgaaacactgagtgttcagaagatgatatgctcccgccaccgcccagggtgaacaaggcttacaaaactcagcacaggtcttgagcccccaacacaaggggccttgttaatgggctctaggaattgctgtcatcaggctgaggaacaatggcctgcctcaacatctcagtggccaaacagggctctctccaagcccatgctggctccctctcatgtctcaactccacaggacaaccacacacattgctttgtgccaggttgccactgcaggcacaccccagctataagccaggcctgccattggacatagcatgatagtcaggtcgcagaaggcctctctatgtcatcagatcatctggggagatgtttaagcatctcattgactggcctcctccctagggatctcacttagttggtctagatgggatctgggccttgatcctaactgaaagctctccaggtgattctaacctgcaggccaggatgagaccatgggctttcaagagctggaactctagaggaagatggctggggtccaaatcctgcttctgtggtccagcctcactaggcttcagtgtcctcagttacagcactcctcataggtaaagaaaaaaatgcatgtcaagggcctagcacaaagtaagcattcaataaatcttaaactctgccattctttttttttttttttttttgagggggagtctcactctgtcacccaggccggagtgcagtggagtgatcttggctcactgcaacctctgcctctcgggttcaagcaattctcctgtctcagcttcctgagtagctgggattacaggcacgtgccaccacgcctggctaattttttatatttttagtagagacagggtttcaccatattggtcaggctgatctcgaaatcctgacctcaggtgatccacctgcctcggcctcccaaagtgttgggattacaggcatgagccaccgcccccggccttccattctttattcaccccctgggtcacccatcccaggtccacttctctccctgctctaccatgtggctctgctttttagagagaaatggaaagggctgctgggtctgtctgtgctggctggcccaggaagaggggaagatggcttggggcagaacacctgccacaggcctctttgaacacctccctacagcagccacctattgagaaggagggcaccattgcgaagaggcaatggggggaaagctgggcatcagggggacttccagcctctaccacccagaagcctggggctcactactgccctccttaggccatcactgagatggccatcccaggaccaggcttagcattccatgtctgctctcaggcaccactcttcttcccctctttcccagctgtaacgttgggaaagaggctagcccacagctttcatcctaacaaaacttggaaagagttaatcagatgaggtgggcaccccagaagaccctcaggttcagagtgtccatgtgtgtcaatgtaaagaaagaattaacacaataaaatttaacaaccaaataaaattcttcactcattgattcatgtgcttattcagtaaacaattctaagagcctcctctatgccaggcacagatttgctggatgtggagaatgcagacacaaataaagcccagcgtatcagttagtaattgccaaaataatgctgcataacaaacaactcaaaactcagtagctaaaacaagcatcatctattcacacagatttgtgggttgcttgggcagatctgctcctcactgcaagtttgtagctcagctcagtggctcctgtaggccccttatgtttctcatctgccttggaccagtagattttcaagaacatgaaggtgatagaaactcaagaggacaggtggaaacatccaatatctcttttttttacccaggctcagaactggaagtttgtcatctctgcctacatgcccttggccacagcaagtcacagggtttttaattccctactaaaatccacccaccatgagaacatagcaagcatgtggatgcagggctgtgtgaggaacttggggcaaccatccaatcaaccatgcccagccactgaccttaaagacctccccctggcctggatagagaaagcaatgcatcaggaatagttgcaacacaacatgattttgccccaatcactgaagttatttgggatccagagtattttctagcctgaaagatacctgtatgtatctcagggaaggacacctgttccctgatatatgtgttctataaattaaactgggcaagagctgtcactcacttaacaggtggaatataagggacttggagggataaaggggttaacccaagctacattcaactgccttcattattatttgcacctggtgaaagtgttcacatgaaagaggatgaggatctggtgttcacagcttcccaggctaacagatatcagtgtttggctggtccaatcagtcatgccattgaaggaagtcaaagaactcaacctgataggaagaggcactgaggattaggtgcagccttaacctgctggaaagtgccattgtttgcaaagaaatagaatctctggatgacattccatggtctgggaatactacagacgttgtcttttccaagtcctccaggaatctaatgaggtgtagtctccacccgacaataaagacatgggccaccatgaggctacagtccaggcccagagtcccacactggtgagtggctgaggcaaggctgcaggtaggcactttcaggtgtaagacctgagttgccacaaagtgtcttagatgactcaacacaggagttgtccaagtcatcccaggtgaggacacagcacctcatccctatgactagggacaggggacacagtgctgggacctaggaccccaggtcaagccaggccagccaggagcaggcaggcttagcagagattcctcacgccacatctgcaggatgaggcgtggcccagctctgtctcaaaacctcctggaactaatctcattggccagtcacagggatatgtattctcttcccagctcctcaagtgaacatctgtttttctcaaagctgtgaatgtcacgtcaagaatctccaattaccttccccttggttttatttagcatcagtgtactggaggcataattagtctgagatgaaaacctgtattgttcccttctcctcagcaatgaaataggttccaaatgtgctaacagagaggatccttctccaaaaatgacaaacagcaagtgaaggatgaaagcaagagtgaaatacagattaatgacaactgcggccgagcaggggtgggggtgggggttgtgattgtggtgtctgccagggggctcctgctgcaaatctcacctcctcctcggctcctaatgaggacgggccttctccacaacacaaaagtgatgctgatgaagatgaaagagcaatttccactgatatgttttctaacgatacatcatgagaaccaaggcaactccagggactgctgatgagatggtgtcatgcagcattcttctccctgtgagcctggccatgctcacagcctgggggctttggctgagggatgcatgttttgcattggccaggattacccaaaattaggggggaaaagatgcacacaaagtttatgagtagaagacacccctagaagttgggtatttaaagtaccaagactcagaagccctcaatgacccagcctttgccagagactagacctttagcctccgatttgtccaatacttgttaaagtgaggctttaagggtcttactcatctgatgcatgcaatgatatttgttctgctttcatgcttgccttcttaaagactcttcacagatcagccagagggttcactaaagaggaaatgggtcatgtcattgccctatacaaaccctccaatgacttcccatcacacttaaaatagaaccccaactcctcgtctagcccacataaccccaggtggcattctctcacccacctctctgaccccaccatgctgctgcctcccctcctttcattaagctcaagccacacaggcattctctctctgttcctctaacaggccagctttaattccatcttgggacttttgcaatggtaaaggtctcccttacaaaagcaaaggccttctcaggcctgactccagcaatcagatgttagctgaaaagtcagagtggtcacatagccgaaagtagccccagtcatgtctcattacatggttctgttctaattccttacagaactcttcaccacatgatattattttgcttttttgcctctccctctctcacataaaatgcaagttccataggtgtggtggcctcgcctggtttaccccctgccagacccccacaccctgcagagcttcagggcatctgacacacaggaggtgctcagtaactactgatgaactcaggccagtgggtgagctggtggggctgggctcatcaagaagaccacaaagttcatgcatctatcttcagataaccgaggggctgacgggaaaagaaagtaaaattgccgtgtagcccaagaacacccatccagaactaatgggtagaagccacaggacagcttttgcctaacataaggtaattttctcacttcaagctacccaacaacaaaataggtttccttaatcgatggtgagttccccatgtgcagaggtttgtaagcagaggccactgctggagcctgtgtagtggagagatgagcatccttctaagcacctgagtccacagcattcacattggtttcctccatctcggtgggatcataaccccctgaaggagggtggggcctcattccccagcaggggctctctgcacagggtggggcgggggtgtcagatggagcacaggtgtccaccagacatggagtgcagtatacgttcctggctcctgttaaggggtaagctggaggctccaggccaggctaaatccatggggccaccatgtggaggcaggcaccttcctggagggactaaccttgtggtctatgctttcctccagggacacaagcctggggagtggacagggaaggcagtggagaggtggcagtcagggaacaccacaaactgccctctaactgttcctctgccagtgctcccacagccctgtgaaggagaacatgacttccatcccacagataagaaactcagggctcaggaaggtcacattatttgtccaagtcctacagcgggtctgggagatgctgggagttgcgctcacatctgactgatgccacagcctgcattcttgacagcttgacccccgaaggtcaggcagctcccctcagactgcagacctgccagttggaaacattctcaactcctcctgtctttccctctcccctgtcttctgagaaaaggaagccccttaaacctcctagatcaagccctaactggaaccccactgagttccgcactctgtcatctgacacagacctattcggagggaaactggtagaaccagagcattggcaggctcccacctcccagcattagcaggcacagagctgtgatgccacagtctcctccagggcatggctccatcataaacctgcatttccatcacccagtacaggtactctcacaggaggcactcagcagggatgtagtgacagcaggtaagaatccacctctctccctgcctgctcctgggatccagtattggcccatgtatcttccccatttcctcaggcttcctggacttttgttggagggaaagaggaacagaaagaggagcaggcaggagaagcaagagctcccgggggctatgaaaggtaacatacctggagagtttggggagatggcggcttgtgagagacaaggggaagagacagaaacaggagtattctaagaagcatggctgtgagttatgaaaaggatcctctttgacattcttcaaagaacaccagtaaaggattgctttgcatgccactactttctttttctaatgtgactctacatagacattgaggcaccactgctgcatgaggcacaactacttatatttggattacaaatgaatgaaacaatagatgaatgaatgaatgaatgaatgaatgaacagatgaatgaaaacttggaatccactgttcagttccctaagtcccaagtctctcctgcctatgttaaacacgatagcagctaacacccctaggtaaatgtgctaggcacacctttaagtgctctacatgtcctaacttctttaatctgccacctacaaggtaggtaatctcattacccccatttttcaggtgaaaaaagtgaggcattcacctaaggttctacagttagtaagaggtgattagacagaattccaactcaagcctgggtcctgacccatttgcttagccattctgctaacccgtgaggtgatctacttgcctaaaaggaccgacagagccagcgaccccagcacacagggccagccccatcccagctgctcctggcagaaggagcctgctggtctattacctgggaggccaaaacatgtgtacgatcaggcactgcttaacaacatttcagttaaccatgtactgcatctaagacagtggtcccagaagattatattgctgaatttttactgtaccttttctgtttaggtgtgtttagatatacatataccattagatatacaaataccaccgtgttactattgcattcggcacagtcccatgctatgcaggtttgtagcataggagcgataggctgtaccataaagcctaggtgtgttgtaggctgtactgtctaggtttgtgtaagtacactctatggggttcgtacaatgatgacatcgcctaacaatgcatttctcaggatgtatcctcatcgttaagtgatgcgtgactgtatgtcttctaatagctcaagagtaaacagcagaaatatcaaccaagtgcagttgtcactttcttggctgtagtcagtaagtgcttacaaaattttatttcacacaaacaataaaataacatgaaaaataagtatctggaaaacattgagcctggagtgttaaggccaaggcacatctgcaatgcctctacccctagaatctgtcaggcacatactcaaacagcaacaaggctgctctctcccgcaactccccagatgagcactcagggaggagcccagggtgagaagctgcccttcccaaacagctggaaggatcaggtggccaacttcaacttgtcttagagagaggccaaagggtcagaggctgcttgtgggagaacgatggccatccataagtggtagacttctctagggctgagagtacctctgactcatctatttccagaggtgagccctagatctgacacacaagcaaaaggcaacatgcaaaaaatgattgtggggttgacttgaatttaattaagttaaatcaaatgccccccaccaccaccatttatggggagaggagcaccagcagcctgaggacagactatgtggccaggggctaaggctcaccaacagggaacccaagccttattcacctgccagcccagaatgtagcacaagccttcaatccaccaccaaataaattgtcccttagagccaggtccagagaggcagaggtggcccaaagaatgattctcagggaaattttgagtcctctcctgctagcctgtataccaccaccatcactgcaatcactatcaccatcacaaccttcatcaccatcaccaccatcattaccacaatcaccaatactaccaccatcaccatcaccaccatcaccactaccattgccaccaccaccaataacaacacctttaccaccaccaccattaccaccaccaccattaccacaatcagcaatactaccaccatcaccaccaacatcaccatcaccaacaccattaccagcaccaccaataacaccatcactaccatcatcatcaccaccaccactaccatcactatcaccatcagcactaccactatcaccaccaccagcactaacaccaacaccatcaccaccatcaccaccatcatcacagcaatcacatcaccaccatcatcaccaccactaccactaacaccattaccacaatcaccaacaccatcatgatcaacaccaacatcaccaccaacaccatcactattaccaccaccaatacaaacaccatcctaccaccaccaccattcccatcaccaacaataacaacaccatcaccagcatcataatcactatcaccaccaccactaccatcactatcaccactaccatcatcaccactgccatcaccactgctatcactatcaccaccatcatcaacatcattatcatcaccactatcaccaccaccaccatcaccaccaccaccattaacctcacagatcacaactaatttgaccttcaaaaagtgaattagaatatcccagctgaatggaaagatgctcaacatcattaattatcagagaaatgcaaatcaaaagcacaatgtgataccacgtcactcctgcaagaatggccataatcaaaaaataatagatgttggcttgaatgcagtgaaaaggggacacatttacactgttggtgagaatgtaaactagtaccacctctatggacaacagtgtggagataccttaaagaactaaaagtagatctaccgtttgatccagcaatcccactactaagtatctacccaaaggaaaagaagtcattatacaaaaaagatacttgcacacgcatgtttatagcagcataatttgcaatttcaaaaatatggaaccagcccaaatgcccagcaatcaacaagtgaattaagaaaatgtgagacagatagatagatatatatacacacacacacacatcaccatggaatactactcagccataaaatggaatgaaataatggcattcacagcaacctggatggaactggagactgttatcctaagtaaagtaacttaggaatgaaaaatcaaacatcgttatgttctcactcatatatgggagctaagttatgaggatgcaaagccataagaatcatatattggactttggagactcgggggaaagggtgggggctggcaaggaataaaagactatacactgggtacaatgtacactgctcaggtgatgggtgcaccaaaatctcagaaatcaccactaaagaatttattcatgtaaccaaacaccacctgttcccccaagaacctattgaaataaaacaaaaaaattttaaaaattaaaataaaaaaagaatatcccatgctgaagaattccaaacaacggatgtagatactccactcttgagagatggagtgtagttctccactctttaagtgtgggctgcaaatagtgagatctttccaaagagggcagcatgggggaacaaagggtcattttttagtggagaaaccttgacaaacactgcctcagccaggtggtcaaggtctacaccaacagtgataagtcatgttaatagtaagtacccttgacatggtgtgatgagaatggcactacctccatggtcttccttcccaaacccataacccaaatctaatcatgagaaaaacattagataaatcccagttgaggggaattctacaaaatacttgaccagcactgctcaaaacatcaaggtcatcaaaagccaagaaaagcctgagaaactatcacatccaagaggtgcctaaggagacctgacaactaatgcaatgtggtatcctggataggatcctaagacaaacaaaacaaaacaaaaggacattcagtaaaaactaagaaaatataggccgggcacagtggctcatgctgtaatcccagcactttcagaggctaaggcagtggatcacttgagctcaggagttcaagagcaaccttggcaacatggaaaaaccctgtctctacaaaaaatacaaaaattatccgggcatggtggtgtgtacctgtagttccagctacttgggaggctgaaatgggaagattgcttgagccttggaggcagaggttgcagtgagctgagatcaggccactgcactccagcctgggtgacagagtgagaccctgtctcaaaaacaaacaaacaaacaaaaactaagaaaacataaatgaaatatagactttagttaataatgtatcaatattgggtccctaattatgacaaatgttctataatgatgtaagaagctaaaaatggggaaaactgggtgtggggtatatgagaactctctatagtatcttcataatgatcctaaaatttaaagtttattcaaaaaattggaatttcaccctaaattctataggatacacttctaaaatactcctctaaaatgtttcttcctccccaattatcccttccttagctcgatgttatgttgacgctcacccaaatattagcactgcccttcctcctggccacaggcatcccatctagggcatcctgtttcctgaggccactcacagctttcaagaacacagatgtgaggaggcacatttatgctgcaatggttcccactgttgtgtttttgtttttttgggtttttttgagacagagtctcactctgtcgcccaggctggagtgcagtcgcgccatctcagctcactgcaagctctgcctcctgggttcacgccattctcctgcctcagcctcccgagtagctgggactacaggtacccgccaccatgcccggctaattttttttttcttttggtatattttagaagagaggggtttcaacgtgttagcaagatggtctcgatctcctgacctcatgatccacccaccttggcctcccaaagtgctgagattacaggtgtaagccactgcgcccagccagctcccactgttttaaggactgattctagcctctagcatggcatatagagtccttcccagcctggcctcctgttcctccacatgcctcttttgatgttgccatattaaaataccaattgctctttcctctagaaacttcctctagtgcccatgctctgaccatctatgctcctacccttgctgccccactgttttctgtggttggtccttgcctatcctttaagactcagctcagatggtgcttcctacagaaagccttattttgccccaggacaaatgtattggcttcagaggacgccctcacaatccctgtacttatacctattctgtattatcgttgattgcttactttccctaaggacagacaagtgctctcacctatgtctctctattgccaaccttcaataaatgtttatttaatgatgagtaaatgactttggaaaaaaagggtggcatgaaaaatcatggcccacaatccagggcttttgttcctgggttttaaattacaaattctgctcttcagaattccattatcctcactagagtcctatataaccacatccattatatggcaatgtaatggattactagatttaattataacagaataattaatgtcaaggtattgtcagtttggacataaatattaaatatcaccttctatgtaactattttctgactgtgattgcaaggattagaaataccagtttttgatgagaagtgcctttgtcgtggggggagtgatgccaagtgggacatctggtttgccggctgccaccaacctccaagtagaatgcctcctccctggcttgaggctgggctcccaacatacctggctctgccacagcctgtctctcacatgtcctagtgcagaccaccacacttggccctgtgagtttctggaaggatctgttcaagtctcttgggagatcctcaagttgcatatccccttatgccctccatttccctccacaacatgaagtaagagcaaccacaaggagcaagggagactcaggagttatgacaaggtgcagacaacatcgtaagtcagggaggggaagctgagctgctgtggaccaggaagtctcctcctgggcctccacctgtctaccacatcttctcctccagccacctctcaagctgtgctttggctctgtccctaaagttgcaatttcattctgcaccttaacaaaaaatcatcaccaccatcaccatcatcaccacatcaccatcatcaccatcactaccaccaccatcatcaccaccaacaccaccatctcaccatcatttatctccatcgccatcatcaacaccatcattatcaccattatcatcatcattaacataatcatcatcatcaccatcaccatcatcatcactaccatcatcaccatcatcaccatcaccatcatcatcactaccatcatcaccatcatcaccatcaccattatctcaccatcattatcaccatcaacatcaccaccatcaccatcatctcaccatcattatcaccatcaacagcatcatcaccatcaaaatcgtcattatcaccatgaccacaataataccagggacatttactgagcacttagaatgtacaaggaactatcctaaacacttcaaatgactgtcttgttaaactctcatcacatcttatgatgtagtcctgccactatccctactttagatataagaaaacaaaggtttggagaagttttataacttgcccacagccaccagccataagggcagtgcttggattctaacaccaaacaaacaactccaaaggctagatatgctcttacctgctctgacatctctcccctcaagcctgctccttaccttgattgctttagaaacgttccactggatacccccgggccccaaatacaaccctgcagggcctcagtctctgtatctgagaaatgggagcagtgacaacagcctggctgtggacagagtgacagacctaagggcaacctgtgccatagaagggagacaaatgcagtcatttactaacctactccaagccaggcacttccccacacattacgtcctttaaactttaccacagccttgggagtaagcaggcactagcttctttattttaccagtagacacaggttcagagagtaagcagagctgagtaactcccaaaaccctgctctttctgctggccccaactgttccccgctccctaccctgaggacaggtaccacatgctgagccagggacaaggtccctctgtctgaccctgtcggagaagcaggatcattccctgcacattcacttagagcaattaatgagccagggatgtgcttgctttgcatttccaggggctgacggccatcctgggcatggccccttatgcgtaggaagaaatacccaacagctggaagaggaatgagcagccctggagctggaattcctgctcagcctctccctggcactggagctccactgggtgcctggataacttatacaacttccctttacctatcttcctttggaagctaaaagtagccagatttgaaaggacactgcccctcatagaaagaaacagtcatgattttttaaattggtcactgaattaaatgtgcaaatagtgttccccatttcacagataaatttattttttcctcaccttttaactggcctctgaagtctcccagtatgcctggaccacagctgctacctctgatgggactgaccctgagggccacccctgacgtgtgagcacacatgagggaggggtggagacaaggggggagcccagttggaactgttgggccccactttctgcagcttagtgccctgccgtgcaggcctgggcagtgctcaagtccagagtccagggacacaggacttcagagccatggcagcagaaccaagggacccaagcatcattgcaaaggctctgaaaggtgcccagctttgaggatgaaccaggcaactgcttgagttttgaatcaagtcatgtcatgattttggttccgtgcaatgccaggcctgactactccgccccaacactgccagtgccccgggggatctggaatgaacggtggggaggattggagtctactgggtcacaggaggagaagggggacctactcaagaccaccttgtcctaaaggcaaagctacaatccaaacctagggaacagagggcagagggccatagcctggaacctaccggtgatgctgagagtggaggggaagcagttgggagcaacaaagaatgggatgtggtgtgggatgtcccatatcactatctcccacaatgtcagtgagtcctttatggtggaggtaggggcatcacacagtttcaaaggccagtgtggaaacaggcagacaaaggtggaacacatgcaaactctgcacccacccccacacccacacatgtccacacactggcatccctgatttgtttacctattggcacaagggcaaacaaatcgcagccctggggaggcgaggccctgcactgggcttggtagcagccctgcctgattctcattaggtgatgagcggaaggtttgtgtggttggggtttgttattgctgttgcttttgctgcttctccgaattccctgctgaaagaaagaggaaagatgcactgaaaaggggcacgtcctctctcagcccttccacaaggagagtccttggagcagcaaggcaggcccatgtgcacacacattaataatgtgcaaagctctttaggctgattgcttgctcctcacaggaagctgccacggtggctgccatgaggctgagctcacccctgcgaacttgctctgtgaggcacaaagcaggagccagcgtggcttcccacaccaagggcccatgcaggcggcctgagtgcagggagcccagaatgaggctgccaggcagggagctacccatccaggcctcgtggcccaggcaagcagggaaacagagggagcacctccccagggtagccattctcagctcccaggctccctgtcagctgacaactatagagtacaattcccttaggatttctgtgtccctgagctgcttcccatggagtcagagagtggcagagacaacaccttaaccctggtccctttccagatcatgctgctcacctgctcacaaacctccagtgacttcctattcaactgaaaccaaacccaaaatctgacaaaggcctgaaagcccccagtgctttgatcttggacacctccccaatgtcacctgccaccactctccccctggctcacctggcaccaggtacatcctcctcctcagtgatgctccaatgtgctgagctcattccagcctcaggaccacatgacattccagatgccacaatctctctgcagcagatcttgttttgggggctccatcacatccttccagtctctcaataaacgcctacttcttggcatcattgtccctaaccactgctctacagtggtgcccccacgaaaccactctcttcttaccttactgtatttttcttcatgggggttgtcactacccacatgacttttggtttactcatttatttgtttagtgtctgaccaccacctccactaagatgtcagctcttgaagacaaggaccttgtttgtctcagtccctttatattctcagggtctagaacagagcctagtccatattcactgcccaattaatatcgaatccatttcaagacagacaaatgaaacccagaaaggcaagacagtgccctatagtcatacagggaactggacagagccagggcgggagcttatggaaaccttagtcccaggctctggagagcccctgggtgtgatatggggaactgggcagttccctccgggcctggctgatacagccagtgacttgctgagcatctactctgcatagccctttcagtgaacttcagggagcaatcataagatgaggttggtccctccctgcaagtgagacatggttttagaaaaacatgaaaattgaggccacagcccaatgcagtaatgcctgagcactggcatggacaggctccctggacgtgctgcacccacagcaaggactggaggaagacaatctggcagtcgaacataaaagcaccatggcttccacgtgactgccaatgggcaaggctttgccactcaggccctaaataggaagctacttctcatgctaacggtcaggcaggccgaaaccctccccacctcagcacagagagtgaaccggcagagtcagtgtgccccaaatgcagaaaggaaaaagctataagacccacgaactgaaagctgccagtcccaggatagttaacaaccagcagcagccttgtggagtactgctaggtagagcaaaccaataccaatgatcaccacccatctaaagagctggccttcacacaggaaagaccaaaagtgcctgtaatggttaaagagctcagttcacatttagagtagaatttgagcaatggtggataaaaagaacatgagcttctggcaactacagttgactcttgaacaacacagattggaactgtgaggctccacttacctgtggatttttttcaatcaatgtttcactgaatgtgactgcctctccttcctccccttatccctcctccatctctcccgcctcggccacccatgagacagcaagaccaacccttccgcctcttcctcagcctactcaacatgaagataacaaggacgaagacctctatgatgagccgcttccacttaatgagtagtaaatatattttctcttcctatgattttcttaattccattttctctactttaccgtaagaatatagtatataatacctataacatacaaaatttgtgttgatcaaatgtttatgttatcggtaaggcttctggccaacagtaagctttaggagttaagttttgggggagtcaaaagttatacacagatttttgactgcatggggggttggttcccctaatctccacattgttcaagggtcaactgcatgagggagacccctaaggcaggtcacacccaccaacaaaagtaagaaggatgttggaatcacagaaaacaggggtggtaccttgaggagccaaggaaagaaacaggaactcggccgggcgtggtggctcacgcctgtaatcccagcactttgggaggccaaggcgggtggatcatgaggtcggcagttcaagatcagcctggccaagatagcgaaaccccgtctctactaaaaatacaaaaaattagccaggcgtggtggcacgcgcctgtaatcccagctactccagaggctgaggcagagaattgcttaaacctggaggggcagaggttgcagcgagctgagatcgtgcctctgcactccagcctgggcgacagagtgagactccgtctcaaaaacaaaaaaaagaaaaagaaaagaaataggaactcctaggaccactgtgctaagaatgactgcctatcctcagcaagaaagaactgggaaaggagaacagggctcgcttcacactattctcatagttaatgagcttaagttgacagtatatatgcaataaatcagacattaccacttggcagcctgcaagccttatcagccctgccacaggcagagttggccaacaaagagttcagaatttttgtaattagctacaaacatttaaaaactaagagatttcacaggaagtccaaatttctggctcctcttgagacacaagaaatagtgaccacaccaggccttctcaggggaatcttggcagagcctgacagtcctcttcagagaaggatgtttcccccaggtgcctgcagctgcaatactctcagttcttacagcccacctgctgtctgccttaatatccctgcctggatgccataggcatttggatttatgacctggctgtcacgccaaagggtggctttagccattcttctctgaccctttgattgtcttaacaagctccaagttacagaattatccaagagtagttcatgtggtagcctggatgggatggtcccatttgatcattatagggcagagagaaggggcagctatgcggcccccttcccaccctgcttcgctaggcacagggcagtctccaactgagtagtcgctgttcttcctgagtgtatgttttctctctctagtgtagtctggcggtgcttcaggggcagagaccatgtctttctcccccaaagcacccagtgtaagaggtccagggatggagcccattctatcttagtggcgtactggccaccgacaggctgctgagagatgccttctcatctgaagagtaactctgcaggcagaaagcacccgcggctgtccctccttctatcagcccagtaactagcactcctgagaagccactagtagctgctcctgctcatgtgctccaataacagcccagatgggaggtgccctgtgaactctcaccctgctcctgaaaaagatccgaaagtgcctagccagcatctggagcccaggcagcacttagccctcctcttctcccgctctctcttggactctaacatcctctccagctgagtgctggaccacaagctggttctcaaccccagctgggctggctggagatcgtgagcactttgtcactttttcctagcccctccttaccacccgaggtgcaccccacatctggctttcctcacttggctctgtgagctatgcttcctgacacagagtgagtaggagctatccttctgccaggctggccacagctccccatctctgagccactgatacctcccaatgtttgaccccaacagccccagattggttctacaatctcagccaaacaccatccacaggcacaataatgaaactacgatttgcagagcaccacccctgcaccaggccctctcaagagcattccctcatttaattcccatggcaaccctctgggaaggtgttaatactccagcttatgaccagtaaatagcctcaaaaagatggcactgatagaagagttgggctctgattctgtgtccatttgctccaaggacaatgccccttcctctgtgccaccagcagccccagccctggaaagaaaagcatcatcgtggccccagctgagcatctgaaagcctcaggtttcctctgtgagaggagaatgggcagaatgggtgtgggaggagagggacatccttgggtgctctgccctgccttttcttatttaaatcgaagtggttcaagtcctgcatctccctggggtaggaaaccctccatctgccctccctgtgcccatgtacccagggcttcttggatggggttgggggaattcatgtgtgcttttcctgtgatgatctacctccctccagttcttttctcccctaccttcacacttgtctcctacagcagctcctttcccccaggctccatgactcgaactgtggaccacaaccctgtacattgctttccccctgacactgctcacagcatactttggtgatagtgcagatatgtgagtaatgcactggggagagggagaggccataccacgccctgcacagcaggcaacagggaggtgaagcatacacacgcctggtaacggcccaccaaccttgccacttctctcctaggtccaccgacctagcagcaggtcaccagcccaatccctgatgtcaagcactagcacatcccaaacttcagaatgttgaccttgcccagggtcacagaagattttttcacttttctcaacgcccttcatgcccatatctttacattttctgagactcatcgatctccccactcacacatcagtcactgggcatgttctgggtacccatacccatgtcaagcactgtgagaaaggaaaaaggaaagcctacaccccaaaataccctgtacttagaagaacgttgtgaatcaagtattgactccattgagcagatgaggaaccagagctcagaaagccacatggtgagaaagcggggcaagaaaggggctgggtctgcctggactctgcccttccctgccctgtagacagaaagcctatataaaatgtcctcagactctcgggtgcctgggaggttgtagaaactgctcttctagttgaccatggagacacagaggcagccaatccatcccctcaggctctctgcagatgtgttggccgagagaggactgggggttgtccccatctccatatgagcattcagaggtgtccagtccccctcctcatgctacctgctactccgtggcaatgttcacctagtctgctctgtgtcacactccaggagaaaaatgggctctcccttgatctgtcaatggcaacaagcctcctctcccaacagcacatagtagaaaaaagctgggctttgagtcagggtgttcagcattcatagcccagctctgtcatttttcatcttttagaccatgagcaaaccccaaaatccccacaggctcaaagctccatcctagcccttctcttccagcattgttgagaagattcggtgagtttcagggtctgaatatggtgaacttgataaataaagcctgtcttcatccctccctctgctccacatccccctctttaccatgttcaccccaaagttgaacaatgttgaagcaaagtaagagtgagaaggcacatggccccaggtcacctgcagaactgccaccatctgcttccacccaggaagctcatctgcacactagggcctatgctagatggacaacaaaatggtcccaactctctgtccttcaaggcagccactcccttggcaatgtgactttccagttcccccctcaagagcagtcttccatctagaggaggagtctctttcccctgcctgttgagctgacttcatggcttgctctggacaagagattgcagtagaagtcacaatgcaccaggtctgagctcaggcttcaagcagccctgagcactcacacttggtctcctggaactccgctgctgccacatgaataagcctgggctagtgtgcttgtcaaggggcaggctcatcaccccagcttacagctggccagtgccatcctcaccagccagcccagatgcatgagccagcccagctgagatccagtgaatctaacccaggtctgctgaccactaggttcatgagtaacaacacatgcttactgttgcatgacactgagttttaggacacacagctagctgatgcagagcccttcttctctccaaggggactggcagctcaagcacagatggcaggtgaccaaggccagattcctaccagtgatgtagacaggaggccaggaaatactgggtagaagagggaagttccccagcaaaggctccaccctcaagcctggaaactcacagccctaaatgggaacagtcattcctgttttcacacacaaatgttgccttttggcctgccatgcctgtacccatataaaccccaaatcccaggctccataagcagaagggcagaggaacagaagagcgacacagtagagaaggagaggagagaaggagcatctgaatgtcgagaggagttcggttggagacagtcagagagaagatcagctgcaggatggtagaattccaggggaatatagtcttcccactccaacccctttccagctccccatccatcctactgagagccacttccatctggcaataaaatcccctgcatttaccatcctttaacttgtctgtgtgacctgattcttcctggttgccagacaaggatctgagtaccaagagggcgctgagctggttaacgcttaagccatctgcagatggcaggagctaaaagagcactgtaacatgcccactggggctttgggagtcacaggcacccacccctagtgctaccgtggggccagagcccaaaagcgctcaccccagttcctgcacctgcccgtctgcgtgccccccatcccgtaaggagcaagcagccaaacaaaggagccacgtccctatcacacgtcctgcgagtggggtcagggaactctcttatctcaccggcaccaggagagggctctgtttagggatgccatgtgcagagaatggcaccagatgtggactacatggcacagatagcttctctgagataaattcataccaatttagataatctctctcatttctgcctctcatgacccgccccctccccctgcatcccaccacgtcttcttacagcttccccgctgagctccccaatcagctcttcagtcaacaagcaggctgactcacctcaggctcagaggcgaggcccccccaaggctgaacacccttggggatccgggagcagaaagggtaattgagccatttcggctgctgcaggctgtttccctttgtaaatgcctatttctcatgtctgctgcctccttggccaaaggggctacctgctaataagccatagatactctgcagggaggagctgacactctgctccgctatttaatgacccacaaaggaaggaaaggccaccaggtgtcttcaggcccatgcttcaggttcacagttctctttgaccccagacaggcctcccagacagtctctgtaaggctttcagcaccccagagcaccaagaatgggatggcatgatttgagatggaactcaaaatagaaacaacagccaaccagaaaataaacaccagaaagtccagcggcactcaggcctttttccctgatgattgcttagatgctcctttgaaatatcaaaaatcaaacattaaattcttacaatgttttacttgggcactcctgcttggctggagtgttaagaatgtgtttcatttgcccagtgggcaatcgaagttctagacaacgtttgtgtggggacagaagtcggtgctcctggggtcccaccctccatctgtttaccaaccataatgcatggcccctgaaaatgtgattaagaaagattaacaggccccagttcctgcccttagcattcccagatcacacaaggagggagatgcaatagagggtcacagcacaagcagtgggtgcagggctagctctgggatgaggtggcaatggaggtgtgttcaggaggcagcaggctctgagggatgtgacagtgctgtcatggagaggggacagtggactaggatgccagaggcctgcaagaccagtgctggctgacaccgggacagagctcacagcagcttccccagcactcaggggctttggaaagatgagcaggatggtggggacagaggaggaaagggacagagccatgtagagcctcaaacacagatcctaacaggacagctctctgttcccttcctgaactcagccaggccccgcgttctggctgcctcttgaagccgctgagttccaagcccatctgaacaaaatctagaaacatttctttcttgtgaccttatttctaagaatttctaagagaaaatgtaaatttctcagactggaagcacttttgctaaagtgctaaggctttaaaatctgtaaacagtgggatataattaaatgcaaatgcagggccatattcaaaaattaatctcctataattaattagtaatttaaaatattctggtaaatgatacttaaatggcacagaattatcctagctctgagtgataaagtcgtctgctaaagatttaccttgttagagtgagaaatatttgcatatatcatgtgggacaacagaacgttgagattgctaatttacctttgctataaatgtattaaaaagcacagtctttatattcaaattgcgggagcttcactcactgcagcaaactctgagaagcaattgatttgaagacaggactaaacccaggctgggcttctatgaaggatcaaattgacctccaggcacactccatgcctgggaagccaatctgggagaggtgttgggagtggccccttccacctttttccttaacctaactccatccagcctggatgaaaagtgacatcttgtaccagagcaacggaaagctgtccaactaaccagcttttctctctgctgttctttctcctgttcttccctctacagaaagagatcactggtatctaactgcagaggtcaatgccatctgctgcaactgtcactgggtagctgccatttcttttccaaagacagaatacctctcccagactgttctgccaccagcaatgctctcctcctggtggatgtgtatgcatattgatgtgtggatctgcacaggtgcatgtgtttgtgtgtgtgtcagtgcctgttgggctgtgccagtctgagggtctggttgtaccagtgtatgtggctgctggttgtatcattgcatcaagctgtgtccatgtgtgcatgtgtgtgtgtgtgtgcacaaatgcatgcctggtctcccacacctttctccactgctgcttaccaccaccacacacgctgatctctctgcaccccacactccactgccatgtgccacagctgggcccaggaacgtcccacctgcaggagcagccctggcctcatttgctgagccacccaggcctaaggcagcactcttaggcaaatgtaagccttcccactagccaaagttttcagaccaaagcccttgctgatgtgctggcctaggagttgtttaccagccaaacaggcaaccaaagtacacacacacaaaaacagctgaccccatttctattggaagtaagaaatattaaattcccattcatttagtccttcaacactactgtagacaaggtcccatgctgctctcaggaaataaaatggtgaacatcacacagtccctggcctacaggcagcacgttctagttacagggacagattatccaacatctgcaggacatacagaaacggatggtgcctggacatcagggctgggcaggctgccccgcctccttgtgaactggaaagaaggagcagcaactcttctccataaagaaaacaaacagtttaaaatcatttaatttttccactctttccagtggaacaaaagactagaagggagaggaggaaatacagaggaaacaaaaggaaagagggaggcctatgtacggtagagacagtggcatagaaccaataaataagaggtgaaaggacaaagccctggagtcctcaaaatgcccatggacactgagagaggccttagtggatgacagccctggggcacagctgctctgccagccactggaatgcccaccagtggcatggtgtgtggccacgactttccatatcatagccagtcttggagaggaggaggcactgcctctgaattccatgcccctcagcatttgatagggttcctcatccataggaggctcccaattggtacttgctgggtgagtaagtgattggatgatggatgagtagatggacagatgaatggatgaacggagagagaggtggatgacagatgaatagatgaacagaatccctccaggaagttgagatgaagcccagggccaaatgactgtggactggagttctccccatcaagcctgacctggagaagaacaacaataagacatgtaaactgtagggcgttaacctctaataccctgaaaaggaccccaagaacacatcagtcctgaagtctggatttcctgccccaggctagggagccctccctgctgacatcccagcctcagctccagccactccctcccctgcacacccatgactgcaactgcatcacacacaagttcctgaatacagtagggatcccctgacccctctctccagcccttccttgttcacagagttagtgcaagttcattcctacagacccagacccagagtcacctagtccaggaagcttccgttgaccttctgatgatcccatctctccctggccagaggacatcactctgtcttccgtgctcttacaagacttggccacacctctgccattacaggtaaaagggtctgttcatacctcagtcctccccaccaagctgggagccctgtgagagcagggacaacagcctacatgcccacatagaacttggcacaggctggggctcagtaaatgctggagaagtgacaggaagagccatgagcagaagagagaaagctccagcagccaccagcaggattcccagagcaaggcccctctcagcagctgctgccttggtcacttcagcaattgcatgggccatgatccccagctggtgaggaagctgatgggcttgcatgaggagaacatcataggtagttgtcactgtgcactgaagtcccacttagcaacctgtagcccagagaagaaccaaggcccaactaggatccaatgagtccaatccactccccagttagggtatgattggaaagagccacccacactcacatggagggctccaaggtcaagctcaaggcagaacaggcccccctggaggaagggacattccatggcctgtacccttggcagtccccagagcagccccatggtgcccccaggcctgggatccggagacctgagttctatcaccctcagccccatcctccctgaggggagcctctccacacctttttaagatgatgcagtgttgtggtggctactaagatggtgctgaggaggcctcagaggatgaatgtggaataaagactgagcgagggatgtgaggggtctctaggtggggcctgacacacaagcccacagggtccccaggcaggccccagcaccttggcctgccacaactcttccactcacccactcactgccaaggccaggctcacagaacctgcaggccccgacagcagagcccctcgtgaagcggaatcacagagaggctggtggtgccatgtgcccccaggccaacagccaccttcagtgaatgaatgccattttgcaaaatgtaaaagattcaagcagctccgtcttcctcactcactcccatttggctaggctttttgagtagggaagaggagaacttacaactaggaaagccccatagcccatgccaactccagctcatctgtaccatcccggatgctgcataacattgacatgcagttgatgtgttgggggtgctgaggagacatttactcctccttaactgtgctttgggcttcataaaattcaggacatgttctggcagtgtgtcatccttgtgaacatcgtttgtccttgtcacaacaaagaggaggttgggtcagtctgctcaagaagcccatgcaatgcctccaggtggtgaggaaggcttcgtgcagggacagcattcccaggtgttcctaggggacctactgggctagccagtcagatagctcatgtttactccagaatccacatttcttccccaccacacttaggagatacgttaaaatgctttgcgtataagcaccctgagaacctctgccaaaccctggccagagacagtggaaccatatcttccccgatgaagccagcatgccctatttccccactccagcaagtgcagtgctgtacactgatattcctggaatcatcacagatggaagagaggggctctggagggagtaaaatccggacttgaatcctgttcaatgcctaagtggctatttgtgtgaccttaagtaagtcatttaacatctttagcttttccatttcctctgtctgcaaagtgtgaggattagagaatgcacaaagggccagagccatcgtgggcacccaagaaacctcagcttcctccctactaatgacaggcgcatgagaacagggatcaagactcttatcatcggcggagactgaagactacggtgggagctgttggcccaaagtccaaatgccatcgttcccctcaatctcctgccaacaatcccagggacttgactgacgttaagagtccagcaaaagaaactgtagaatactagagggtgggggatttagaaatgacctattggatactattctcaccacctaggtgatgggatccgtactctaaacctcagcatcacacaagattcccatgtaacaaatctgcacatgtaccccctgtacctaaaataaaagttgaaatttaaaaataaaataatggtctgacaaaaaaaaaagtggccaccccagagccttccccattcccatcacacccagcaatgcaagcaggacaaagcaagcccagcgaatccaccactgcaggcgtttgcataattaaccacttggcaataacatccttaggccagtcttagttatgtgttaaatcctcacagggctagaaacaggaaggggctaaaatcctctagaacgaaaatgcatgaatatgtgcagtgaaaagaaaacagatgcttcttgaaaagctatatgctaaatgctttatcatagctgtctccttcatcccttttaacagatgaagaaacagaggctaagacggtgatgcaaatggcccaaggtcacacaaataataagtcaaggagctgggacttgcccccacatccattcaactccaaagccaatagtctttccacccccaagcttcacagcagagcaagaaggaaaggaagcaaggggaacgggcaaggaattggcaagaagcaagaagggagggggccagcgatgagattagtcgataccatcaccagtacagaatccagctggggaaatactgcaagaagagccatcccctgagcagacttttgcaaacacacagctgggtatattctgagaaagaatggacatgttagtgctgctaatcccaggctgtccattactggactgaatcacttcatacagggcaacatgttctggtgaaaatgccgggagccgacaggacatcacagcctggcggaccaccggcgtgattcggggcctgattagcagagagcatcagggctgccggccagttgtaccacattaagcattccaaattttaagttccccagcagtgggctttgggctggctcctgatgcatgaggtagcattctgagtaataattaattagaaggaaaagcagaataagcaagcaaagtacatcaaatggaattagtataatgtcatgtttcacttcagtttactttcaatcagagagggccaacaaggtgactggggttgtctggagaatctgcagggagcccttggccaccctgtgacctgttcaatctgcctctgctcccaggcataccacatccccagctcaccccccaaaaccaacccaggccagagggagacctgccaactccagcctctcacctctctgccattagactacctgggccagcgccaatcagccaactcataggttatttctagtttcttctcaaattaatggattctttacaaatgaatggattctttactaaccaatggattcttaaactgatgggccctgtcttcattagaaggctccaacctcgaacagagatgtttttaaaagaaattcacactgattattagcccaagtgccaaaaaaataagaacatctaatgtatccttcaacgataggcaaagacacctcctccaggtgctaagaaatcccaaggcagacctacccacctctgcagaaagctggaaatttattttatccctagaggcttacacctgtcaacaaagagaggaaaattaaaaagaaaaaaaaaagggctgagtcttgcctcagaaatctctgtcagtgacttgtaaacaggcttccaccagcctccccacagctcttcagaggctgggcaggccttgactcacctgtcagggaactatcaggagccaagtagtgctcagagaatccccccttacaggctgagtgctgtgggccgagcacctacgggtctccatgtccgtttaggccatgcgtaagacgactgtgccctgcagcccacctgaaccatcttctgcagagccctgggcaccaggcccctgaggcctcaggcccccatgacctacctcgttgatgaaggagtgggctccctgtgggctgagcagcaggatggcgcggcgaagcgtgtcccggtagcgattcagctcctctgtcttcatcgtggtgaagaggctggtgaatacgtggctaatgttcttgtccaccttttgtaaagagacgtcaaggcccagccgcgaggcctggtccagaaagctttgaagcccacggatatctgagcagtgagagaagaggaggaaaagaaaaatcatctttaagtgggaatgcacccgggagggtgtctaactgcaacacgttccacccatgcaggccaccacgaaaaatgagggtccaagtcagcctcagtgattcccgtaaacagaggttggaggacgccggcgtagacccagcagcgttcaccagtgtccagccctggctgactgtctccccctacaggttggatgccatccaacaggttctatggccagaaagtgcccttgattcatgacaagctctctttctttccctatatgggcccaatcacggcaattctggccttcaggtcacatttgctggcagtccctggccctagcatccccagtccccttcacctccctctgctcccaacatgaggctcctagaccaaccatggccagctgaggcccctgactggagcgggcctggcctcagcagataggcagtgcaagccctcagtccctgcaccaatcctgccaacgcacagcctgtatcatggcaccccagcctgcatcatggcaccccagccctgaggcatgggaccctgtctggctttagggacctgattttccttgataaaacattcctcctgcctgtttccagctggagtgactctcactccaagtccagtcagaagcccacatcctgactggatcagggatgagcagggggttcaaggaggtacagagagagcccatcctggcacgttggtgatcactgggagagaggtctgtcggcacaaaccacccagggatggacgattcaacaagaagggacctggaagccaatatagttgcactgcacactgctacaaatctatccttgtgaggcctgagggtgctaaagttttttcatccagtgccaaaatcatctcttagcagcagccttgtagaagccatttggctttcccaaaaagagacatgcccaggaacagaggcaggcgggtctgagagtgagacacggtcctgacaatgtcattttcagcccctgggtgcatgtgaggctgaagcctgtttctcccgaactttccagttccatgagccagtgaatgcctttgtttgcctaaggtgggtcacgtgcagcccagagtctcaatccacaggccattttttcacagccttggatgtttcttgtgtctggcccatccttgcattccacctcccataagcaagagccgtgcctgagtcacaccctccaaaggatactctaggtctgcccagacccacaagctgcactgtccccatgccctgggatgcccacaggcacggcctggcccatgcagtcaccaagaacaaaatccaaataaacagtgttagttccaccagggtttgttcctaacctgtccctctccaaaactctctctgtactaattttgcaaactttctggtatacactcatgccaagtgccatgcaagctgctgcaggagtcccaggctccctgttgtgccaagaggacaggctcaccactaagcgtagtcccagctggactgtgtgacaggagccatcatggggaaccaagcagcgcgagggagaagagcagagcaccatggccatcgtaatgagggtgctgggggctgtgcacagggccccccttaccactacaaagggaaagccctagactagggcctcagcacctgccacgaactccgacacttaggactcagtacagtctctgaagccctcaggcaaatcactatcccttttgagcctgaggggctgtctgtaaaatggggtgaaaatcaccaactaccattttcctgggactctgaagaaccacacttcctgtgcaggccacctgcttgtgtctcaggagcctgcacctgggagtacggggagcccacctcctgttggtgcatggggagggcacagcagcatacaaatgagaaccctgggggctctctagagatggcaaatgcatgatcacccaaccatgacctcagccagccccttgtccatcagcagcctggtccctggagcacagccatgtgaccaaacccactggcttcacaaagaacaagggtctcggtgttgctctgcccactgtgtcagacaggaaggagagccagccccagggccgagatgaagtggccagcacagggctcccccaaagtgaagaaaggtagccaactgaggacaatatggtgccttacacctgccccagtgctccaggcccccaacacacaagccccaggctgtcaacacccttggggttcccagagaggcaactcagtctccatcagtctgttcagggccatggggatctgtagctcccaagcttcttgaaagaaaaggtgaagaagataaagacctcttcttaaccaatcagagggagtagcagggcaagtgtgcagagatggctcaggagccccaaccagaaacaccagcactggtatcagccccagtcctgccctctctggagcacagcacaatgcaaatctgtccatcatcagctggaggacatctcagcacccagcggccacccacaccaaaaccagcagtgggcagctgtgctgggcacataacagccttccacgggtgccaatgagggtttctccctggatctaggctgtacataacacaacctctagccatatatggccattaaaacgtcaattaattgaagagaaacacaattacatgctcagctcctcaggtgcactagctacatttcaagtactcaacagccacatctggctggtggctaccatgttggacagcacagatatagctcatatgagatggatcatcacagaaagtcctattgcctggtactgcctggagaaaccgcctttaaccagtgtggtgtaaacgatattcctaaatatgggagactggctgccttcaggcccctggcaaaggctcctaatcccaggctttttgttctgtcactgtgaggactcctctagctccagctccagctccggcctcagccaagtgacccgctttgactatgggacagtagtaaacttgacgcaaacagaggttgaaaaagtgtttgtgcatttccatttccactcttgaaccatgccaccaccatgagaacatctccaggccagctgctggaggaatgtggggacacataggggagagtcaggcaggcacccaggcagccatccccagctgcaagccagctgaactcagatgcacaagcgagcccagagcagaactgcccagttgacctatagactcataaaaaataataaatgactgctgttctaagttttgggacggtttgtttcccagcaataacaaagtgatagatcgaggtcattggatgcattgtatctggtatagcttatgaaaacgttaagtgaaaaagcaatgcctttaccttaaaaaactgccctgtcacagcttacctgtggcactgtccacacggggctgagtgctagtcagccccagggcaaggccacatgtgcacaggtggcttctgcagccctgcctcttccttagaacaccagtggtcctcactgcccatggccttgactgtgacacagatccgagcacagctgcaggatgggcataaaggtgggaccctgagacctgtcatttacaagcttctgctccttgcagcaccttctaaggccactgcaagtctttaaaatggcagagactggccatgtctacagagcacacctttctgcacgtttacataagcatgtgtaccatgagggcttgcatgagtccatgagtatggtagggacacccatgtggccccagggaccttatgcctcatgccagcatggccagtcctctcagtctgggggaaaagtctccttcagtcccttccctgagctccctctacctaaaaccatctcaacccacaggacggttttatttcttcagggaataggagatgccatgggcaagtagcaactgtcttggcacccatgagtacacaagaacatgcaaacgggaggacataagccctcagagctcctctgcacctcccactgctgcatttctggcttctattccagcagcccctaatgggactgagggtttacgatccatcagagacagtttatgctccttgccagcggtggctcctcacacctgaaatcagtgatgctggctgaagccagtgttcctgagggacagcagcccctggctaccactgcctgctccagttggctgacaaggtcaactctcagcctcctttccctgaagcttctgtccagctgcacttggggtggggctggaggcagagtaacagtgaggagcccaagcccatgctgcagccctcctgccactctccaggaatggggccacggaaccccacttctcccgcaaagtccttttctcccttcaagaaaccaaatttgtaatcccaccctaccccatccccccaaaaaacctgactgtctgctgctgctgctcacacagagagaactccccaagcaggtagacaatgaacagagctgggacttcccccactgggccacacagttagtgccccttccccagaatcccttggctcccacagagctctggactttgtcccagggcctccccagcaagctccctgtacacactggccagccccatccaccatcaccaatgcagcttccaccaaccacacgcacctccacctgcccctggggaagtttgctgactgaggccttgtcaggcctcgcatcaacctgatccagaaagggcatgagaaaggcaagagccaccaggtctccaggcacccaggagaggcatggactctggaaaaggccactggacactgcagggacagggaggagctccctagagaggagtcctgcgccttagagaaaggaggcagctcggggtgcatgggccagtccactcctgcaaggaatgcaaggtgacggtgcccaggtcaggccttgacatcgcctctctgcctgccagcctcactgcaccctctttgggctctcaggggccccatcaccaggccttctcaatacccaagcctgccggagtcctgccagcacccacccgttccttcttcccctagtactcactgagcactctgtgtctgtctctccccgggtacaggaaaacaaaactgaatgaacccctggggttctttatcgcagaacttaacatttcagaggctgagaacaagccagaacaaatcaatagcaggatagacaaggagataatttccaacagtgagaagagccccaaagaaaataaatgctggatgggaggggacttcagggtgggataggaaagaccctgcctcggtgaggagaagcagctctggaaacccctaggaagaacattccaggagaggggaacagcacacagaaagttccagaatgatgcatctttgacatcaaatgaagaagatccttgctcgccccatgacaaggctggactgtggaactgccaggaaaggaagctgagggtcagtgggcaccagggaccatccatggggaggagaggacacaggtccctccccgcctccacaccagctttctgacacctggccctgcttgcccggtacatcccggccgctcgccctctccccctgcatcagcctccatgactctgctctaaagctcctgccagtcatcaacaaacaagggccctcctcggtctttgtcttccacggttctccagcatccagcctgcagtcctgcctaatgccctctccccctgggcttgcaggcacaatcatatgcccctctgctcccacccgctccccttctcctccttcacacgctcccggtcacactcccactagtcctaggtttccccctggtaccacctgccatgtctgttctcacgtgtctgagaacagcatcaccacacatgtgctaaggaagcccacatcctggactggcggaggcctttcaacttctcctcctaaacatttcccgagttccactctcccttctcaggttcagcactatcacctcctccctaggactcatgcaacagtgtcctgcagggtcccctgaccctagcatctgccctctaatacattccacaagaatgttctctcttgagatcatatctgctcacaatacagccctcctctaaaccttcaacaaataacacaatttatgtaacagttgccaagaaattaatatcctcaaaagcatcagtcaatcaagttgcaaacaaaaagtcttctagagacttcattattgtgcacaaaatagactccagacattttgggtacctaagagactgtggtcctaacagcatttttttgagacagagtctcgctcttgttgcccaggctggaatgcagtggcatgatctcagctcactgaaacctccacctcccaggttcaagtgattctcttgcctcagcctccggagtagctgggattacagacacccgccaccacgcccggctcatttttgtattttttgtagagaaggggtttcaccatgcctaacagcattttctatttgtttttacattcatcacctgcctccaccacgtcctcctcaaaccatgtaccttgggatccagaaaaagaagctctttgcccactcctggacatcctccacatacacacacacacacacacacacaccctccctccactgggatgctcccaatttgaaatttacagagccctactcctccatcaagacccagttcaaacttcccctctgaggccatctcaggtcctcaagttgaaattcatgcccccttcaaatttaataatattaaacaatattaataacgttaaatcataatatatgggtaacaggagctaggccttcctcatttgtgttctttatcaaaccccaaggcttggtgcctagaacagagtcagaaacagtaaaagtttatggaatcaagttgaaccacagcgggaacctgcctgaagcccggcgtgacttcagcagccacacgatgaccacgtagccggtggaggcaaagccctacttggtaaggaactgaagttggggaaataattttttcaaaatctaaggttataattgtgactatccctccactccctctgaaaaaaatcagatagtcactgggtatttttaatactttctttctgaaaagtaattgaagcgaaagaagacatttcaaattgcttcccctactattttcaatttctgagaaaggcccaggcactgagagtacttatagagaatattttaccatctgtaatgtacatatatatacatgaaggctgccacctcacacgcagaagaaattcacagttaaaagtgtttttggattattggcaaattttccaaaggctgagacacaactttgattccatagactttttatttttacttctttcttacctgagcccccaaagatatgctttgaatttcttcccagatgtactttacccataattcaaattcatttctaagagccctacccagcctcctctctttcattgcacattcccctcccaccaccagctcctaatgtcaccatagttgttgcaagcggagcaggtatgatggcagcagcgtctgccatttccaagggaacccaaagaactacctgctgtggctccaatcacagggatacccttgccctctgcccgctggaatccatctggagcctcacctccccacacctcacacctcagcttctcagctatgcatttcctcttcctcccttcccgccctcttccttccttcctcatatatttcctgaacactgtcctgggccaggccctatgcttggttccagagcagcagaattttaaaacttcacagccctgtcctggaggagctctgggtcctgagggtaagactgacgctgaccctgaagaaaggagtggctcccttctgccacttactgagtacctcctattgccagaatgtgttccatttgcagacagtacttcataaataaatgaagtccctgcaatcgatccatgcaggcgactctctgtggaagtcagcggggcaccaagcaggcccaggggcaattcagcaaaggtatggcacatccagcagctgttggtaaaattggaagcaggcctcccccatcatagggtgacaaggtcccccagagcctaggcaagggctgcattcaggtgagtagaatgatggtgtcctgccagattcagcagcaaagggctactgctctaagtctacttgcccaaggtctcatctgagagcgtcttgtctgggagggagggctctcctgtccccatcacaatcccagctccccagacaacagtcatggcaggcctggccctgaggtcctccagagtgacatcccatccctcaccacaaaaagctctaccctctgtattaaccatatcatttttccaaagatacgtacttatttattttatttaacttttgttttagtttcagagtgtaccatatggaaccaaaaaagccagaagaaccaagacaatcctaagcaaaaagaacaacgctggaggcatcacatacttgacttcaaactatactataacgctacagtaaccaaaacagcatggtgctggtacaaaaatagacacataaaccaatggaacagaaaagagggcccagaaataaagctgcacacatacaaccatctgatcttcaacaaagctgacaaaaacaagcaatggggaaaggactccctattcactaagtggagctggggtaactggctagccatatgcagaagactaaaactggacaccttccttatatcttttaccttttgatgctttgacatctggggcctcacttaccctggagggcctgtctctccctgcgttagtaaacaacttgctccagagcatgccttttatctgcaaaccaaccaatccagagcccagaaccccgaccacattttatattgggatctcacactcagggccactatatacttgtcctaatcaccccagggccaggtaccagacaaccaaggacacctctatgccccagagcccactgggcttactcccaccagccaatcctaagcccacctactctgcctcacctgttcctccccatggaaagcacagccgactcttgaccatagtttcccccctcctcctttctgcctccctgtgggacctgctggcaaggcaggccctcttctctgggaatctgcaagtataacaaacagtcttttcaatggtagtcatctcctaatctattggccttgccatacctaaatcataataaagcctgtattaaaactcccatactccttgcagcactctgcaatagccaagacagggaatcagccttggtggtcaccagccgatggatggatgaagaaaacgtggtgtacatgcacaatggaatgctcttcagcctttgaaaagaaggaaatcctgtcatttgcaacaatgtgcatgagcctggagcagattatgctaagtgaaacaaaccaaacctagaaagacaaatactgcatgatctcacttataagtggaatgtgaaaaagttgaactcagaaatagagaatagaaaggtggttaccagaagctggggagttaggggactggggagatgctggtcaaaggaggtgaaatttcaattagacaagaggataagttcaagtgatctattgtataaatgttgactatagttaataacaatatattgcatattcgaaaattcataacagactcgattttaagtgttctcaccacaaaaaaataagcatgtgagataatgcatatgttgattaccttgagttagccattccacaatgtatgcatacatcaaaacatgttgtataccacaaaaaaaatacaacttttacttgtcaaaaaaaaaggaaaacactatcttccatggtagtctgagattcagagattaggaaaaggcacggagaagcagccccactgccctgctcccccaggggtgcacagaataagcacaagcctgggttcactatctgggtgatcctggacaaccacctctctgagcctatttcctcacctgcaaagcagagccaaccccaccttcctcctaggagaccttagatccttcagcaaggggcatacatcacagctggcacagtgcaaaatagatgttcagcggctgtcagctcccttccaaccttctcaacagcacagggaacgcccccaaaagggctctcaaatgagcaaatcatctctcttgttctagagtctcatcaagaagggaggtgccatcctgacaatcgggtgacacaatagaaaactaaaaaggtcatctctcccttctgtgataatggaaattccaaagttgtaaagtggcttgaaggggaaggtctgtcattgaaaactctttgagaggggaaacaagtttctgcctctaataagggctgatagtacccaggagccttctgctcagacaggtttcagaaccagccacagaaccacataagagcagattcaggaaagggaatgggtggtctggatgactccgtatgggcacgttcacatggtgtgttcacacatgtgctgtttcagacacagggaccttgaatgagccgtacccacaccccctgcctggggcactaacaatggaaggcttcggctaatcccaccacattccaatttcccaccaagctctactcctttccatttaaaaaacaaacacagggaaaaacattttaaataatcaggctggaagatcgagattaaaaacaatttaaaataaacgtctactctggcactttcgaaaaaacacaccacgctgcattaagtgctttgaattaagtaaattatgccaagtaactaatttacataattatcaagatttgcattttacacatgttatgatgaaaatgggtttataaaataattcttcaccaacttctgttccaagttgggttccagtatttggataaaattccgcggtgtttatctgctactgtctttcatgtttcaaatctctggctccttcaatattttcttttaatctggcaggtcccttgttcccactgcaataaatagtccctttgatttgcaattcccttccatcagctaagtgagatcatatttttaaggaatccataatatgctaatgatttttagaattttcacaaataaagtttgattttcctgtcacctttcacttacgaggtatttggtaatgattttagcagttcttcctctatgatttgcagggatggttttcagagtcctgctgctttgatgccattttttcaggatgaggaattggcatggcatttccccacaagcttctttcctgcatcaacaggcctctcggggcaggagcaagaccccagctgaagtcgcccagtgagaggctcgcctccagccctcaggtgcttggtgccctctccctgagctgctggattcttcaatgcttcatttcttttctccctctctgcggcttgtgaggaaggctaaccataccatgaaagatgaaaaaactgaaggccagagaagttgagctcctccttcagaacacagaggaatgacccacatcattgctttgagggagctctgggtatttttctggattcctctttcatttaagtagagaagcaaatctagagaagtaatttccaagtgtttgtccaaacagccacatgtgaatttccaggggctccaaagctgatgcctttggattttgttaatgccacagccagatgacatctctccatggtatggccaaaccaatgatggcgtaatcgtaacagcatgctacagactgaatgtttgtgctcccccaaaattcatgtgttaaaatcctaaccctcaaggtgatggtattagaagagggggttttgggaggtaattagggttataagggcagagacctcctggttggaattagtggccttataagaaaataagagactcgagatctttttctctccaccaggtgcgcacactgagagaagatggccaactgcaaaccaggaaaagtgccctcacaagacgtcagatccagcaccttgatcttggacttctcagcctccagactgtgaaaattaaatgtgtgttgtttaagccccccagcatgaggtatcttgttaatgcagcccaagctgactagcacacagcacgtcttatccaggtctgacttctagccaggcactatgtgaagtaatttgcatatactgtctcatttagtccccatgacaccctcatgtcttgcccgagtttatctagcctaggaaggtgctcaaatccagggcctctgactccagagccagagctctttagtcttattcaccaacaagctgaaggcacgtgggaagggatgagaaggaggcaggtttgcaaaccccatcatgtttgcaatggtctggtttgcaatgctgaggtaggtgcctggcacacacatttcctctgagcctgagcacctgtagggaattaccagagtatgcccatttcacagataagtcactggctcagaacagagctgggatccaaccctggatctgtctactataaagggctctgctctctgtgcaccaagacacagcaactcccatccccaccccagacctatctagtggccaccgcaggcatatagagctccagagagaccgtgcagcaggctggtcaaatgctggagtttggcatttaagaatggcaagaggaaaacatgatgcatgccattaccagctgttaatttgcaatcagtattaataagtgacattacacagtgaaatgtagcatcttcattagttctgtaaattatcactctgagtaaagcccattctactagaaagagcagccccaaccgagttaacctggaagcaacctgggacgggttccccctctgcagacctgtctgagggccacccaggggctgtcacccacccacccaatgggacctcctgatccctgggaccagcagtgtctcgggatctgcgctggtggggaatgtgtgtggggctgccctggtcactgcccacaactcccaccctctcagtgacaggctgatgggactgccccacactatcttacccactcaggcttgctccaagcctatgtctggtgcccaaccaggccatgccctatcgtggatactagagagaaggatcagaccctgtccccaacttcaaaggagcccaacaggaaacagacaagaaaacagtgtttgaggatgtactaggaacagcagggagtgcacgagaaggggtttgtttctccagacagagggaaggtctcaagaaagccttcagagagtggggagttggaacttgcaggatgaagaggcattttctgcatggacaagagagggagtattccagaccaagaggatgtcaggatcaaaggcctcatggaacccaacagcccagctgtagacctgtgtgtggttctgtttgggtatgaggggtgtgggaccttgtgtgcccacagaaggatagccacagtggcatttctgggcaggagggatgccagaaaaccctgagaccagggcctagggcccagccatgccaagcccaccactcctgcccactgcctcctgtctctgaggcagagaaaggatgacagcaacggagacactgcactggagtgagccctgaagccccgctctgcgcccgagagcccccatagctggagcagatgctgcctagctctcagggaggccacttcagggcagggctgtggctcccctgtgggagaaagagcctgggctttggggcctgccacaggggaggtggactcatgggtagccatctctggcctgggcacggctcttaagctccctgagcctcagccactgcctctaaattgggcagagtgaggctgtctaggggtaggaccactgtgaggggcacacagaaggacagacatgaagcacctgggacagagcccgtgtgaggggcaggctgctcggaacagcagcccatcctctccagtgcggctgccacccctcacccgcctgtgccttgccagccctgacagggaggcttctgccttcacagctttccactgacctcatgacaagtgttctttaaattatgtatttaatttacataattactttctgatatttactcgggtttaatttgtttcctcgggaacctgtctttgaagggacagtggcaaccagagccagaagtgaagccacagcaaggggcccacagatgccaccacccctcattgtgggcctcctgacgccacttctgcagaggaacctcactctgcctgagctccagggtgccacagagcttcccgtgcctgagcccagtgggtgccaggtcaggtggcatctgggactccaccccatgcctgagtctgggtgcaaaggaaggcctccctgactgacacattcactcacacacacacgctcaggtattccagctcaccagtgctcacactcacctgcactcacacacactcagtgggctggagcccatcctaccaccttgccagagcctattgttaaattttcaggaatttgcaagccagttattaaacatagccagtatggattaaattatataaacctataattaaattatattaacaaacaaaattgataaatacacaaagttcatcattccctaattattttgctgcattttactattatctgcgctcttgaggctattaatgtctatcctatctgaaacaccagaaataatgggtgtcattgcttcccaattccatgtctagggacatcatgctgctcaagatggggctggtggtcagcagaggccaggagctctgcaagaacagcatggggacatggctggataccccagcccaggcagccaagccatgctaggagcaacacagatggcccagggcctctgcaaccccacagagccccgccaccaaaacatgcctgctaagcccccaaattaaagccacatcaatattaattaagaggcaggatctgcaggcctaatggggctgcctacccatccatcacaaactcgttacctcctgccagaacctcttgggccagattacaaatgggatgtagggtgggggcggggaggcagggtattatcttaaaatataatttgaattttccttccaaaataccatcctcgggctgatccatcacatgccgcacccgcccaggcctggcacaagcatggactggacggtggagccatccatcacaggccgccggaaggccctggaaatgccagagttgctcttgggctccgaggaaggtgcagacaactggactaatagtatgatcaatgccagtggggtggggctgcaaccatgggaaatacctgcccagaccaacactgtcccctctcctcctcccaagggtagatgtccttcctgccaggaacgctgggtgaggggagtagggaagtgagcccccatttatggcttatgaagtcccttctttgcactgtcccactctctccccttcatttcctcctcacagcaagcctacgggagcaggattttcattccttctttacagaggaaaaaactggggcctagagagcttcaggcactctagtaacaagggctgagccaggaggtctgattctgtccagctctgccacctccaggagagtgatacaacagaatgtcgagccccaagggccacagtccacaccctggtctccagaagggcccccggcttcttgaccaacctccatatccaagggggtccatcccagcaggagcaggtgtctctagagagtggctgcagatcctgggaatctttctcaccactgcatactcccaggtccaagcatggagcctggcatgcaatagcagctcagaaaagtcacatggaaaaaatgttcaaattaattacagaaatgcaatttcttgtccaggagtagaagctcgagtccaacagaagcccacacctgagctaggctgtgcaaactgaagaggaggaattgacagagctgccatcgtaagctgggcaagagcacacacctctgctcgctgccacctctccgggagcaaaaccaggggacaccccagcagtgcacccagcactgtaccaagccccacacactccccgtctcatttactcaccccagcaaccccaggagggcaggtctattattatccccactttacagatagcaaaattgaggcttggagaggtgagtgccaatgccacaattcaagtccaagtcagtctgactccaaagcccctgccctgagtctttctgatatttaggaacatgcctcctatacagaagcccctcattattgttagcccccttcaccttccagaaaatccaataatcaaaaataaatccacactctgccagatgccctctgcccaggccagcaccacgggctgtatggcttgctgaaggctggggaaggccctctggtggccctgggtctgtgcagcccctgcctgcagccaatagctggtgatcactttggctgtcgacggccaacctgccattcttcaagatgtcaaccacacagcctctgcccgggacaccaaatgggctctttcctaacccacatctgcctttttatttttttaaccaactttgcaagagcaactgaaagggcagattcagattctgagtcagagttttcattgcaattatagtgatttccagtttagagggaaatgaacaccccagaaagcatttagagttaatcctaccattctggaatagcaataaaacttcctgaggaataaaatatgagcaattcatcacaagccctgtcaccaggataaaggggagatccaattgtctgtgggttagcacaggttcctggggcaatcagaggtgtcagaagctctggaggaagtcccccattctcgtctccactcccctgcctttttcactgaatatatacatcagccctaaacgaggggacaggttaatagtcctcaggactctctagtgggtgtaggggaatagggagggcaggagggaggaaagtcatgaatctctagccggggctgggctgtgtgcttgcctccaggaagctctgaaaatccactggcaggatacaggcctgaggaggatgggaaggcagggaaacctctgagcaacaggatgggtgcaaggcatcaagggtgaccatgcctgctgatggggaggacaaagcccccagacatccaaggcaagttccagtccgcaatctgaccttcctagctgagcactgtccagcaagcaggctggagaaggagtcagatatagagacagctgcaacaagctgcaaaattcggaactccatccacatgtaaatggtaggagagcccaaaagaatgcctggcctctagcgaaggtgtgagcaaggggagaagagaggggcagcagatgcatgcacagcttgttgcctgcccagcacatccgtcttcctctggaaacagctccctgctcttgtttgggggaatgactccttatcctgctccaatccgattttatagctctagtgggtgctgccatccatgcaccctgtgccccaggcactggccacagctcattagtccagaagaggtcacatgattcaggcccagcctgtcagagcccttccctgatttttttcaaactgtaactaagagaagagggatggcgctctagacaaagctggtaggagactcaggaggtgagagctgccatgtttcttgtccaatgggggaagctggggtgagggaattgaccgatctacaggtgaagaaaacaaagggccacatttgggtccctggtttgacaaagccagaggctcagatggccctggcactttaactaaggtagctcaaggtgagtttctgtcacccattgccaaaagagaaccacaagagcaaaagcacagaagcaagaaatgtgtggcttgtgattaatggtgctatgtggcagcagatgaggaagggaatgtcagaagagacgtctagaacaagtcatgtccaggtgatctcacgtctcaaaggccagcatgatgggtctgtaccctcagataggagggataccctaaagttgtggaaggacataaacagggctgggccaacagaagtggtctggagagaacagtggacaagagtgggaggtgtggcaacagaccaggcaagagaggatgacaggcaggctccaaggggaggggcatcaggagtgaatgaggatgaaggagaagaggcactcaggggaagagtgaacaagctgactgtctggatggagagaggggaagaaaagggaggctaggatggcttggaggcttccaaacaggacctctggaagcctgaaggtggcaatagtgaatccacgaaacagagaaggaggaacaagcttaggatggaagctacgagttctgatgggggcttgtttactgtgaggtattaaagcacatcttaatcagatgcttgaaaacttgagtccaaacatgatcaggactacagatgtaatttgctgtgtcctcaccacagaggaacaactgaagccacaaatgtgaatgttggcccaggaagagatacagagcaagacagaatgagggctaaggacatggcatgagacccagaaggcaaatgccctccaagcaggaaaagggggcatttccagtaagcagggtggccaagaccactgggtactcggagggctcaagggtgatgagcacaaaacggtgctgcctatgccatgcatgctggcgaggcccccagagaacttctagtggagtgacaaatggagaaatgtaaagaagggcttgtatgccatgctcaaccttttctctccctaaacacgtctctcctccaggtgctcaccagcaggacccctcccacggacagcttggaattgggagtatttcccagtaacctgagttcttaggccacctctgtgggccccatggaagaaagcagatggaaagtccagggagtgacagtgaggttaccctagggacaacctggaatcctcctaaattataaacgcaagttgacagccaacgcaagttgaaagccaagagtcagtgaaggtgttgtcagcaccctctccatcattatgcaaaatataggagatagtagcctcctcgggactgtccataagtgtggctgcctgagctccggctccagctgctcccacaggtgagctgtggtctccctgaaaggatgttgagcccctggagcatggaaccagcacagcctagacaataatcaagaggattttcataaacagcatgaattctcaggattttctgctgtgtcatttcatgccagacttgtcccccaacgcagtgcttctgctctgacacaggcctgctcacaagcctccagggctccgggtccatggaagaatttccattcatcggcctgagactaagcaccttgacagaggggaagggcctggccctgggagtcagacagccctggccccagtcttggcttcaccatccatcaactaaggtgcctctcacctctctgcaccttagtctccctaccaatgaaaacactgattacaattaaaaggggaaatgtatctccattacagggctattgtgagaattaaaggccaggtatttgtggaggtgcccagtgaattgcagctacgatgaccatcatcagaaattactcactcacctactaagccactggaagcagctgatgtgccacttacctgtcctggttttcaccagcaccctgactcctgacctttccaaactctctctgctctgtaggactcagctccaaccccacttgaaagggctcccagaccaaaacaagcacatgtgtgaggtcacggaggtaccacagagatgggaaattattcaaagaggcaatctgggaggccatgggatgagtcaggagacactgaaacatggctgagaggtttgtgtgaccaatgggaagcaaaatatgagcagatgtccccactcagactgtgcaccctgagacagagtctgggtgatcccacactatccaatgtggcagccacaagccacagggggcttctgagcatttgaaacgaggtggaatcaactgagatcggctgtaagtgtaaagccgaggttgaatttcaaagccttagtacaaaacaaagaatgcaaaatatttcattaattatcttttttttgagacagagtctcactctgtcgcccaggctggagtgcagtggcgcgatcttggctcactgcaagttccgcctcccgggttcacgccattctcctgcctcagcctcccgagtagctgggaccacaggcgcccgcgaccatgcccggctaatttttttgtatttttggtagagacggggtttcaccgtgttagtcaggatggtctcaatctcctgacctcgtgatccgcctgcctcggcctcccattaattatttttatattaattatatgttgaaatgacaataatgggctaaaagaaatatactaaattaatttcaccttttactttttaaattttaaattacatatgcggttcacactatacagtcatgcaccacaaaatgacatttcagttaacaatgaacgtggtaatcccaaaggttataatggagctgaaaaacttctattgcctggtgatatcatagccacagtaacatcattaccttttctatatttgtttagatacacaaatacttgccactgtgttacagctgcctacagtattcagtacagtaacatgctgtgcaggtttgtagcctaggagcaataggctatcccatatagtctaggtgtataggtggctgtaccctctaggtctgtgtaagtacacagtaaagacaacaatgagcccacctaagatgcacttctcattaagcaatgcacaactatatttctgttagagctgggccagagccttgtctgtgccacaggacacagcttcgctcagcatgcctgctcatcattcatgggacagaggcagggggcacagggctaagtcagccagggttcaacactggactccaccccttaccaaccatttggcaatgaacaattttaacctctctctgcctttgttcctcatctataaaatggggatgataacaaagccaacctcagaggattcttacgagaattaaatctacattcaaagcaggtagaatagtacctagcaagtggtaagagctgaactagctctatcaccacgaccatcattatcatcaccttcaccatcaccttcatcatcaccaccatcatcatcaccaccactactaccaccatcatcataaccatcaacatcaccaccatcaacaccagcatcatcatcattatcatcatcatcatcgtgtgagccaaagcacaactgtccatgccatacctccagaacaccaagccctcaactgggggattaagccaggatgggtctgatttctacacaaaggagccacccatagatgtgtatgctatgcttggtcttgccaaagccacagctgagtcctaaggcatcctgcaaatgctcactgtgtgcctgtcctccctcctgctgcatgcacctcaccaaagcacaaatttcatttcaaccatgtagaattcccagttcagtccagatcacctattcttcccctcccctcccagctgccatgcctcctgcagaccaactagctagcatcgccactctggagtaactctttaggaccagtgacatcaggagtttgcagaattatgccaacaaaaagaaagttcactatgtactttctggcattcagagtggaggggaagaaggaggcatggtcaacaaagggtcaggaggctgaatggccagaagccagcaacctgctggtggtcaccattttcagacccaagtgcctgcccagacatgctgagcagaaagaagctcatcatcagcaacccccagtgccataggaagaaggccacagcatgtgctgagggcctatgatgtgccaggaaccatgtgctccctcatatagtccttgcaagagtccttccaggggggaataataaccccatttttacagatcagtagcctaaggctcaaagatgtgaagtgacttgctcagggtcacacagggtataagcggtaaagcagggaatggagtctaggagactccagcccaaaagctgttctcttaaaacggtatagcccactgtctgagcacacgctcagtgtgctggaaacaaagcatccttattattagaggccaaaatcctgccttgatctctcagcatctgtttgggtgctcccctaaatactcaagaatgagggtgttcttgtgaaaaagtgtttacccagctggctctcaggaaagctgtgcattgtcccaggcctcccacctctcagctgatagcaccagcaacaacagacaggctacatgatgtgaaattcccacaccctggccgtccaaccccggtgacccaaagaactaaggtgtgagccatgcttttaggaataagagacagcatgagaaaataagctggtagcaaggagtgtcaggagggaaatccggggcctgacatcctagcacattcaggcacattcaggtagctagaggtttctgaagcctgcatagggggtggtgtaagagggaagacagggcacttggagagtgactcagcctgagaagctgagtcaggacaggcagctgcgggaagggaacagcatttacgaagctcccacctggtgccaggctctggggcaggctaatgtgtgctacccccaccgagcgctcctgctcctcccatgagaaatgccctaaccccattacacagatgagaacagtgaggctcagtgagtgccctaagccaaaaagtaatcttaggagctgaggctggggaactgagggtctctgtaggccatgagtgcttgagggagtctccaggagggcttatctctcatcagtcagaatctgccttcccaaaaatgctgcacatctcagccacatcaccctggttctgggcagggttttttgcaagcaggtggagatgacttgctggctgacttgcctgagccacaggcttgcaagcaggtggtggtggtcacaatggaactggatcactgaaatggccggaggtggaggaattgataacaacatctcaatccactcagaaaccaagaggaaatcaaacaaaaattacatccagcttctccctgctaaaaccaaatcaatagagaaggcagaaaaacaagtgtgttgtattttgtacaaatttccgattgtcactgtctgtttaccgaaggaaaatgctggtggtcacccagggagggctcctggcagctgtcctgctctggagggacggcaagacacccaaccagtggtagggcagtggcagggtgtttttgcaatgccatttcacttctaattaaaattaaatattaaacaaatgaatatgtataaatgtgtcctggggttagtaatttatctagatggacctccacaccttttggggctttgggtgggtggtgtcccaggcagcaaggcccagggaggaaaaagggaagagggtgcagccatcacaaggagggaactgacccagaagcaaagacaggaaaagggcaaaatcatggggccatcattaccgtgtccctgctgaggcccagggaccctcaccccatgcagggaacaggaagaagagccatacatccccatcccagccacccaaagcccagccacacagctcctcctttcccaagcccactagggacagctaactgcaaactgtgtgttctctcacctaaaagcaaggggcagccaatcttgtttgtcttcagaagctttccatggataaggcacatagtagctcagactcaatttccattcccaattctgcaaatccaaccctaaaaacaggggtgtcctgtgcataaaaagggtcttggggccaacttttcaaaagtatagaggcaaaaagtctgtctggatctggagccagcagggtgcacactagtggacaggtgagggtgttgggtggggttgtccatgacccactgcttggagaaatcattcctcttggctttactattctttggaagtggcctttgggcatctgtcccaacacccagagagaaccttctgggtcatgccctgtgcacagggctgagatgggctcctgcgaacagagtcctggggttgcagatttctctccaggagggcagcctggcagggggcatatatctgatccatcatcatgggcatgggcctgaaggagccttctgaaagccagtgtcagggggttgttgagttggagaggcctgtactaagtaagtagcacattagggtataagaacctgaggaaacacaggggctgagattccaaaactgagggccaggatgctggagaggtggaggcagggagcgggagtgactctgtggacctccaatgggccagtaccctcagtgccctttatgcatcccaggttgtcatggggcaggctggagccacttgaaacaacgggagtgggagcagcacagcctggcctggcacttgcgtctgagcctgtggctgccctgggccatggcactgccagctgtctccatcaagcccaggtgaggcgctccatggcccatcctgtccttgaggcccatagcagagacagagctaggggctgtggggtgtagctgtcctatgagcatgagccccagagcagcatgttttgacgcatttcttttttttttttttttcattatactttaagttctagggtccatgtgcacaatgtgcaggtttgctacatatgtatacatatgccatgttgggatgctgcacccgttaatttgacgcatttcttaaagatcctctgttaacacgtcagctgttaagccagtgatgaagactgtgagcatgatactttggactgatagcgtcagccaccgaccaggcaggcagagaagcggtcagaggctgagactttgagccttgcccctgcagttggcctctggctgctcttctggcccagagccacaagcagggactctgtgtgggaggcctgggtcagacaatgtttgttgagtccccactcggtggcagggatggtgggggcagtccatctgtggtctcttaatcttctttctagagaagtatgattatccccaccaaatggctgagaggatgaagaacagagaggaggaagagtggcccagcaccccccgctggtatgtggtcgcctgctcagcctcacccatctgcttacatcaccctgtccatctcagaagctactggcaaggcaaggaagggtctcaggcctgaggcccctgcaccacccggtgctgctcactccagctggccatagtcctaggaccccaggtggggaacagttgtcaaaacaaaccggggcagcacttttgccggtgcaccaggctgggcagagtgggaggggctgtgtgagctcagtgaatagattacccgcttcaattattttatctaacgatgacatttgtactgtaaaagtcagcacaaaaatcaatgagttttaaaggacaaaatctgggggaggctccagcccagcgacctggaacagcagcccaggaaccagaaggaaagagaggttcagaaccatggaggtgagcaagattcccaggatgccagcgctggggtggcccacccccagcagcaccagggagcagagaacaaaagcgctcagtgctgaggcccagccctgaaccccgcagcctgaagcattcattcattaattcattcatgcacaggataaatatctactaagtgacactgtgttccaggcagcctgctgagcacagtcttagagggacagtccctgccctcacccagcacagtggaggaaacagaagggtaattaagtccataattgcgcaatcaaatagttaaattacagttaaacaaggacaaagtctaacttcatcagggggtcagggagagtttcccaagaaaatgagtttaagccaaggcatggaggaggagtttgcaatgggtacagagaggtgggagagggaacaacattcaggcagatggaatagcatgaacaaagctgaaggtttggcttcctccaggaccgatggaagccattccctccaatgtagtcggccctacactcactcagcctctctcttggggccccaaggggtagtggatgaagctgggggcacatcagcagcatggaggaggcagcatgggtggtgataaagcatgtccttgggtgatggggaccagaaggcagaccaggcatccaaaggccagagagatggagcaaagaacagtggacagaagcgaatgttcagtggggggtaggaaatttggggagtccaacaatggcagaagtaccttcagctgccctgctgtgtgctccagaggcagactgtgcctgtcaggacgaacagtcatggagcagccacagggggtttcaatcaaccccagctatgaccaatagaggaaaaaaaaaatctgtgatcctggagggatactcgcagtgcacatttcccatgctcctttattacatcctggtggtaggaggaggagcagagtgggcagaaagccctgatgaagagctagatctgagatgaggccaagacaaatggttgtgtcaaagcatctgcaagtttctatgttgctcggcgctcaaggtttctggaggaaaatgcctgaatagccctttttctgtgtaaaggaccaggcccagtctagaccaaggcagagagggaaatgggagcacacggaccctgcagggcagaactgcagcattgcttgctggcctcctggagacagagggctgggagaagaggggaggtgttgagccagggctgagggcccacccctgctgaagcccagggccaaagaggcggcctgtggctggcctagtctacaaagagggagatccaatattgggtggtaagtcgtttccagttctgggttgggtttaaggttataaagactgggcctggggttctaagggttagaattcttggagttgagatcaaggtgagtggccatccctccctgttttcccaaattttaagtgacaaactgtcccactgaccacttcccaggaggtgctcaggggaggaaaccaagggaagcttctgtttagggcaagacggcgctgtgagtggctggcaggaaccgacattcagcagggcctgggattcaggaggtaagactcactcctcattcacacccccagaaatcctgtgcagagcaacggttcccaccacaatcggaggaggctccggtcatgctgattggacattagcgcaaagggagatgccaaaatgctaaagacacgggaacatttcacattcattacggcttggctaactatggagtaaatgagacccatggatcagcctccatcacgtgcgttctgttgttctcagcggttctttatatcactgtcactatctttttttttattattatactttaagttctagggtacatgtgcacaacatgcaggtttgttacatatgtatacatgtgctatgttggtgtgctgcacccgttaactcgtcatttacattaggtatatctacgatcagagtgaacagggaacatacagaatgggagaaaatttttacaatctacccatctgacaaagggctaatatccagaatctacaaagaacttgaacaaatttacaagaaaaaatcaaccccatcaaaaagtgggcaaaggatatgaacagacacttctcaaaaaacgacatttatgcagccaacagacattgtcactatcttagcagcatttactgagccaggaggtgcagctttacctgtgttttgcagatgttttctcacctagtcctcaggagaacttgcaaggcctatattactatcccattatgcaaataagcacaatgaggttctgagaggatgagtaacttggcacagctgggaagtggcaaagtaggacctgctgccacaacagcccagttcctggcgccacagcataaattggcctggctgacacttaaaatttaggtgggaccaaatactccatctctgctttctcaaatcaggaggttttatgtgagcagaatgcagttcccctcagtcctcacagccatgtctaagcttttgctgggcagtctctatttccacactatttgcggcaggctttgttgctgctctggcccaagtacctccttacctcccaaacagttaagccagagccaggccccaagaccaaagtcccaaatctcaagtgcaaaaccttcctgcctttgcattcaggaacttacgggcattgctacttttcttctgcagcaaggaatctggggcctattggcagaaaggctgaatggggagcaccccccacccagcccagaaaagacccagccaacaagggtagaaggggaaggcctctccctccctgcagctctgtcatcttccccgcaaaccccagcacaatcttatcagggagacctgaggtttttccacagttctgagagcactgatctattgggggaccaaggagcttccaataaagcaggacagaggggcctgggccctgggagggtgtccatccagtcaggaggccaaaccctccctgctgctgtcttcctgaggatgagcatcagggagaaggggccacagaggaagactgaaggcctgagtgcaggccccaccaagaaagagtgcctgccttccagaaggaaccaccgagctggtcccagaatatgtgcttgcccactctggaagagaaccaagcatctccccaggaagtagaggacagatcccataggccacagacaccctgcccctggctgttcccaaggacctcaggatcaggcaaacggtgccaaggttctgtggggacagtggttgctgggggagtggcgggctttccagcagcagcctcacactttggccaagatgtcaggtgtgcaccatcttagctggtcctccccacggccaggcagggtccatagcattgtagctgttttacagatgaggaaactgaggttttgctgccttcctgccccaccaccactgcagagtcggccctcctcagcatgttctagagactctgatgttagacacaaagtaggactgattctgcctttctcacagaagcaccagactcagctcgggcagctaccacctaggattcctgcctgaggctctcaggagacatctgtgagaagaagacgctgtgctccagcagaggaggcccagaggcaagcagttgtgaccgagggaggcaccaggccaggctcacagtgggttctccaggacagaaggagctacaagaagccccatagacccccacagccttgagcacactgtgtgtggtgaaaaccaaagaagaggggaagctgttaggcaggctgcttgatggaggcagacatggcatcagtggtttgaaatgaatgcagcccaaaaacatctggactccaccagaggcactacggggcaaggtgagcctgcatgagtggacctccattccctgcctgaggcagtgtggtgacagtgagacagagcgtggaccttcgagtctaaggcaaatctttctcctgacatttatgggctgtgtgactgtaaacaggtacttaaccactttgagcctcagtttctactgaaaaataggcacacaatctcaccaggctgtgtgtggagccgaggagacaatgcaggcaaggggcgtgaccccaggctgggaaaagtgaaactcgcccgccctcgtgcactgcactgagatgggaggccctgcccaagctgtgggctgtgtttaccgagggcacatctgagccctgggaagcccttagaaaccgggatcccatgacaatctccagaacccaagagcctgctgtccacacaacacctgtggatgcagaatcccctctgccaggtgtgggaaggattctgagccaagtgcccactgcaccctgaggagctgcccttcttcacacaccccagccctgagggagcctcagcaagcccagggcagagcggtgagtaaggctggcagggaaagaacacactcaggctttgcacacagagacacatagaaatacccagtcacatactcaaagacccacaaaatacctgcctctggaaagaccttcttctaactcacccacttaccctgggggacagggcagggcaaagacccaaggcaggtgtgcatcccaggcaaggggcacaggtgacagcaccattcagggagactccctgggcacagagtatgagctggaccttgtgagttcagctcggtctgtggggaaagaaattgaagctagaaaggggacccaggcccacagctccagccaggcattgctccccactctcacacacctgcatgggtgcacaatgccggtgcagaaaggctgaaggacagtgtgtctgacgtaaaagatgcttcagtgcactggttcaggccaatccaggatcatggcaagagctagaccggactgcaacaagaaggccttgtgtcagacctagggatttggtcacagcagaccaaaagggccacagtggcctctggaaacactgccctgagatagataggtgccttccggcaatgaccttaggccaaacagatagagaatgaggcaagtactgttgagcttgtcaagccacgctgtagccccaggggcagtggtatgctaggagaggtttaactggctctctggaagtaaataaacccctgacttgtagcatttaccaacttccttgatgtaaatatttccaccatggtagatttcaagctaccaagggatattactaagcatggagttaggacgccagcttccagcatgcccctgcacaggggtacccacatgtgcccagttccatcatgggggtggtggaagggatgctgccaaggagaaaacgagggtgggaaccaaagcctgaaacctcagggaaagcacacagggcaacccataaggcctggtgagtcagcaagtcagaagagcacaaaattcctctagcagtttccagcagcagtccagcctgggatttctgaaacatggtcactttcaatccccaggcagaagacccccaccagccagttcaactcaggagtccccagaagatgtcccattgctagaggcaaagccctgccatggcctgcaggaggaactccccaaagatgtcccatcctgggagatttaccgctgaaacagcccagcggcagcccatgtggctccactgggtcttctgaggatccctcttcttcaaggtacagtcacttcctctgtcctgctcagagcacagctggagctctcagaggccaaggcggggcaggaaagcgccccgtgcaagccacaggcacctggccctggggttctgaatcagcactgccatggactctcagaagacaggcctttccgcccatccttaatgaaaagcattatcccaagccacctctcccaagaaggtctccaggcaagcctggggcttgagggaatcacacagccaaagaggaccacaacggtgcccaacgtgacacctagagcctgagtggctctggcccagcccacaggactgggtttctgtaccagccctcccagagcatctgggggtgtcagctccgcagcagccacctcagagccagcaggcggatggcatggtccagtggacagcgattctaatcaggtccctgtcgcccaccatctgtatgtccttggatgcaccacaagcctcagttgactccccggtaaagtagagcttctcataggattgtcgtttgaggcctacaggagataatggccctagcacagtgcctgccctccataggccccatcacaaatgtgagctcccccaggagagggcaatgccctgttctttaatgaatggacctgctcttctccctgctgggcctgcccatctttaggagggtccccactttgctccccaagggaccagtgaaccacaaagaagcattgcagagagcctgccatggctatgcacaacctttctattgtctctctcctacacacacaaacacacccacacacatacacacacacacgtgcgcatgcactccaagtgccagaagacaactgctaacatgtttggctgacaaaggaggaagagtccttcttggggatgtgtcagagcaggagtgaagctatttggggtcacgttctaaaagctgaatggatttctggatccgtgcttcctgtctattttcagccaaatgccaacccatttaaaatagcatgtttactcacaggttctcctctacactcaagtcaagaaaaacgtttaccccccacgcttcctcccccaactcattaagcacttctgcttttccctgccttcagaccgccaccacccgttcagcgtgacttccttctgaggcagtggttctcagacttcaaggcatactagaatcacctggaaagttttaatactctctaccctataccagttacatcagagcgtctagaagcaggactaaggcacctgtatttttcgaaacttcccaagggatcccaaggtgcagccactatgaaaagcatgctttggacctgccagggcagcaagagcttaaattaaagggatggttctcatccttctcaagctcaagagaaccactagggaagggacctggggcaatagaagcgtttctgcctccagcccagggatttggtatgcaagcctgaaagttggaaaggaagaaaatccccaagtgcaaggccaaccccaccagttctgtgggtcagctagctctgtgtctctcccataacattttaggcaattaaggaggtattgaagaaagagagataaactaggacatcatgagtccattagattagctactaactggctttatctctattaaccgaggtggggacccagagggtgaagatgtcagcagggctcaggcgttcacataagtcccatgggaaaagaggaggttctgcagaggcaggtagggtgggggctgtgcaaggaaatgccacactgtagactgtctaaaagatttccaagcttcaaagacagatggttttaaagaccaaaaagttggagcaatatgaataatctactttagggccatttagaagccttttaattccagaccagtatgtggtcattagaaacttgaaatagtaattctacctaaaccactcacttccagagtcttcatagcatgattcatatcaagcatttcagaaagcaaacgccggaggaacacgctcttccctaaagatttcagcgaagcacctggagttagaaaccctacgcggcatgccaggaaatacgttacacacagtttttcatttaatccttaactctgtgatgtggttggtatatttttttcaagcagctttattgagatataatttacatgccaaaaaattcacctgtcttaagtgtacaattgaatggcttattatattcagactcttgcaaccaccactacaatctaatttcagaactttcccatcaactcaaaaaaggaacctcattaccatcagcaattactctctacactcccctacccccatcccaccctagcccctggcagccactttctgtgtctatggattcagctatcctggacattgcatataagtggaatcatacaatatgtggtctttagtggctagcttctttcacttggcataatgttttcaaggttcatcgctaccctagcactcatcagtacttcattactttttgtggccaaataatactccattgtgtgagtatacatcaggtacatattcatgcatacacctactttatcatcattttgcagatagggagttactgccccaggtcagaggattactgagtgcaatgctaggcagtctgcctccagagcccacacttaagcctctataaacctccctcccaccgcaaagtactgccctacttaatcccatggtatgaatcattttctagcaaaaaataatatgactatattatatgcatgtaattttgcagaagtatccagggataaaagcaatctgtccaggaaactcgattgatagtttcctgttctcattaatatttgctcattacttatccatccatcctgccatctgctcctctctctagccggcaagtgataacagcacctaatattccagaaaagttaaggccgtaaaacctaaaataaaaagcacacaagattcctgtataactaagaaaaaaatgctattatatgattttattttacttgttattataaaaaaatttcaaacattggaaaaaagggtagtgggccttgtgtatgtcttacccaacttcagttgttaccacctacacctcacccaccctcaaattaagttgaagaaaatctccagcatcacatctttcacatgtatacatttcaattgtgtctccaaaagacaaggatttttcctgtttttgttttattttgtttttaacagacagaatatctgtcacccaggctggagtgcagtggcccaatcacgtctcactacagccttgatctcctggactcaagcaatcctcccacttcagcctaccaagtagctgggactacaggtgtgtgccaccatgcttggctaatttttattgttttttgtagacacagggtcttgctatgttgcccaggctggtctcaaattcctggcctcaagtgatcctcctgcctcggccttccaaagtactgggatgacaggcataagccactgcacctggcctgacaagaattttttctaaatgcaatgccataagcatacctacaaaaagtaaacaaacccttactatcttccaatatccagccagtattcacatcttcccatggtcacacacatttttttttataattttttcaaatcagaatcctgacaaagtctatacatatagccaattgtttgatacatctcttaaatcacttttagtctaaactttcctcctcagtcttcttttctttttttttattttattttattatactttaagttttagggtacatgtgcacaatgtgcaggttagttacatatgtatacatgtgccatgctggtgtgctgcacccattaactcgtcatttagcattaagtgtatctcctaaagctatcccttccccctccccccaccccaccacagtccccagaatgtgatgttccccttcctgtgtccatgtgttctcattgttcaattcccacctatgagtgagaatatgcggtgtttggttttttgttcttgtgatagtttactgagaatgatgatttccaatttcatccatgtccctacaaaggacatgaactcatcatttttttttggctgcatagtattccatggtgtatatgtgccacattttcttaatctagtcaatcattgttggacttctgggttggttccaagtctttgctattgtgaatagtgccacaatagacatacgtgtgcatgtgtctttatagcagcatgacttatagtcctttgggtatatacccagtaatgggatggctgggtcaaatggtatttctagttctagatccctgaggaatcgccacattgactttcaaaaaagagcctgcatcgccaagtcaatcctaagccaaaagaacaaagctggaggcatcacgctacctgacttcaaactatactacaaggctacagtcacgaaaacagcatggtactggtaccaaaacagagatatagatcaatggaacagaacagagccctcagaaataacgccacatatctgcagctatctgatctttgacaaacctgagaaaaacaagcaatggggaaaggattccctatttaataaatggtgctgggaaaactggctagccatatgtagaaagctgaaactggatcccttccttacaccttatacaaaaattaattcaagatggattaaagacttaaacattagacctaaaaccataaaaaccctagaagaaaacctaggcattaccattcaggacataggcatgggcaaggacttcatgtctaaacaccaaaagcaatggcaacaaaagccaaaattgacaaataggatctaattaaactaaagagcttctgcacagcaaaacaaactaccatcagagtgaacaggcaacctacagaatgggagaaaattttcgcaacctactcatctgacaaagggctaatatccagaatctacaatgaactcaaacaaacttacaagaaaaaaacaaacaaccccatcaaaaagtgggtgaaggacatcaacagacacttctcaaaagaagacatttatgcagccaaaaaacacatgaaaaaatgctcaccatcagtggccatcagagaaatgcaaatcaaaaccacaatgagataccatctcacaccagttagaatggcaatcattaaaaagtcaggaaacaacaggtgctggagaggatgtggagaaataggaacacttttacactgttggtgggactgtaaactagctcagtcttcttttctccccacaaggcagcacaccagtattccacaggatctttggaaatcattgaaagttctataaagatgtgtgtgaatatgcgtggcaggggaagtatatgtgtttagatatagatacagcaatagctatagggatgggtacagggagtagccgcagatagactgtctcaacttgtggatctggttattctctgtgtatttctctctcccctttctcactcacttactcccaaaaggccatttcctctacctctttgccctcaataaagcaaaaaaaaaaaaaaagactccaagaaagtggtggcctaagttaccctctgtctttataaaaacatctccctcttgataccatgatccctccttcaatggccaccatgcctccataccctttgacaaagagaattccatatgacctagccagctggctccacttcctctcttcctgccatctctcgaacccaccccatctgcccactgccccactgcaacggctcttgtcaaggacatcacggacctttccgctgttaacccggtggttgacactcacaccaatgcacctccagtgcccagagctgtgcctggcacaggggagtgtttggtaaatgtttgtggaatgaattcacttagggggaatgagtcactatttttttttttttgagacagagtttcactcttgttgcccaggctggagtgcaatggcgcaatctctgcacactgcaatctccgcctcccgggttcaagcgattctcctgcctcaacctcctgagtagctgagattacaggcatgcgccaccatgcctggctaattttgtatttttggtagagacggggtttctccatgttggtcaggctggtctcgaactgccggcttcaggtgatctgcctgcctcggcctcccaaagtgctgggattacaggcgtgagccaccacacccggcctaatttttgtgtttttagtagagacggggtttcaccatgttggccaggctggtctcgaacccctgaaattgtgatccgcctgcctcagcctcccaaagggctggcattacaggcgtcagctgctgcgcccagccagaatcagctgttgggctgagttctgggctagatgctggggatacagaggtgaacaaagcgtatttcctgtctttgaacaccacgttctggggctgaaggaggaggagagtaggatatggaagcaaatgaataatagcacagtgttggagcatgatagttgtcatcaaaaaaagaacagaaatagcacaaggagagtgtatctaatgttacctaaaagaatggggaacttggccttattatattcatcatggcacgaggtgaaagaaaggcatttccaggcaggaagatcagcatgtgcaaaggcactgaggcctgaaaaaatggaggcataagcaaggagcagcctgtgcatgcgctgagagctaaagcagttcagcactgccggagaccaaaggcaaatgagtgagaagacgaggagatgatcgtgcaaaagaagggaggggccaggtgggaaagggtcctggatatgaagctgcaaagcttgaacttgaccctgaggcaatgaagagctactgaaggttttcaagcttggatctgactaatcagactcatattcccaagtctcctctggtgaccaatggggtgaattagagaaagaagacattggtgacagaaagccttgataggtcgctattgtgccagtctaggtaagaaatgatgagggactgtaatggtgcagatggaggagtagatgcaaggatgcttgaaaaggtcagtgttcaatcactgaaagctgtgaaaaggtgtcagctttctcagtggccgtggcaaaagtaagaaacatcatccagtggcagtgatgtcaccagccaagacaaaagtagaccagatctggaggagaaatggtgagttcagattcagcatctgtgagacagccccaggcatgcacggtacagtttccaccgtatcactgtctggtgcccttcgcccccaccccctacagcagcaaaccccaacagcacccaggatcccgacctcccccgagagagatgaacacaccctccaggaacaagcacttccaaacagcaagaaaatcctagggaggaaaaagccaggtctgctcctgagaacttacttgcctttaacactcagcgaaaagggttatttagaccaattacagtgcattgtcttttccctactccctccaattacggctgcttctgagccaccccgtgggaaaaccctgctcaacattcaacttacttctctggaggcttcaggcaggagagagagagagagagacagagagagatcccagtgtgtgcatatgtgcatgagagacagagactgtgtatgggggggtgggtgcatgcattacagagagagagacagaagctttagcgtgtgcatgcatgtgtgcatgagagagacagagattttggtgtgtgtgtgcatgcatgagaaaaacagacagattccagtatgtgtgtatgtgcatgagacagagacagtgtgtgtgtgcacatgcatgacacagagaaagagactttagcatgtgtatgcatgtgtgtgtgagagacagagatccatttggtgtgtatgagagaaagagacagaggcagagagagattccagtgtgtgtatatgtgcatgagcgagacagtgtgtgcgtgcgtgtgtgtgcctgtgtgtgcatgcattacagagaaacagaaatagagactttagcgtatgcacgcgtgtgtgcacgagacagacagagacttcagtgtatgtgtgtgtgtgtgcatgaaagagacagaaacaaaggctccagtatgtgtgtaaaagagacggagagacagtgagacaaagagatcccagtccaccaccgtgaagaacatactatgctcccctccgtggggacaaagccgagacacagccttgaggggcaccaggggtgaggtgtgagttttcaagtgaggaggactctggcttcctgtaaacctctgtgctgagatttcacttcagaaatcagctccactccacaaaaaccaaatctccaaagtcagttccccaagtgacaaaatcttcgagtgagcagttctcctagtggccaactcaccagaaaccaggtcacaaaatcacttgtctcccaaatgacctctggctgattttccagatgaccaaattattgagcattttttttcttacgttttatatccatcgtgcccttcttttggacacagccccaaaccttcccctgcctgcctatttgcacacaaaagcgggagcagtggagggaggacagggggagaagaagcaaggctgggtgacagcaagtcactcagttaacaggctctccagaggcaacctggcctgatttttggcaaacggtgctgggttattagtgaggacattcaggcccaggttcaagctcataggccatttcatgagggtgttaggcccaggaagggcctctgccacaggggacaggcacaagagagcccatgcgccacctccagatgaccagcaggcggctcgtgcatccaccccggggcgttctacacacagagaactacggtctccttaaactaagcgactcctcatttccatgcatcagaccctgggagccacctccaggcctcctggccctttctgcctttgagaggctctgatttcactcccctccctgaacccatggtttctccccggcctccctgcttgattcggagtgagaccatttagcccagagaccctcaaagccagtgccatgtccagggaagccttagagtgtttcctgatggggagaattttctctgtcgctttgagccaagagccttgaccttgggcaggcattgcagaggctggagggtctggtttaccctcaggccttgccccagctgcacactcctggggctaataggagagctgggactggagccatcccaggtcccagcctagcctgagccaaggatgggatggaatgcctggggcttaggtcatcagaccaaaggtgtttccaggctccagacccaatccccacccagaagggagaaatccccccaagacagtacacaggctaagttcccgggcctccactggggcccacagcacacacattcccaaagcaagcccagctaccttcctcttcctgccaccagctcacaaagccagactggccaggcttgtctcacagcagcccccacccatgccccagccccggactgcagccctcctccctcttcccctccctccatctttctccttgctctcctgggatcagccagacatttactcattcaaatttctctgaggctctccccgatggcgtgccaggcagcttcactgaggtgacctcctctggtcctccacgaccccagcagggagtcacttccatcccagctttcaaggacggaaactatggctcagacagttctacttacttgtccaaggtcacacaatttgcaagtggaaagccacagagaactgcatttcattttctctgacagtttgtggggcctcaagtccccttctgctccctgggtccccagtcactgctccaactggccacgggacagtgtcctaccctctatgggaacatctgtacgaacctcagggccacagccaatcaatcacaatgactctcctagcccaaaccagtgcatcatgtctaaatacacataaacgtcggctaggatttcagctacttcaatccagggaggtctaacaatgaaacaccaccacaacatgatcctccccagggcatcctccagagggtcatgaggaagcccatcttcccccgtaaagtggagagaagaggaggcccacatttattacacacacacctcagtctgaatcccatgctgcacatgggcgggagggagccaaagaatgagtccagaaagacgcagaagggtctgaatcccttgcagaggcctgaggcaccacaaagaaaccagagctccatcaacctatggcagaagccaagtcaagagtctgggagccagtgggcagggcggagcaggagcaggctggacaaagggaggccagcccagtggtggagtggtggagaggtgcaggagaggtggccgccagctagcttgtgagcagaaggctccggctggtgcaccagaaggacactagagaacaccaggggtgggcaccatgcctggggcccgcagtgattggctcagcaactcctctcctccatgccacaggcaggagcccctcattttaccgacaaatggcatagaggcccagagtgatcgaacagctgcccagggccatgcttgggcaggtgtgacagtcctatatgatactctgtaagaaaagtgactctaggacctcagaggttgtcctcagagtgccccatactgaccacgtcctaaccataattaaaactggtggtctgctgagcagaggacaggtcctgaggtcaggggcaatgatgctttgaaggaccaaggttgccagctccatgtgctccctgtcccaagctgggctgggcagaggcctgagcacccaggagctttaaagaacaaaacccaagtgcacccacttcctaggcttcccgacatatgccaaaagctgctccacaaaaggctccctctccatgtgagctgcaggcaggaacaaggcgctgcctgcagctcacaggagcagggctggacagagggagggcctgctccaccacctgcggccaggcccgggaactgggctgtgaacatcctcagagactgtgacacaaatggcaataagatccctgtagccccctcctgaaataggacttggggagaccagtgccagaccagagaggccaaaggctctgtaagggaactggcaagctctgggctcagggaaggctaacctggaggggcagagatggtgctgaggaccagggcaggcaagtgagggtcctcgcttggatgctggccatgaggacagccaagcccaggctgaacctcccccgaacacacagtgcttgggcaggatacagccacgaggctgtacaagccacacacacccccaaccatgcaggtgtgcagagcaacccccagtacaggtgccaggagcagggcacgttccctggtatttgcttacaaaccttcactcttatccccacaggtgaacttggttagctgcacccacccaaggcctcccactgcaaccatcactttacaaatccaggagatcaggctggcggtgcagggctgcatggtctcccatccagctgcccctgaagctgtggcccccaggacctggctctcccctgggaaatggagtgcttgttctcagaggtgcagagcaatgctgattgaatgcaggtaggttgcctcttccagtggacactaacatgaacccagagagggaagcaacagctcccagccccgctagtacatgggaacagacttctctgggagtgatttagagaaacaaggaggagacagtcacagtgggtccaggaaaggattaggaaagaatgcctgtgcccatggacacctgaggggtgaactagagtcatctgtccacccttccttgaagtatagacactttaggcatatggtgaaaagtatggactttccctagagaaaaaaacagaaacacagacacacacatacttttccataactatttcaaggagcttatggggtctatgagcccaggggaagaacctctgattaagagagtcatgttgtatccaggacattacataataacaagttttcttaattactcagtggtacttatcttgttggctttcttagttatttattctctgtctcctatgccaggctatagctccatgagggcaggaacgttgaccccctcattctccatgaatccccagaacctagcatgcaaaaggtacacaataaatactcattggacgaatacatgaatttacaacttagtgttgcagtacttagaatttgctggcatggagcaaacaacaaaaagtgaagtgggcttctttaagagcttaatgacttcagactccgcactcgacccctgcatcaattccacatcagtctccgtgggtgcagacagccttagagctgtgtgctcgcccttccattgagactatggggtgagaccatggctgcatgcagaattccagggtctgcgggtgcttccccgtagcctaaccctgaggggctgcccagtggccctggtgagcagccagagagctggcatggatacctctctcccggccccaagcagggggcgactccgggccacggagactccaggcatcagtgggggagcctccacactgcatgccattgatcgccactaatgaatttctttgtggaaaggaacaaactgctccacagtgagactggccaaggccgccccagcacggcagcctggtgtctcgggcatgctaattaccgtgctgtctgagttcatctgatcggcttctgcctaccactgttccataaccgacacactaatctgtccccacctgatggcttctgagcaggccagagatgtactaataaaccttaatgcagactggtgataaaggaagaaaattataacatggagataaaaactgtgatgtcagcttctagattgcaatgcacttagcttcctttgtcatacatttcaaggactattcgttgaaactgctcattgcatttcgggtccctgctataatataatcctgactgctccaccctttctctctcgtgtgtgacaggaattccagcaagtcagcaccgcttgcttatgtggtagatgttacacagatggattctcaaactaacaagtctttgcagaccataagggatatgcgattatttgaatgaattcaggagtgatggtttctttggcatggacaaagaacccctgtgacgggcagcatggtatcaggaaaaggcaacggaatttgttcaacagctttattgaggtaataatgtgcaacatacaataaactgcatgtattaaaatgtaaatttttaatgcatttttgacacatgcatcacacaatcaggatactgaacatactccccaaattttcttgtgcttctttgcggtctttctttccctatcccccaccccagtccccaggcaaccactgatctgcaatctgtcactgtagattagtttctatgttctagttttgtataaatgtaatcacatagtatatactctttttgtcttttttcacccagcctaattattttgaaattcatccatgttgttgcttgtaccaataattgattccattttattgctgagtagtattttatcatataaatataccacaattatttatttatttatttatttatttatttatttattgagatagagtttcactcttgttgcccaggccgaagtgcaatggcatgatctcagctcactgcatccactgcctcccagattcaagcgattcatctgcctcagcctcccaagtagctaggattacaggcatgcgccaccataccccgctgattttgtctttttagtagagacagggtttcatcatgttggtcaggctggtctcaaactcctgacctcaagtgatccacctgcctcagcctcccaaagtgctgggattacaggcgtgagccaccacgcccagcccaaaatgttttaattcattcacttgccaatggacattttggttgttttcagtttggggctattatgaattaagctgctactgaaatcttcatgtggacttgtgccttcatttctttcaggtaaatacctgggagtagaatgactgatatgataggtgtatgtttagctttttaagaaaccgccaaacagtttgtcaaactggtagtgcattttacattattcccagcagcagtaaatgagaattccagttgcctcataaacttcctgatgcttggtatagtcaatcatctttaattttagccattctaatcactgctatgaaatagcatgttctgtggctttaacttgcattttcctaatcaataattagcatttctccatgtgcttgtcatccacgtatcctctttggtaaagtgtctattcaaatattttgcccaattctcactgtgctgtttattattactgagttttaagagtttttatactctatacatgatttctttatcagctatgtgattcataaatatttctcctcagttttggctttttatcctcttcacagaatctttcaaagagtgcaagttcttaattttaataaaatctggctgatcaatttttttattttatggattgtgcttttactgttacatctaagaaatctttgcctaacctagggtcacaatgattttccactgtgttttctcctagtagttttatatttttaaggtttattcttgtgtctgtaaagtattttgacttatttttacatacaggcaaggtgattgtagtatatttcttttttctttttttttttttttttgcatacagaaagttaattgttccagcaccatttgtttaaaagactatttattctttcttcactgaattgcctttgcaaccctgttgaaatcatttgtccatataagtgggggtccatttttggattgtctctcctcttccagtgatctatctctctatgttcacacaaaaacacactgtattgattattgtagctttttaatgttttgaagctataactttgaaaaactaaaacttttagtttactgatcatatgatgatctatgtacaaaactcaatggaatctacaaaaaagctactagcattaccaagtgagtttagaaacactgcagtatagaaacatcaatatacaaaaatccattgtatctataaactagcaatggacaattgaaatcttgtagtcatgtagtgaaatcgaaattgaagtcatgttgtgttagtcctccaagtttattcttccttttcaaagttgttttgaccattctaggtactttacatttccatacaaattttacaattagcaatttctaccaaaaagaagaagcatgctgagatttctattgggattacattgaatctatagattaatttggggagaactaatatttttaacagtaatgagtcttccaatccatgaacacagtatgtctctccatttatcttgatcttcttcaatttttctcagcagtgttttgtagttttcagtgtacagatcttgctgatttttgtcagatttatccctaaataattcccattttgtatgctattgtaaatagtattcttctttattttgatttcaattgttcattgctagtatgtagatacaatggatttttgtatattttttagactgcaatgttgctaaactcacttgttaattctagtatttttctgtagatcccactaaattttgcacatggatgatcatataatcagtaaatttaaagttttcatttttttctttccaatctgggcatctttgtttctttttcttgcctaattttctggctaaaacctcagctacagcactgaatagatacagtgagagtaaatatcctgtcttgctcctgatcttaagggacaagcatatagtctttcactattaagtatgatgttcctcatggattgtttataaattccctttatgaagttaagaaagttaccttatatccccagtttgctgagagttttaacataactgaatgttggatttcatcaaatgctacaacataatcatacgtgttttctttttaagtctataataatggtgaattacgtcacttgatttttgaatgttaaatcagccttgtattactggactaggccctgcttgctcacaatgaagtattctgtttatatattgttactaatcttttgttgaagttcttatgaaggacatcagtttaatttgcttgtcacgttttggtcagttttagtaccaggataacactgatctaatagtataagtttggaagtattctcttcagttttctggataaattggcataaattggtaatatttctctcttaaatatttggcagaattaacagtgaagctatctgcgtctggagttttctttctctgaggtttttaaactagaaattcaatttctttaatcagtatatgaccattcaggctttctgtttcttctggagtatgctttagtaatttgtgtctttcaaggaatttgtctatttcagcttagttgtcaaatgtgttggcataaggtttttcaaaacattcccttatgattgtttaatgcctctcacatctatagtgatgtcacctttctcatttctgaagttggtaatttgtgtcttctctcttgtgttttcccagtcagtctgttcagaggtttatcaattttatcttcatgaaaaaccactttttgtttcatttattttctctactgtttttctgatttccacttcatcattttccactctaatcttcatttattctttcttttacttatattggatttgatttgctcttttttcctagcttcctaggtggaagctcaagtaatttgaggactttctgcttctctaagggacaatggggcttcaagcttcatagccaccagtgtttgtctttcttgatgggtgaccttaatcaagttcaatagcctgcctgaacctcagttttcccatctggaaaatggggccaaaagtacctaacttacagaggtgttacgaaaactccatggggccagttttttttaaacactaaactcaatgctggcatgcagtgattattcaaatgcttcttctttcctgtccccatgacaagcaaccacttcatcacttccttgggtgacaaccccagagcacataagaagcacaccatagccacaaaacacagagatcaatgcagccacaagagagtccagcagatctgatctattcatttagagagaagcaaactgaggtagagagactaactcccaggcagaagcaactgttcctctggactagctttagaggtttaagctggggaaaccaggttttctatgacactcagtgccttggtggacatcccagagaagagccaaggaaaggcagccccaaatcccttttagcttttaccttatcatttgaccatccccagaggacagagatccaggtgggttgtggtaggaaaagtatggtcattgggggcggggcggggctcagacctcttttgccacttgctgtctctgcgacctcagaaaaattacttcacctccctgagtctccatttcctcattggtaaaattgggttgataataatatcaagcatctgataagcactttctatgagacaggcactgagtgttattctggtgccagctctctataccttacaagaaggctatgatgtagacgcctacaggcaacctgagacatggagacattgagtacctcacccaagttcatgctacctagaaaggctggaggcaggatttgaactcagacagtctgcaccagagtctgagtgctaaatcatcatccagtgctgctaattacactatcctcccagggttttatgagaattaacgaatatccctaagggacccagcactgaacgagaccaggaaatgtgagattcccaggagcagccagaggctggggagccccaggaagaacaggtaatgttcttggcatctgtgcaagctgagaagcactggggctactcttggggctgcgctagttccaggggaggtatttatagtgcaagaggcatcacgcctgctcaggctgagctgagcccagagctgatttgcacatggaattggccattatcggctcatttccataaggcagctacatgggaggaataattcaaggagaagttcccaccacccatctcctaaggagctttaacttcacagttgctacataagacacacaactagagatgtcagagtcacagggaccacccccagccctgtcctaattgatggaagggaaataagtcttgaaggaagagacccaccaaaagcccattggtgggtgatggaagggctgggtgaagactccaggaggactccaggcctttgccctgccctgccctgtccatcctctgcagccccttatagcgcagatcctcagttagtactgatgagtgacacacatggtgaagtgaatagaggcgtgagcgtgtatggctcctacatggactgcagcaagttgggcactagttcttcattgcacagatggaaagataagttaattcaaaggtgcctagaaaataagcagaaaagctgcatagatctaaaccccacttttcccctagcacaaggctgagtccctgcatggctagaatgcccgttcagctatgctgatgccatccccatgccaacaagggctcaggctctgctcccttcagggaccagctcattccccaacaaaccaggccagagggaaaatgggagctgcagcccaccaggagagcagcccttgctaggcctgtcctgtccataccttccattctgccaagctaccccatccccctgccagcccgctgtctaagcctagaaacaggttcctttgccaagacccactccctgaggaatagagaagcctctgtgcccaaggcatacaggaagaatgccagagggctgggaggggtggggacaagcatttacagcacctccctctctctcggggcccgagcaggttggcagggctgccctggggctacaggacacatatctattcttctcatcatccatcacccaccactgccaacatcccctattaaagaataaccaaaacagaaccccaaatgtgctaggcacatcagtaatcccatttaatccactatctaagctatggggatggtgccagtgttatctctgcttgatagatgaagatgcaaagaaggtcagagtggtccaactagacaagtggcagagcataagttgagcccagttctggaattctaaccacaaggagccacagcgggaaccaagtgtctgacacagggagatctgtggctgaagccccactccgccaggcccagggctctcctgatccacaccagtgaagaagcaggcagatttgtgaaacacccattttccaccatccaaagccacttccctctggtttcctgcatctcaacacccacaggcacctgctggcactttcaaagctctactccccttctctaaaagtgggggtcatgtctgcagctcagatattatgtgaccctggaatccaggactcaaaccagactcactgtcattcctttcaactctctcgtgttctttggtatgatggaacccctggcctcctaggctagtgatgggacctttggggaacttctgatgtcaaccttcccactccacctggcctaactagtcggcttccaactcccgtcacttcctgctacaaagtggccccatgtgtcttctatgctgtggtctcactgctaccacccccagtaagccctcatcaccatcccagaagtcctgacacagcctcctcattactcccctgcctgtggtctccttttccccagcatccctaccctctacacacacacacacacgcacacacacacacatcacatgcacacatttccactctattccacaaactgcactaaaaacacaactttatagatccctgaccatgaacctgcaatagctccctattacctatgccctgttacctactattgacacttgaggccagaaagttctttactgtcaggggctgtcttaagcgggtgctgtgcgatgtttatcagcatccctggcctctacccactgaggccactagtactcctccctatcccctgttatgacagagaaacacaaatgtccccagacgctgccaaatgtccccggggccagaggtgggaggaggctcttgtgcccactaagaacccctgccctgcaaggacaaaggtcaactcctaacatggctttccaggcccttctcttttgcctgaaaactcacctaaccctccttgctaacaccccactctctgaccctcgtgcttctctgtgctcaggctgttacctcctgggacctctgtctccctctgcccaagccctccctgccttccaaaacccagtgcaagtccaccgcatgccttccgtgactcggccccaggctcctgccttcccttcaaaacacaccgttaccttgaatatcctctgtgtcaccatctagtcgcccacccccaagcaggtcacaaacactatgtgagtgggacacatggtgtgatcctaaccggccctccagaataagaagctctgacatgtggcacttactggcctccatgaagtaaatattcccaccgggactgatttctagtcactgaagtgctgtgaccaaacacagagttgggaagaggtggcccagtggctcacacgagcccctgtgcacaggctccagtgcaccccacatacctcctccctttgctgcccctgggccccacaacaggtgtgggggcccatgaagcctggctgtgctggtgtcagggaggggctgggcagtgccccatggctacagcctggctctgtagccaggtcctctgactgcagtggcagtagccaagacctggttaggtcccagatgaaccaaaggcacccctgacatgcccatccccatcctgcaggtgtgcagggcccctggagctcacctggctctcccttccctgcacaagccaggctagaaggaaggcctcaggaagaacttcaccttgagctgccgaggccctccagtgaaacctcatgccaacttagaagaaaagagttaatgtattgatctttcttggtgactgttagtaagattcatagctagcctcagaccacattcatctgcacctctaactttaatgactacaggcacttcagatgtgtgggtgttcacatgcatgtgtctatgtgcacatgtgtgcatagtcgtgcatgcatgcatgagtgtgtacgtgcatgcatgcatgagtgtgtacctgcatgcacatgtgcatctgtgtgtgctcaaatgcatgtgcctgtgtgaacacacatgcacatattgtgtgtgtgagaaagagagctccagatctctgggctttttatttctgtcacctctaacctagttgctgaatcgcacaataagcatctgctcaggcctgttacatgcatttgatgccacagactcaaagtcaggtaaagcaggcttttcaccctggaggagcttactgtccagagggagggagaaaaggaagtcagtaattatggcccagtaacctggggtgagatgcacagagggcatctgtggaacccagagaagggacagcccacctggcaggggaacaaggagaagagaggaaacttccaaaacaaggagacgctcaaataagtcttgaggatggaggaatagctttcaggcagtgaggtggctggtccaggtcggggagccatgtgggatggtggggtgtgactgggacacattcaggaaggtgagtccctgggtgtggtggggagtgcagattgcagtcacatccatcccccaccctcccctgttcttccctctagagtgcccacccctccccttcccagactccctatcctgctgattaccactgaccactgagaagcatggtcaggagactcaggcacaggaggaggaggaagccaggtatttcaccctctctctgcttccagtgtctctggccatggttgggtctcccacatgctcccagttccctcagggtggcccctctatgaggtcccagtacccactggacagtcatggctccaggaccatctctcccattcatccctcgagccctgggagtcactccagccctgcccagttgttagtctgggctgcttccactccacctgtcctcaactctgccagcacttgtcagtagttcctcatgttaaatcccctcctctgaatgacctggagtgggccatgtgttcctgatggcacccctgctgatccatcctgcgtcgctgggacacagaggtcttgagggagtgatgagagaaaggccagggagagacagaccttggaggccctgtgcactgcgagaagggatctgaacttgatccttaaggagagggggagacattcaggggtctaagcagggcagtgagttaaggaaggtgactttggtggcagaatgaaggatgaatggatgtcttccaaacagtgtggcacaaaaatgcccaccacacacaaacacatacaatcccattgcagcaacacacacccacagacacctgcgcacacacacacacatggaggctccaagagacgacattcctctcccaacaccctcagaaagccaagtggaccaaaggtagaagcaacccttaagtgtccatcgatggatgaataggtcaataaaattctgtctatccacacaatggaatattactcagcctgaaaaaggaaggacgttctgatgcatgccacagtgtggaggaaagtagaaagcactatgctaagtgaaataagccagtctcaaggaacaaatacggtacgagtccacttatatgaggcccctagaatagtcaaagtcaagagacaggaaggagaacagtgggtgctgagggctgaagggaggggggagatgggggtctttgttgaatgagtacagagtttcggtttgggaagatgagaaccttctggagatgaacggtagtgactgcaatatgactgtacttaacaccattgaactgtgcgtgaaaatggttaacatggtaaattttgtgttgtatatatatttttccacaataaaacaaaaaactacaaaagtaaagtaggaacttcccagagcacaggtagaatccagcacacaggaccagggccaacaggtgatgttcacaccgatatatgtggtgattccacagaaccacaggggtctccagcaacaaaatccttaaaggccccacagtgaggatgcagcctcccagagcctgagtcccaggcctaaggctccactgtgtgtgggtccctctgcaaacagaatgtgtgagaggccagagcgtgtgtctcaggagagcccgggaggatgggaagcaaggaagacagaagagaaggtgaggcaatgaaaaaatgcctcccagttcccttagccccatccagcctcagcatctcctaacttggggcctcaggagctcaccctacctgcaccctccactctctcctcattcccagggcatggtatccagaacgcactcacctgtagctcagggtggttggggtgcagtcaggagagtgagggcttgagatctgaatcgccacctgcagctggggtccccccagcctgctccttatgtgacctggtggcagatgcctaccttgttgagttactataaagaccaatacaggaactgtggttgtgtgcctggcacagagtaactacacagtgaatgtttgattcccttcctttaggagaagcaacgcaaggcacgttattctctttatgatccattagcaaagctcaaccacgtggcctttggtgggcctctaggcctgaggaaaccatgccagggtctctagggagaacctctatctcatgatggccaatcatccaggggcttgtgggcacaccagagctaagaaccttcctgccatagtacccagggtgggtccctgggggacagaggcagccccttccagctcaggtcaactctgacagttggaaagttccttgacatactgcaccctattctctgcaccatttcctcattagtcccattcctgggacccctcagctcacatcagcccatcccccagctccaggcctgtcagagacctcagaatccctcctttctgaattcctgccagcttgtctccattccaccagagaggcatgtccctcagtgcaggatacaccaaagggaccacccagccctcaccacctccctccctcccttccactgctcactcccactaccgctcactcccaccaagctgcagataattcaatcctcaaatcgcttctcacaagagctgctgccgacctaagtgggcccttgctgcattttatctggttctctgattttggattttgtccctgactttctgcccaatcacacttctcagcaagatggcacccaagaatggaaacaacaggggccagaacaaggtctgttctcctccagaacacttctcctttctctgccttattttggtaactggcatctcatcactgtattctagcttcctaatttgaaaacagaatctcctgcagcccagccgctctgctttctagcaatccaacccctagaagtacttagagatacatgcatgaggatgtatccacggctgcgcactacagccctgtgtgacggccaagaactagaagccacctgaatcaagacatggaggaataaagcccactctgcagaatgttgtgcaacaggcaaaaagaatggggtagaaccaagtgggcaatatggagcaaaagctgcaaagcccatcaagtaaaagcatgtcaccaaacaatgcccggggcatggttccccttctgcgtctgcaaagcactgtatctgtgtgcacatgtggcatgtccaggcaaggcctttactcacctcaagagaggaaggcagataggtgggagagggagaacacgtgcctaatgggtgcttgctttgtgttttaaatgtgtatgttgttttaattttttcaacaagagtatattcattttgtgtatgacttatgtatatgatacaaataatttcaaagcaaaaatcccaaagcagggtggtctccccttccacatcttcccactccccttagaacacaaggcagcccctctgccctgctggaacccctcacattgggctggtctctgctcagccctcctcaccccaacaggactgcactcggccaccaatgcttatgaaggcctcccccagctctgctacggctctatggtgagcactgcacagcccccctcacaccccttgtcccacttacagcagttcctgtcagggcagggaccatgcctgccttgctctcctcctgagccccacccagcacctgggactgcaaaggcctttggtggacatttgtccaacagaactaaactgaatggacacatgaagcctcactccgtgggcagcaaggagtgccagaacgcacaacccttgctatgacccgcttcaagtctggcccagaggaagcttaggcagaggcaagtcctatccctacccttccaggaatggtaagttccagcttgggatcagctgagccatgagagggccacactgcacagtcagcgactgtgcttgactgagaaacagccaagcaaaacccacttctacatttgctgtaaaggttgagctggaattgccatccattctgtccttcatggtctcctgtagagatcaggtccctcagggaggattctttgcagtgctgaggggggcctggtccctctgcttcctcccaccctgtaacctgtggctgccagaatagcatgaccacagccgtccttggcacctcttgattttctaatgcagttgctttcttaacctcagtgtctctctaagaagacattagaagcctctgcaaattctctctggatgtgtgaaggaaataaacaaataagcaaacaggcagacaatgcaacctgaaacaatcaaaccaaaaatcagaggcagcgtgccaggttcatgtgcagcctcctaccctggctgggggttggcagcaaacaagcccccgcggcgaccacgccatcaggtgggtaagaggataacttccagcaaggaactgggtacgtgaagggctgagaggagacataatgttacccacatggctgtgtctgggcgtgacccccaccttttggttctaagtggccttgtcaccactcccagagccttccacagaaaatacggggcaggcagctgccacctggatcaaaaccaccaggcttcctgcagtccagaactagtcacacaagatacaggcaatttcatccttttaacattccagagcaatgcaaccagagagaacgggcttccgttcttgagcatccttactacacaggagaaagttcacacagaggacaagcctcgacgtcacagcacatgcctcacatcagaagaggaaaaccctatgacagacacgacaacctggcctctgagaccgctagcacagcttcccttccatggaccccttcatcctttcccataagctgctgaccctccatccctcctccctctcaaatatgccatgccattcacaccctggcattttagtcacaggtttcctccatctgcagaagccctcttgctcccagctgtaattcaaaacccactgcttcccgggacagagttggggctctaggcttcagggctcctagcacagtttgttcagcgcttggctcaatcacaggccttgtacccagcattgtcctgggtactgcggaggagtaagaaaaacgagaaatggtctgggacctcagggagtgcaatcactctcaaatccatcacttcatttcatttcatttcagcctcacaggaaccctccacggtaggcgtttttattatccccactactaaagtgggaaaacaaaggatcagaaagagttgccagtgtgcccagaagcacgttagaaaaagataaagccaggaagagaactaagtcttccaacacaagccaggctcacccaccagacctcagcagcaccattgccatctcactgtgattcatatgtgttttgtagtcattcttgacttgaagctatgggaagaactttctcaggggctggccacatctaaactacattccagtcctgacccctggcatacacaggcagtctacacacttgacaaggaggaaggtatagacagaaacacagcaggctgaacaagccagtgctctactgaaagtggaggagggaggggctttgcctttgcacatacttggactccataggaagcatatattactgctgtaattggtaaactcaaggaaagaaacaaatgcttctgggccaataaatgggcaatgaaacacccccaaaatatcaattcactcattcactcatcaaatatttaatgagcacctactaagctttaggtgctgttctaaatgctgtgggtccagtatcactcaaccaagcaaacaaaactgcctgtctgcatggaactagttggggaaagacagacatcaaaagatgagtaaatgggaataaattcaatggaaaaagggagaaagaggtgccaagagaaaatagagttccatttttaaataaattggaaagggaaggccccacgggacagatggaattgaagcaaagccccgaaggtgcagcttgcagacgtctgcacgtgcaggaagagtgtcccaggcagaggaaacagccagcccaaagcctctgcagcaggttgtgccgggcacgctcatggagcagcaaggagccggagctggaaggcagcagacagggagcaggaggaggggaggtcccatctggactagtggtccttccagaagtctgcagccacatctcgctggtacccttcctggaattctagtatttaacaacacaacatctcccttgttccctctcatgtgtggagcaaaggaggtctggggagtgtgggtctggcaggagggggatatcaacaggagcccgcatcggtcctgcaagggcacaatggtgtgtggtgagaagaggaaacgggggacgatctggacaagttcttgctccctcaactccagcaggacccagcagcacaccggggcatgtgtgggagtcggcatagcctcactttccagtcctttatgcaggcctgcatcaggcatctcctcatgtctccagacgcactctggaatctgatggaggggtgagggaacttcagagttaataaactttaatcttctagggcacactgcaattaacacaccccaaagtacagttactttgtaattagatcgaagaacaaaacccaaaacactcatccaggtaaagttattgtcaaacttcttccataggtttcctagcaattaaactcacttactcattttgtctggaaaaagtatgtattacttcaatttaaactaatgccataatgatccaatgtgtattattaatgagatcagcatggcagttcagtcatctggcctgctttgccaggggccgcaaaggagacgtcagcaaggggcattgattaaagtaacatttgccccgataattccctttcttccacggaattttacttcaggaagactctgggggtgagatcccgacagatattttctatgaaaaccagttaagctgtccagcttagaaggcatgatggctcttcggagccacctgtgactgtgcaaggagaccttggggaagccttggcagctcagctcctccatagggcaaggtgtgtaacctgcaggtgaaagagctgacccccaagctctctctgtttccccaagcaccaagaacacaaccaaaatacagctgtgttctgggctgctgaacaagccaggactgggattcaccaggtctgccttgggaagccaaggaagaatggacagcaatgggaccactgctgggcacagctccagagtagtaagtgttactgagcagttaccacgcgccaggtactgagctaagcccctgacatctattgactcatttaatccacacgttaaccccatcaggcagaaagtagtattgtatcgcaattttacaaatgaaaaaactgttgcacagagaggttgagtaacttgcccaatgtcacacagatatggcagcggagctgggattcaacaagaagactgctctggagcccatgcccctaactattaaacgcaaaggttatcctgagcctgactggaggagcaaactgccaaatctcttgcaccaagattctaccaaggttgcctagtgcccacacgcactgccatgagggaagaatgttggttcctaccactcttggtccccatgcatggtttgttgtgatcatatagaccacttaccatgtgccaggcactctactagtgttttgcccttacagctcagaaattaccctatagatgaagaggctgaagctcagagaagtcaccttgcacaggaagcaggaggcagagaggaatggcgatccatgcttacttttttatttactcatttattttttgcacttgatgcaaaactcaaaaagtacaagaagttatgcagtgaaaaattcatctcccatcccagtccaacccactgtgtttcctttccttaaacagcatttccttggagtgaccatgtgtgtccactcagatacacacacatagaagctcacttgtacacaaagcaacacccacgtcaccattctcacttctctattgtcagctaacagcaccatgttttggaactacttctactcagtacataaggaactagagttttccattacatgtaaatatcataatatatttaaccaatttgctgaagatggacctttaggttgttgctaatttctgatgtcatcaaaaatgccacaataaatctttgtacatcaagcaaagactctaccacggtgtttgctccccacagctttgccaagaggctgtgaacagagctgtggaccctttgggaaccagagctggccagcccccaactctccagccatatggcctagagcaaatccctttacttctctgagtacagaacccaccatgtggggttgccattgggatgatgtgagcaagggcagctccacgctctttcagggcacccagcatgaagcaagggctagagggacttggagctgttacccgctggcatgacgcctgggtcatctgggaaattcgggtcctacctctagcttagactctgggactgtggtttgtcctaactcggatcatcattcctgagaatgtgtcagtttctgcccttttgtttgcagagaatgacttcagacaggacgcagtgaaaggaccagagccttctagagatgaaggctttgcctttgtctgtcttcaaatctctggatggggtataaagaacaggacccaagagtgccacccgaggtagcaagatatggctcccagagatttctggggatcctgagcatctaaggcctcctccgactgtctctccagtcttatccctagccaattcccatattccagccatatgatctttcctcctctccattgcccccagacctttcctctggaaagagggaagcaagttcttccctctgcttagaacactcttcctacagccctcagtgccctttgcttgcctaacaaaaaataaaaactactcctatttaagcacctgtttaaatgtcacctccagcccccagtgccctttgcttgcctaataaaaagtaaaaactactcttatttaagcacctgcttaaatgtcacctcctccaggaagctcttcctaaccaccttgccataggctgcactgaatttgcatgagctttcttcagttgccaccaaggaaaagactggcccaaaggcatggcaaagtggagcagtgtcagggtggaaggaatatcagcccacagatgctgagagaggtaggcttgctaggctcgcagaggggcaggggagggcaggcacagcctggccaggccatagctgtggacacctagccaggtggacaatatctgccctccatatagagagggaggtttcagcaggaaaatttctttctgacattcaggtaggaaaggacttcttaaacaagacaagcaaaagagctagccataaaaaaagatgactacatttgacaacaatacaataaagaatttctgttcactaagacaaacaattaacttaaagaagatattgccacacttaaaaagaaaaggctcgattttaaaaacaggcaaaaaaatcaactacaaacaggtgtttcacaaaaaagaaaataaaaatagcccataaagatgtgaaaagatacccaacctcatctatcatcaagaaaatgtacattaaaatcaaaataaaattacattttacactagaaacctaaaagtaacaagaagacaagtgttggtgaggttaggggacttggggaaatctcatatattgcacatggtagtgtgaataggtaggaatgctttggaaaacagtttggtctaacctaataaagtgaaatgtgcactgacccaagagtccagcaattctgctcctcagaatagaccctgaaaagctcttgcacacaaacaccaaaagacaaatatgagaatgttcctatcagtatttttggtaataacaaaatcctggaaacaacacaaatgcccacagacaataaagtagataaataaatcagggcacacagtgcagcaataaaaatgattaatacatccacctgcatcaaacggatcaatctcaaaaacctaatgctgagtgaaaattaaaaaacaatctcagaagcatgcagaagtgttattccacatatatgagtcgcaaaccaaccatgggtcccatacttgtatgataaaactatcaaggaatggagctgcaagccactatcctgagccaactaacacaggaacagaaaaccaaatatagcatgttctcacttataagtgggaactaaatgatgagaacccatggacacacagagggcaacaacacacactggggcctatgggagggtggagagtggagggtaggaggagagagaggatcaagaaaaacaacgaatgggtactaggcttactgtcttggtgatgaaataatgtatacaacaaactcccatgacatgagtttacctatgtaacaaacttgcacttgtaccactaagcctaaaataaaagttaaaaaaaaaaaaaagacactggcttgggatcctctaaaacagtgaaatacatgtacagtgttttaaatatatgaggcataaatttaaaatttccatgcttagatacaacttggcaaaacttcagacacataaaaagaaaaaaaaactatcaaggaaagcgagggtcttgttagcacacaatcgggagagtgtttaagtccctctgtaggggagacatggtcaggtgaagcacacaagggctccttgatatttttcaaactgattgtgggttcatgagtcttcaggttattaatcttttaattaaacatatacatcgtaaccatgtgtagctttcaattaaaaaataatttttaaactagcacaaatagacagtggccactcaaacagagccctgatgttttgtttctgtggaatcccagctcccaacccatcccaggtctgcgagctagcccagagaccaagaaaggactgccgtgccctggagatgcccctgggcccctggggcctaacttccaatgccagcccatgcaacattagccaagttactccacccatctgtgtcttcactgaaaatgagtgcctagcaaaatacctggcatgcggtagggattccgtgaatattttttgaatgaaggagtcaatgatatctaagagctcatcataattacaaccttcatccaaatttattcactagagggaaattgtggatacagctactagcacccccctcccacctcggcccctgccaatgcatacacacatgaatatcccagcatttgaagtggcaagtcagaaagttctccattcttttcgatccaaacttttggtattttaatgttgcaaattttctctctcaaatgtcgtcttctcttttatttttcctttcactgtcataacaagcatacaagtattttcagtggaattttaccaaatagcacatcttgtaaaccatatacataccaactcctctctcacccttctgccaaattctgtcttggagcccatggcttttcctgctctgatttctaactcctggctcaaatgcccagtcctcaggctctacctggggcaggacattccagggtttaaagggaggctgatgggcaaatgaggaagaatcaggccttgccccacaaaggagggagcctatgtatgatgctcactaaagtgactgcatcagcctagagcatgccatgtccttccaaactacctccctctttcttggcatcaactctgactggctggggacaggagcaggaagctagagcctagtaagtccaaattacagaaataggatgatgccttggctaaatgcatgggtactaaagtcaggaagaacctttctgagcctcattttcctcatctgtaaaatgtagcaataatctgacctcagagggatgttgggtggctagaatgaagtaaaatacataaaggtacttgcagatcagcattgaaaaaaagttgctatatttccaaaccacttctgtttgactttggaaagaacagaatagtctttacacttaatttgcttttgaattgtgctcatctgcagctagtgctacagtgagtcagtgggaggaggggccctgaggtgttccagaggcaccgtttgtcttggctgtattagcaatgtgtatccacctaggagtgacactgggacaggccacagccagccatgccgagggagcagccacacttgcactccgagggctggatgtgctgcatcaaacagcagataggctgagctgccttggctcacttgacacaagcatgttggaaatgggcagcagctgggctgggcatgaggggaaagccaggacgagcactgggcaccgggttaaaattttacagaaaatgtgtagaggcagaaaccaagcctcaatgcttgtcatatcaggaggccgatgaccagggcaggcaaaggcaggaggtcctgcacagaatccaataaaagagttctctggcctccagcaagccgagagccagaagggctagcaccctggacagcgccatgagcacaccactctgacgctgtcttctgactgagaaccccagctctggggttctccgctcacctccaccctccaggtctgaaccagcaaacatgacaggtctctgccaatccctctcttgcaccatggaagcctcacagactgatcatggtgttttctgctgctgagcccacacacggcctcagaatccttcccagcacagctcccaagcagcctcaaccaaccagctgcagtggtcctccagatgaaagctactggtcacttggcgactttatggaattactgataaggagcagtctggttggaaactaacttcaaccccaccaaaggtagcaaaggtgtccatgtcagaaaagaggaacacagcttttgatcacattggagattctgggtggaggaaagaagaggggtgggggagtgtgactgtagaatacaacctgtttcctagcctacaccccttccctgctacctcatagtcagaggtcagaccatccagtacccttgtccttctccccattcctcctttgttttgtgtgaaaatggcttgaaaactccatgtccccatccatgaatgtgtcgaggggctactctatgccaggcaccatgcaggctgcagggccatggtggtgggaagcacacagccactctcccggacttcactgcatcaccaggcagtccagcactcatggaggactagccctcatgagagtcaggacaagccaagagcaggctgagggcaggacgagcatgtctgcgagagcgtgtaaccaagctgccagctctgtaggacaggtggggctcagggacacctttctttgaggacctgcatcttgagaagagtgagggtaaggagggtaataagaaaacaggacttgggcaagtgccaccaggccttgttcagtctgcaggagtcacaggagcccaggcgggtgggcaggctagagagctgatcacctgccctcccagcggctgaggctcccatcaaggtcgcctcccaggctctaggggaaaactgtgtctgcaggccagattggaaacagagcaatggtgcccagagaaagtgagatgggaagggcctgggcacactggaccacagcacccccatccctggcagtgtccatgcctctccacagggttcagcctcagagcaggctggactttggggttgagccaccagccccaagggttctcggggaaggcctggcccctaagagatccctgcaggcagctcggggctgttacaaaatctccaactcctcaccaagggccagggactgagcaggagtgggagggtgggagggagaggccaggtcctggactgagtccagttcaggtcctgcccttgtccccatccacctcatctttatttcagcacagtgactgtttgctctttcaattcttcctggaagactccaaacagcatatttgctcaagagctgaggacaacattccagtcttagagaagaagagtatttaggcaaatgcaaacatatgctgatttcttttcttagttacattcttggcaaagaaattatatcacccagagacaaaatgggacttttgaaggtccacccattccatcctggcaccagccgtggggctgccaaccctcatcagtctcccacaccctctaacatgttatggaggtggctgtggctataaagaggtagcacagggatccttgtgaaggaactgctctgtatcctgactggtggtcataggaatctacacatgtgatttttaaaatgcatagcagtaaatccacacctgcaagaacacgtgcactactgaaatatgaacaaggcctacaggctgtatcaaatcctggttgcaatattgtactacagctatgcaggatgttactgtgggggaacctgggtgaagggcacgctggatctccctaggttgctccttataattgcatgtaaatctaaattatcacataattttcaaaaaaattgtttaaacactaaacatggaaaccattctatctcaggattaagactagtctgtttttacagagcagtcataagaaaacctgaagccatttctccaaagcccatttttgtggtttcctaacaagcaaattatgattttttttcatatgagaggtcttcaaagaagccatgcccagccctacccagtgttcccaacccccaaccccagcctggctccatgacactcagggcattccgtcccctgacctttgccccagcctggaaccctgaaactgaaggcagattgcgatggatggaggcaaggagccaggaaggccaggcaatcgtccagtgtgaagggcactctttggagaggagacctccaggaggaaccatgctttccagcctccatctgtgccagcatacagccctttggatccctgccagcagtttattaatattttattgaaacctctaagatgattcaaacttcagccgtcatgataaggtgttgttgctaggcaactttatacctatctatggagctgttgttgcagctcttcctgactcatgaagctcgaggtttgaccctatcacctggaggcccactcagcacagaccacccctgaccggtccagggccccacccactctcaggtctcccagcatctggccatccctgtccccaagcagccccagctcgcctgccggacaactcaccatactcgctgtcgtagaacatgacgaacttctgccagcgcagctccgtcaccagcctgagcatgacatcattgaggcggacgggtggtctcgaagccagtgtgtaggcctcaccatcggggctggggttcaggtggcatgcggtgcgtggcgaccctcccgggttgcgctggacaaagaggtgtgggatgtgcatggcatccgtgagggactgcagggcattggcagatgcacagccagtggacgtgaccaaggccaaaatcccctgggtcatgaggtcacaggctagaaagagagaagagagagaggaaggggtcagcatcagggcgatgctgcaccagcttcaacctgcaggccccatgcctggcagctcatgcccaggactcccaagagaggctgcctccctccaggaccaagaaccatcctgggcaggccagtggctctcataagcacagcctcactgacatccttggtgaaaatgccagctatacattcttgtacccatttaacatgagaaaatagaagtcaaaacgggcaaaaccatttgccctaggctagtcagggaaggatggtagagcacagatccatcccaaatctgcctgattcacccccactgagctgtaaaattagccatcctgtttcccacctaggactataagccctttaagagccaaaacgtcattgtgttgatctgtgcatcctcatgcctagccacaggcagagaatatactgtgtgttctacaactgttgactgaactgaactgattgggactgaagggactaaatggcttctgaaagtcagagaggtacttacccaagaggacccaagatgtaggaaaaaaataaaaaagaaaagaaaccctaggtcttctggccaaatccaagtgatccatatcacaaaaatactgggccaaaccccagatgaagcagttgttccagaaggattattcaaaagccacttgacaataacaaagaaagacgttcccgccactcaggcagttaccacgggtgtggaggaggaacacagcggacgctccagcagccgcttctagggctgacacgctcaggggctcatctttacaagttctcctgtaactgcaagaggcgccccttgtagccacgtgcgtacacttttttgggacatcaaccaattaatagaaagatgcacctcccaacgctgcaacccactgcaccagttttgaagcaaacatctcttactaatggtttatgcgatggcaaggatgtggagaagcagatgcagtttctttttttttttttttttttttgagacggagtttcgctctgtcgcccaggctggagtgcagtggcgcgatctcgactcactgcaagctccgcctcccgggttcacgccattctcctgcctcagcctcccctgtagctgggactacaggcacgcgccaccatgcccggctaatttttgtatttttagtagagacggagtttcaccgtgttagccaggatggtctcgatctcctgacctcgtgatccgcccgtctcgacctcccaaagtgctgggattacaggcgtgagccaccgcgcccggccgcagatgcagtttcaaaacacaggctgtgaatggcagcaggccatctgctgcacacagcagactttgaacaacttttgacaatgcagttcttttggtcaagagcccttgggtttatgtaatgcctcagataaggctgggagagagagagaagaaaagggggaactgaccccagggagcaaggcagtgggaggcaggggaacatgtgggaaggggagggtccccccacactctccagcagcaaagaccggctgccctccatgcaagggcgctcgccttgcacctgcatgagcaccagcaggaagagaacccaaatcctacggttctctcctcttcaaggccaccggcagggggtagctaaacaagagatgatgagatcttgtgaatctcacagtcccccagatgccctggccccctcctaccccagctccagtctgctgagttctctcctaaacagaaatccattgcgtgccctgctgtgccccccaagagcctagggataaagtaaaagcccactcctgaaagggtggtcttgcaagctcccatacctgcagcctcatgctcctcaccacacccttttctgctacatcccaaccaactgcccaccctggaccctcaaactcacctcttcaatcctgatgctcactcttgcttcaaaactcagactcagcatccccagactggctcataacccttgtggcattatcccccttcactgcacttccctgtcatgagccacatgttgcctgtgttactggctggctctccaacttgaccccaggctccaggaggaccagggtcatgcctgctgtgttcaccatcctttcccagacacaggctaagcccagttcacaatagcagtaaagactcgtgcaagaacaccatgcaagaatttccatggccccagtcaataattcctctctgggtacctgtccaaaccgtaggaacagcactcaatccaaaaccattcagaggacactatccatactcttggaatattgctaatgatctaaaagatgcaaatagatgagtggttatgaaagtgccccattttctgaaagtatatatagcctttaaactagtcaagaagatactacaataacatgggaaagtgcctgtcataaaaaaggtaggtgaaagtgatacaaaattgtatgtattttattttatcaattaaataaaacatcaacatgcatgaaagaaaaaccagaaggaaatattgcaaaatgttaaaagtgactgcaatttagaagaaacctgaaagtggttttcattcttttctatattagccaaaattttgtgacataaacagataattccttttaaaaagaaaaataatcctctgataatggataagcaggaaaactacacaggaggaaggactattgtgtgagaattgcctctgtgccaaattctcttggcgtcctttgtacatgtgaattcacagtattctcaggacatttgtgtagagtaggtatcattgcatccattttccagataatgagatgtgaggccacacaacgaacactgccacagacatggggaaaatgcttctgagagatggtcacgtgaaaataccagggcacaaaattatatgctaactatgattacagctaggcagaaagcacacccatgaaaacagcaagagaaaacactaaaagctaaggcactatgacaatacgtggatattttttcttatgcatgctctctttaatgccaatacaatacatttataatcttaaacagcaattgtataaaataaactgtatatccctgggacgtaaattgtccaggaactccaatgctcaattgtggaattgtcccatcccaggactcccacggagagtcctccttgcagccatcagtcacttttggctcttgttgccccacctgcctggctccctcccaggtcatcatctgtccccactccatatatgtcaggttctgaagtggcagaacctctctgagcctcagtttccccatctgggcatgcatgccactggctcctgccctccttgtctcatacatacacttggtatccctgcccacaccccacaagccagcccctgccctaagcactgtcagggggaagagcaggatgaccacaggtcccatctttgaggagcttaggatccactgaggagacagactctgcaactcaactggaggagagagaaaggaagctccctgggacacagaggagggtaaattcatttgtggttggcaccagggcctcaaaggaaggaagggacttagaacctttcagggtctcaggagagcagcacaaggtgggtgcagagtgacaaagacatatagccgggctgaaccctcaccagctaccacctcaccaggggtggtgggaagagcattcggatctcaagcattcattcacccaagttccagttttggctcctccggtcagtagccacacagccatgggcatgtccctttctcagcctccattttctattaaataggaataagaatctctacccagcagagctacgagagcactgacttaggacgctgatagcaagtgccaatgcctcacagtgcacaagatgctgaacagatgtcagcctcctgccccttccttggacatcccatctctccaccaaagtcatgcccaggatcttaagtactagtagtcacaggcaagagccatctcgccctccccgtggaggtgagcactgccggcccacccctcgtggagccacctgcagcgttgtaagcgccaggcctccacaaaaagggtgggtaattaaggctggaagcctctcccaggcgctaatggagaggcccgatgtgagtcaatttccaatccactgtgaatggcctgctaattggggcactgttgaaatgatggttatttggaggcttctaacataaaaataataagatcaaaatacatcagatcaaagccaaatcagctattagcttaatcaaggttgtgtgtgatgggatgttacacaatgcatgccctggttgttgtgacagatgctgaaccccaggactgggactggccacctggccggagtccggggcctgccctggtcacaagctgggactgtgggtgagggctggtcctctctgggttactggttggctttctctttatttctttctgtctttctttctttcttcttgggggggtcaaataaagatgatggctccctcttcacagggctgctccatgtgtgccatgaaaggtctttatatgtggacagccattcatgctgcctggcacatagtagcaactcagaagtcatcgctacctaggatgatgctcaaagatgtttttacagctctctagaggataacagcttttgttataattctttgcctccatattatatggtcacaaagctgatgtctctcttgattacaacacaggcttgatggactgataagggccccctgagaatgacccatccatcagctgggaaagtaagtaaagacaaactgtaatgagcggcttccagcccccccacctgcaccctgtgtcctgggaaagtggagggtccccacaaaagaaagggctactcagagctcggcattgggggtgtggggggtgcccagacagcattcgcaatacaactgcacaatccacagtcacattcccacctgcttccctggagaagatgttcacatcccacccatccaggcttttccagacagcggactctcaggggtgggacatgtcaggtgaggtactggccacttcacagaacaaactctcagtaactctcaccccaggtgagctttctgatttccctggttaaaaaaaaaaaatcagagcacagagagtgctagttgcttggccagggccacacagccagagagcaaacagcaaagagaacaccagaccaccaggcacctctacatccaatgctgcaaagagaaagtggccagcaggggacagaacccaggattccaggctgactctacccaactgtccctggatagaaatccccagggcacctcccggctcagtgcaggccccagggaaggagtaggcaggcaggaacaaggcctgtctcccctgaaagcagatccttgactcatcaagtcactgggtgcctgcaggtgggtgctggaggtgagaaaggtgccctcagacattgaggtcactctaggcgccatcactaatccatgcccactattctccatccccgtggggatttctggaacattctcagaacaaggctgtgggaagcaataccccagaaggcatgtgttagaagagacccacggttcctggtgccaccccccagtcacgacactggccactgccagctcagcctttccctctgtcaggtgccctggaggcatcgctccgcaggcttgctcacccaggaagaagatctgcccatgcagcccctgcaactctgaggtcccaagccccctcaaccggcagctcctgtgttagctggcccctgggtgccaccttaaagaacagcaggacatttccaaatggatgaggcaagagagagcctccacctggggagaaacaacctgatgccctaacctcagaggaacccagcaaggctcagctcctctccacgggcagcagaaaaaagagccaggctctgggcaaacccgggctcagccctgcctgcccagaaggaatggtctctccccaagggagtccagcacctctgccgcccccaaggctgctccacgagccacctcgttcctccaataatcttaacctccacgagcacccacctgcccccagccaccctcattatctgtactcttcctttcttcctttaaatgggaaacagctttattaatatttgaattccaatggctaatgctttaaattaaggtagcatttataaatactttagagctgataaataattgaccaaatttagtattgtcataactcatagtaaattattgatctatggagaataaatacgtttcatcttttattaagacatttaaaaggtaaccaaaaccataaaatggtggggggatgggtggtggtgctgtaagaggccaatgctagagctcgggccctggagtgagctggctctcccgtccctcctgcagaagacgcctccctccagagcacaggacacacacttgacaggcatccatcctgtcccacagactgtgtttcagtgattctctgcccactttccaacttcccagagacctgcagcaaccccacctcctgccttggagcctgctttcctcctctccagtcactccattacagaatccctctctttccttatgtagcctggctgctgaaatcccaactaggagtcaactcagggtggatcaacctgcccacgctcctccacactgccggcaagcagtgcagggccacagagagtaccacgcacctggcaacttggtgaccttggccacatggcagtcacccacctcagcagggctccccacgctgacacatctctaccacctccctccccgttcttcttgaaccacccaggtttattccccaagttcaacgaatgacttacatcctttttcatgaatcagaagccatcatcacaagctatctcgcatgacttcctgcctccagagctccacacctccctgtctgtgctgaaagctcaagagaaaagtttctcctaaggctggtccctgctcctgagctccgaagcctccctcctctggccttttcccacacccagatccatcatgtataccctctctttatggaatcatcaacattccttgcatgtttgacccaccccactgaacactaagcccggccctattgagggctctaccgttatttctcaagcccacaaggctccccctggggtcctgacccccacccacccatctgcctgagttctccacttaatgagtcccttggcagctcaaacttgatgcatcaacactgaactgcctagggtgtgagtctgttcttcccggtctcccaaactcagtaaagtggtgtcccatccacccaccagttcctaacccttctctctcactggccctctgcacccaagccaccaccaggcctgaatgctttatctcccaaatatatcttgagcctgtcgactttcctccactccactgccatcaccttgggccagaacactgacacctctccagtggacccttacacctccaacctccccacttgtcccagatggacacactgtccattctacacactagtggactggcctttataaagcaccaaccagacagtgctgtccctgcttaaaatcacatgagcttcccactggccttaaaacaaaacgcacaccctaatgggacccacaggcccagcatactccacaccctatgccctgcgttccaggtagcaggcctttgtgcagtaactcaagcgtcccaagctcttgctcactgccaggactcttcccacactctccccactgcctaaagtacttctgctacgtctgtctggctaattctccttctcctgtgtgctgggtaggtaaccatcattccctctagagaaccttccacaccgtccccagtcttccctcaccatggtttgccttcctggcactaacaaacatttgccatgttggactattttgtgtggtctcattctgcccataagcagaagcaccttcactgcttacccgcccccctgacccccagcacccagcacagcacagcagagcaagaaactatgtaatctgtggctcatgcctgtaatcctagcactttgggaggccaaggtgggcagattgcctgagcttgggagtttgagaccagcctgggcaacatggtgaaatcctgtctctacttaaaaaaaatacagaaaaatttactgggcatggtggcccatgcctataatcccagctactcggaagcccaaggtatgggaattgcttgaacccaggaggcggaggttgcagtaagccaagatagtgccactgcacttcatcctgggctacaaagcaagactccgtatcaaaaaaagaaaagaatcctcctaacaactctggaaaataagcacaactggagtccagatttcgtgggtgagacacaaagttttcaaacttgccaaggtctcacagtgatcatgttcaccaaaaggcaaagccatatcccacaatttggagaaagggagccagttccttaaagccaacactccttctaaggaggggttcactgagagtttgcagagaaccaaggggacagtggggagggaagaggtatgagcctgaggcctggctcaggcagcagcagctgtgcaagtatctcaccaggagcactaccaggctgggagccccagcctctctggcctcaagctcagcctagcccagagaggcccaggggagcagagccgaatggtcctgaggaatgacggactgtcgtccagggcaggtgggcagctcatgcagtcaggatgcacgaagcagaccaggagggtggggaagagctggcagcaccatgggatctctggggcctcattcctctaacaattaatgaatcaaaaccaattccctgctcctgcagattggaaacagggaacactgggtgggatcatgctcgcttatttatagctctccagctcctcattaatgacttttactgctccgccaatgaaacgttaggctccccagccaggattcacatggaagcctacactgtgaaagttaaatcaggacagtgatgagtcctgggcatgcctgcagggagcgtcttggagaacctcgaaagcaactgagcaatggggcttcctgaagcactcccaggaacccaagcccagacagctcctcctgggctcctcctcagccccaggccagcccacaagatgtcacctcctcactctgcctttgaatgtctgtattcctcccctatcagccaactggtctccctgcctcccagcccttctttctccaacccactctacagaccaaagtcagtgacaagcacgcccttgaaatattagccatgctccccactgcaagtgatcaaagtccagtttgtgagatcctccaccgctccccagctccacacatcacaatggcaccagtgtacttgccaaccttcacgtgccccatgctctctacatgtagacatgcccattctaatctctatctttgcacgtgctgattcccttttcctgaaatgctcttcctcccctactttgcctttcacacttccactcactcccgaaaatccacctcaaatgcctcttgctctttggcattatttgacttttcccctgctaggcaaagttaaccattccttttcctgcatgtccaggaatactttatcctagcacacttctattgcatatatatcatattatctcatgcttaatccctaaggtcacaagaggaggagctgaggctcatggctttgtgtatcttcagggtcagggcctgaagcagagatattcagaagatatggaacaattgaatgagctgagtgaaagcacagaaacatccatactagggaaatcatttgaaatatcagtgtttcaaggtaaacgagtaagtcagagaatcaatgggatggaacttatgttaggaatgaggcaatggaaaattctgtcttgtccaagactagagttagccttcagcgcacaatgagaaaagatcttggaatatggggcctcctagacttggttcagaatccagtccctgcatgaatgagtcaagagtcctgggcaattcactttatctaattctgcccaagaaggagggagtggttcggggtcagaaaaggacaacgagaagcttgggagaaagcaacggtgctgtcctggggctggcaaaggaagggagagacaagcagccagatgtgagaacccttggttccatggggccccaggcaggacaactcaggtcccaagactatgaagcacagctggctcagagagggtggagacttgggcagcacagggagctctctgaggagctcggctatgcccaggacatagactaagggggaaagaaagggacaggtgtggccacatccagggaaggctggggccagaaaaggatccctagggtaaccaagaaggtgcttccagctctgtttagaaaaaggctgaaaaagaggataaggttatggcagtgctcagggtggggcaaggacatgccttctgctgcagacaagtgggagaggaggaagggagctgtgccagggccccctcaactaatcactgaaccgcatggcctccctgggaagtgggtactactaccccattctagacaggaggaacaggagcagagatcctaggttacagcattgcctaaaatcacaggggagcctgggttcaaaccctgagctgtctctgatctcaaagttaagagaccagcccaggagacagtcaggccactgtggtagctgtgtgccctcaggcaagccacttaacctccctgagcctctatccctcacctgtaaatggataataacagtcccacctcctagggctgacatgagaattaaatgaactaattcatgtaaaaagtttagaataacgtttgttacatagtaagtgttcaaaaaaggatcaacttctgttgttattcacagccctctcatatgggatcctgtttttagagactcggccaagtagagagtggaggagcttggggccaattccttcattcagtctgggcgggcagaggtagtctcagcactgttgagcagaaaagctcttggccagacaccaatcatggcctggccctaggaaagaggcagccggcttcccagaaattccacatgcctgcgggtttggtgctcctgtaagcaacacctcgtaagcaacacctctccagaagtcactgggccatgggaacagagaatgtccactgcaccctaaaacaggctcagggagggagctacacggtggtctctcctcctgctggcctttgggccagctggtctcctggtaacagaccactgagaagcccatgaaggccaggtctgaggaaccggagcctgcagttagactcctatggacaggccacaccacagagcctgcctcagccctccctgcagccccgggccaccgggcctgatcctgtgtccaattctcccctaccccacctgcatttgtctcctgaaagacaagaacatccagacagcaggctccagcatccctcccagatggagaactgaggctctgtgaggtttctggctctccctcttcatctcaacctatgtctgacttttgtttttagctttctctggctctctcattctccttatcattacttctgactttctgagtcttggtcctgtgtgtgtgtgcttgtgcgcgtgtgtgtgtgagttcatgcacgcaccagcaaaggtatatgcaggtgtatgggtggaaattactccccccaccgcagcctatgtcctgcctccctggtagggctgactgctccaaagctcctgtctgtgccaaggctctcatctccaccctgcatttggaagctgaccaggatgccccctgctaggccctcagctgtctagtctctcccaccccaggtgattcatgcagcaggagcaaaactcactccttggccagcagcccttctaggaaaggttggagtggcccaccctgccagcctaaccagccccaagccccagctccaaggccttgcactaatcctgcagcatagccagcagacttcccagggcaacctccaggcttcaggatatagcgcagggtctggaggctatgctgtgtcctcatctctgcacctgctgttcccctgccagaagctcactgtcacctgttggcccctatctacctggtgaatccttctcatctacccagacaagtgcctcctcctctccagggaccttcttgtttacccacaatcaggacaacacaggcccttcctctgatgtcactttctgctttatatgtgattgcagctcagtgtcattgactgctccttggtccctgtcaccacctgcactgagcaccctcaggacttgtgtctccctagcaccccgcatggagtgggacccccagctctggatgccttggagcagcaggcagcaacaggacaatgcgggatgtacatcatcctggcctggccctggtccacccactatcgacagcacagcccgagacagctgtgctcaccaggcaaaccataggcaatggcagccagtcatcaccctgtgggtctgtctctggggtaaaagtcacagggatgcccacacccacctcactccctctacaactgcctgggcagttcaggtgggagtgcatgcagccctctgtgccgctccctggcctgtcacctggtggggaccaagacagaagcactggcctgaagcctgccaatgggcaggtctagcccattccctcaaggggaatgtgccacccctacacccccagctgctgggctcttgacccagaacccccaatccatcgtccacctttcctgactccattaccaggggactgtgcccaccctccagtgtgagttcaacgctgccaactgcccaatggcccttaaaccaggtatttgggctacaggtccctcttcaagggccatccctccacagacgccgcccctccctcactctgcccagcctagttgtttaccgaccttggctgccagcaagcccccagcatgccttgcagccaagcccagggagatgacctatgaggggcagcacccccgctccccttctccctgctctgcacactactcccctacagccctggtcacgtgtggccccccgtcccagagtgagggcaggagggagagagctggggtgaagctggggaggtagtgggggtaaatggagcgggttcccccatcccaggtcctttctgttctttatatctttcttgtgattcttatgtggccaagtgcaagtggactgttgtccacatttactggtcaaaatgctaactccaggggactgtgaacagaatgaggaagaggcaaagtgacactacggaagctgaaggcatctctcacaaactaactctgtccagccagtccacagatgctccccccgggaggcagcctgggctgtgcaaagagaatggacttggcaatcacgaagcccaggccccagcccacctctaccacacagcagcccagagcctgggttggtcatgcctcatgccttattttgtaaaatgggggaagggcagagaagaacaagtcatggcacctgcaccacacacagatgtgaaaatatagccactggcacaaaatagatcttgaataagttctaaaatgctaattcctcctcctcgggaagtgttcattcattcattcattcattcatttaccaatcaagtgctaaacacactccttcttggcccctttgaaactaaaagccacattagtgcagaggacgccgattgacacaagagaaaggaggctctccagaactctcagagagaaggactggcccagcggtaagaggataggttctggcaccgaactacccggactcgaatccctgctctgcaccttactgctgtgggcaagtcacacctgctccatgccctaccctgaaaacgcggttatgatagtcctgacctcatggagtaataatgagagtcgagttagtactgaggaagcactttgaccagcaccagtaagtacaggtaacttaccacccactgcaagaagagtgagaagaaagcagcctggccaggttcaaactcaaaaccaagctaggagagtgaggtctgggctgatggtcagacgcctgggcatgtccaaggccatcctctgctcatcggtgccatctctgagcaggatgcccaggtgcaattctgcaggtgaggggtgaggggtgccacacccagcctgtgtcccacatgctgcaggagctcttctcattcaccccaagttttgcatgggctttgctttccaacacctcatcgccgtcctaacagccagcatgacagcacacagcctctgaagttgttgacatgaggcctgttttagagaatgagtcagccaggtgtcgggggtgcgccatgcacccagcaccagcatctgaggggaccaccctgggggcaagggtctctcaagatggaaaagtggatacaggtgctgactggcccccaaagccagctttctcagcttgatcaaccctgcgcctccaggaggaggcaaagccatcacgacataagccatggccagcacctccctggccattcagcctggccctgctcctaatattttctgagacagagcccagctggccctgggacgttaccatctcagcccccaggtgcttcagagcagtcggggagagaaatcggaaatctcctgcagccagcagggatgagaggggctctttgccagtgataatgaaaattttcacagtagcagatgctcagagaaaattgaaaaataatacaacaaaactcacaaaccagagaggaactttagagaatcctggttggtgaggctccatcttcccaccagcacatttctagccataatagacagattgggagccacgttctcccagcaggttatcaaattgcctcccggaaaccccccacaaaactcctcaagcacgccgtgctgggaacacagaactgaggcagatcccagcacaggccccagcaaaggctatctggagaggaagcctttgtgggctgtgggctgtgggagtggtggaggtccagcaggtggagtgggggtggacagtcatgtagcctggggtgtcaagggggcttcacagaggacagcagctgatgctggggcagagaaagaggacaacccaggccagtggctgctgtgagccaaggcccagcaccctccaggaatggcccgctcacactggggtgagaggttgggtgacggctgttaggaggaaagggagggtggagtccccagaagtctttggatgatcagctgaggggctttgttttgatcccaggagcagcagggagccttgaaggcaggacctgctcagagcttgcttctgggaaagtggccacagggaggatgcagccagagggctggaggtggaagccccctccccctcctcctccttctcctcctcctcctcctcctcacccggaaggaacaggggtagggagggcagggggtgggaggcagcaggaacagcatcagggccatcacagaaacaggggacagagccagctaaagcatggggggaagaaggggacaggccaaggacagacaccaaaccccaagaaccctgaagctggcaggactagggaagggcacctaccacgcggtggtccccgagggtcctgcatgccatctcatggcatcctcccaggcctagagggggggccacccatttgcagagggggcacctgaagcttggcgatgtgagccctcttgccaggtatgatccactgcatggctagtggggagtgagctaggacaagaactcagggcttccaaggggcacactctgcccaccccaagcctgggcttccaggtgcctcccagcccagggggagggcgtggtcagtccttcagcctccagtcagcaccttagctgccctcagagccttgagggactcggtgccatctgagtgcccagggaaggggtggtgggagcagtgggtcaggtggggaggaaaagcggggccttcaccccactctgtcctgaagaagccccatagaaaccatgcatgttgcaggccaggctgagcttaggggccacccagcagctggggagcaggcctgttcactgaaaaatggaggggcctctgaaagacgcaccccaggagaggcagcctggcaacccagggcagtggagctgtaggagcccctaagtgccagggccagccactgggacagatcagatccaagacctctgaaggggagaaggggtgtaagcatgggcaaaactgcattatgccattccccaagttggagtggacacaagtcacagagcccgagcacttccctggagcccagctgaaggggggcagggcacccccttcctcaccacaacaccaagccacaagggcactagggccacagtcaggcaagggctaggagtgtcaggtgcacacccaaaacagcaccgtcaccccctggggggacatgcgagactgcatccccccctccacagcaagctcagctggggtcatagggtccccaccccactgtgaactatgagctcctgctggctgggagagaagcctgggcatgtatgctcccatgccactgacctgcttctggggagcactatggtataccaaaccaaggcagaggggctctgagaatccccccaaaataccacatactgctcattgctctctgcattccctaagggcctttttctgcagggaaagtggctgagagcgggatggctaggtctggagggcacagtaggttgctctggtgctcagctccagccctgccctgcgcatggaagatggtgctccctttctccaccccctgcccagacaccttccctggaaagagacaaagagatgacaggcagaaggacacagctgccaggacacacaccagagaaggaacaggaagctgcggagctgtggctgggggctcggcccctccaaatgccctgcctggcacgcatgcaggcacaccacccacaggcacatggcccccagcacatgcacacatggctgctctgtgctgaggaggcattcccatgatggtgcagggagctttcccagtcacacccaaggccactgaacctctcaggagatttggagggatgattccaggcagttctggaggtatggggaggggctctgaggcctacctctgcactgtctccaacaagggcagctcagctcaggctttgaggcaggggcactccctccctcaagcccatgggagtgggcaatccccagcccagcttgggtcggctttccaagaagtgactgaggtagcacagacagcaagtgacaactgcatgctgtgtctatcacagacgaaggaccagcaggtgatagaccagggaccagcaagtgatagaccaaggaccagcagatgacagacgagggaccagcaagtgatggaccaaggaccagcaggtgatagaccagggaccagcaagtgatagaccaaggaccagcagatgatagaccaaggaccagcaggtgataggctaaggaccagcaggtgataaaccaaagaccagaagatgacagaccaaggaccagcaggtgatacactgatattccaagtcacatgaaagaaggaaaaccttcctgggatgccaggcacatgttccctccaactgtactccggtttcaccccctccaacctcttgaactcccggaatccccaccctcccaagctcccacccccgacactcccagcatacacagatgcacacacctattttctgcatctgcttaagtcacaacagcattggttgaaggaaagtgtgctgactggctaagtgagcccaagtgtccacacctacccaggcagagccttaccagagaggggtaagcctcctcctcccccagtacattcttgaaaggtggcccacactccattcagctcatgagaaaagagaccaacccaaggctcctgggcttgggagtccccagaggagaacacaaggagtcccaggcatgaggatgctgccacccactgccctgccacagctggatccatggctgcttctgctctgacaggttctcatggggactgggcaggatgggatgtggggagcacaaaaataggggagacgcactctactctcaaagaccccagcccagatggcagctgtcctgcacctccatcaacccgtaggggctctaggaagctaaaggaaggtgtaagctgaggagacagccagctgctatccttagtgcacccaggtttcacctccctctacgcagccatccagagcactggccactaaaataagctcagccattgtcacaccaaccaccaagcccatggctctctgtcccttcctcctcacccttcaaagttcaattcaagtgccccttcccccaggaagcccttgagattttcccaccctcgcaacatccagagctcagctcagccggggcattatcactctgaatcatcaccctctgcctccaccaccaggctgtgagctgttggaatttaggaaccgtgttgaggccacttcagggtccccaaggcacaggtgccggaggaatgtttactgaaggagtgaatgaaactattgcattagatcaagcccaggtgcagaggactggtttcacatagaaagcatcgattttgccctacagaaccctgactccagttttccagcagacaaccctggtgtgaagacagaggggcggggaggaaggtaggggctgacatttcccagcccctcccaggccggtggggagctgaatagctcagtgacttgtccaggagcccgaggtaaaccacagactaagagccaagagtcatgattcactacttgcatttctccagccatgacaccagcaaaggaaactgcccaggatgagctcagcacttttttgccttaaatggttgagtgttttttaaaaggatataacaccaagggaagcagtactcaaggctgagaattacgaatatttatagcgtttaagcataatcgtattcagatgaggactatatattgctcacggcaatttgcactcttctcaaagcgtgtatttctgcagggaaggaggcccagtggctggatgtcggcctggagacagcagggtccagaaggtacaggagagctgctagcgtcccagctccagccccacctagacatgaaagacagcatctgccagacaccctgccctggagggggaccaagaaggcccatgggcctcaagttgttggggagaggagcagaaagaactgctaaggaccagctcagaaacttagaggtcccccagctctttgggtgacaggacccttttataaagttcaaaactggctcctacatgaggtagctgtactttagtacctgctgctggagagcactcattgtgacctcaagccaatgtgccctcagcaaatgaacctgcatgttattacagcaaccatgacatcacggccgtgtgtgagcatcaggtcaccatcaaggctgcaggcattcgtggggtcttttctacagagctgggggcctcatggggacccactcattggggctttggaattccacaggcccgattcaattaatagtcacctaatgaaggtgacaagaccctgcaggtggacaggtaggctgatggggcaaaggacagaggcatgagaagcaagaagagcgtaagaacgaaagggaagaaggacatcccggaagacctcagagccacgtctctggacaggggacctgcctgtttcccgcacagacctactggggatcctacccacccacccctggccgtcacacgtcatacgcctcactcatatatgcaaagctattgaaaagccacctccctgagctgacaccccatgaagcagtggtcagagcccaccccagcacaccctcccaccccagcataccctcccaccccagcataccctcccaccccagcacaccctcactcccaccccagcacaccctcccaccccagcacaccctcccaccccagcataccctcccaccccagcataccctcccaccccagcacaccctcccaccccagcataccctcccaccccagcacaccctcccgccccagcacaccctcactcccaccccagcacaccctcccaccccagcacaccctcactcccaccccagcacaccctcactcccaccccagcacaccctcactcccaccccagcataccctcccaccccagcataccctcccaccttcagttttcccattggagtggggtgttggcagcaacaggagtcaccttggacaagtgccccaagtcccagcccggcctcctcacccactccctccagaagcagcagtcccagcagagaggcagccaggcctcccctcacccgcagccccctaaaccagctggcggtcctccctgagctcagccagcttgcacacactaactaggaaatggaactgccaaaggccacctggagacaactgcagggaattaccaggcctcagccttgctgcttttcctgatttggtgctgcatgccctgctggcacaggcctcctgccctgcagtttatccttcactacattatcaagcatctaccagaggagccaccctgagctgtgcgcctgcagctggtggaaaggggaagcctccaaagccacagagtcaagaaagggagcctccctctgatatgggcctgggtgaagccacctgctctaccagggcagcttcccagtggggaagaggcttgagaggagggactgagcctggggaaaggagaagcctggaaaggtggagttgagaaaaggaagacgaaagacaatggcaactggggccgcccctcccctcaaaggggcccttctggggtgtatggtgggtcataggcactgaggtggcccatgagaccagcattaaggcaggggtggtggagagctcatagtactccctaagaacttgctcatagtagtggggggctgcagccccagcaccaaggcaggagctcctggtcttttcattttcctgcctccagccttgcctcttgggctaactgctcacaggagcaatcttcctaaaacccacacctgcttaagactctcaaagactcccattctcacagaactagcagccagagacccagccccaagaccctcatgagctcagccagcccagttccccagtcccttcccaatacctgctcccaccccattccttactctgctgtccttcctcacacgtctgagccccagcccatgccagccctctgcctggaggatgctcggcccagctcccacctgtgaagtccctgcttggtcctcagcatggctcccctcccaaggtgagctcctgtggtggccatcctccctccatcatgggtgctccatgcaccgttcccaccactagactgtgagccactgcaggacctaggccatgcctcatctgtgcttagccccaggccctgcatggtgcctgacacatggtagatacatagtaaacactgaggaaaatgctgaatgatggccacaaaagaacagacagatgggtaggtagatgggtgggcagactgatgggtgaatggatagatcaacagatgggtggatggaaggatagttggatggatggaaggaaagatggttgaatgcgtggatggatgggggaccgggttggggtggatggatgtgaggtgagtgggtgagtaggtgggtggatgaatatgtaggtggttgggtgagtaggtgggtggatggatgtgtaggtggttggttgagtaggtgggtggatggatgtgtaggtgggtgggtgagtaggtggccggatggatgtgtacatgggtggatggaggggtgggggagaggatggtgtggtgaggagtgaatgggggtggcttggtgcatgggagggggtgggtggggtgaatgggagaggaaacgtagacaatcagaggaagtctgaccttgctctggccttggtcccccatcctcactccacaccacccaaccacaaaggcacttagaaggattaagcctccttgatacaattggagcagctggaaatagctttgcgcagcctgcagccgctgccttccagcaatcagcctcaatcaacacccacctggccctgctgccagttaattccacctgacaccctggccaggcatcccagagctgccaggtgttggccccgtatgagggatggcaggagatgggcctactccaccaaggccagcagaaaaatcactctcctggaccccccagtacccaatgagaacaacagtgtcccaggagctccagcccacagcagagcttggagacaccaagagacacccacacacacacattcagggagctgggtcacccctcaggaagtggatgtgtgggttccctcctggcccggccactcttttatactcacttggcaaccagttcattgctctaaagagctgggaccccaggagggacccctaagggcatcttgcattggtctcttcaacaccaaagaggcaacagcagagactgagggagagaagtgtgacccctctaaatgctccacttgctcagaggcaccctgaacaagggtgtgggtgtggaggcagtgggtactcacagtagggaggggctgccttggtccagagtggggctccgtgccctccgaatagggactgcttgtagctgggggagggtccccacatgatctcctttgggccttctactttgtgaaccctgactcagccccattccctcaatctctctagccatgtgcctctgtgcctcccatgggaacctcagtgcttcagcctaagccaggccaccccactctctagcaagtgcctggggccagcactgccagtccccctcctcccagggcagaggagcagctaaggcacctgctggggcctgaggccaccaaaacaccaggcagcactgcaagcagagtgtggggttcagagtaaggatgaagaagccaggctgccaaggttaaagccacttaactctgtgaccttgggcaagacacctaacttctctgtgcctaatttcctcattggcaaaacgggctaataatagccccgcctcacaggctgagtgagtaaatggtgtaaattgctgagagccgagcctgactcacagggcaccctctatgagtttcagctattctcatgatctgggggtggcagtgggtgcacttctgggagtacacaggccccagtcattccagggaccccagaagcttcattcttaagcaggtttgtcatagcccagcactgcctggagttcaactcatctggcttcaacccttctgatggcgtggccagggcagacagccgggcgtgcgggccagccaagtccacctacccatacctggcatctgctgtagcctcctccacaacctcccccacttcactaagtcctgcccagacacctctccttcagatgacctgccctgaaccccaggctaggctatgtcctctgtaagacaccaccacacatagagtcctgtcctcaggcagtcactccaccatatggccacacctgtctgcctcaccttgggatccccagagcctggcccagagcaggccctgagggtgcttgttgactcaacatgggaccattggtaagtgaaggagtaacagcctccaggtatccccagcccctgcatcctgctcctggtagcagcagctcctcctcccggccttagccctcctgcctatggtgaccagccagcctcaagcagcccaccacgagcccaacttgcccctgcctcctaaacctggcttcaggccctgcctgacctcaccctacagtcccgccccatcccagaaccaccacccaccctaccccaacccagactgggcaatcatatcaagaactacggaggagagaggccaccacaggtctccacttctctggtcacacagttgcctgggggagtttctatcacagatgaggaaatgagtctccagtggggacaacaccaccaggaactcctgtgccacatttggcttccctcggagctggaagtctcacccctcccagaagccactcagtgacaatgcacaaccaaaggacagcagacagagctcaaacggcttctcctgatcagctctggagaggccatcatcagcactaaacctggctgagcattgagcctggagcgaggaaacatgcatttctttctgtctccacacctgaacttcccactgttccctgaacacatgtcacctttcaacattttgtacttttgcataccctgtttcctctatgtgcataagtctcctctgaccactataaattcctactcatacttcaagagtttgctcagttgtcacctcctccacgaagactcccctgatttctcccagatctctcctctgtgttgccagagctgtctccccctctggtctgtgagcgcctccaagcaggatcatgtccaacccatctatccatctcccacccagggctggcagatgggctccctccatggatggtgacatgagtaatacacacacatctctgtgcccggcggtgtgggcagtgacaggcccaagtggccacacttctacccaagctgcaatccctggttccatgagactttcccgaggaccaggcctctcagcactgggctgtttccaaggtctctaagcacaactctggctccagcaaacccaaacatctgtggtggtggccagggacggagggagaactgcctgcccagctaggcttccagaaggggcctgtgatacacattttgcaaatggcaggagacatgcatgtcagaaaattgtccacaatcaatttcaaattccaagcggaaatggttggtttgctgctaatctgctggaaatctgaagatagtgtctcccaggagggaggcagggggcccgggctggttcctgggaggtcagaaatgccctcttgacccccaccatctctgcacactcagggcacagccatctgcctgggaagcagggccaagtcattctgcactccggacagaggctctggctctaatggcccctgatccagcaggccacaggtaaccctattccagaccccctaagtgaacccttgtgccctgagccagggcatgctgaaccaggcaggcccatggccctactgtcaaccattctctctctccacaagtattcaagcaatgagacagcaaaagctttggatgaagagcacagtcggggtcatgttatctctgtaggcctcagctttcccatttgataaatgggaagaataacctgtccaagtgtgtctccaaagggtatttgctaccacaaaaggaagcagagtgagcagctattattaaccaccacaggagtcattagacagctgacctcaatcagcacctagtctgtgcctcctattgtatttggagacgcagtgtcttcagttactcatcagcaaacctcttcacagtaacatgcatttaactgtctgtctccccaaggaagcaagcagtccaggacctccatgtgaccatgattccccgaggctggcacacagaacacactcaacaaatgctcattgggtgagggatggggtgagggttgctcctatactgcaaaccctcccgtgtatccgcatggacatttttttttacctcccagagactggggtaccctcttctcactgcacttgggtataagagaggagaaacaagggtagagaagtgggccaggaagccctgaatcccagcttccctttccctgttttctcctctctcatccctaagtgcaatgagaatagcgcatcccaatcccacgaggaagaaaactgggaggccagggagggccccaggggaataacgcagccgttgtattagggagccaggagaaaaggcaagctgagcagcactgttcccgcatgctctggaatgccgctcccgctccctcaggaactgatacactgagggttctctggctggcagtcactgggcatctctctgagcctcagttttccagtctctataatggggacagacttgatgcaaagactcagtgaggtttcacaagcccaagactgcactgtgtcaggtacagtcaaggcaggagtcgatacagcccagctgcctctcctgttgtatttcccacccatcctgaacctacccccaccaccacctggacagatcaaactagactccaaagagatactgcgaagtgactggaataagaggagggagagagtttagtaaagggaagtagagaaatctagagtacaaatgcccatttttaagtttttctcaaagaatagggaatgctttagcaaggctcaggatgagacttccttttcagggcattaacaatttgtatttttcactatccatcttccttgcagtcttttgcagggagggaaagtctataaatatttttttttaagaaacgactgcattttgatgaactcagcttagcaagtgctttgcatatgaatgggacctgattagctggcactctcccacagcagagtagcctgcaacttcaagctttcccaagagttaaaaagttgaagcagccacatttatgtggctcctctaataaaaaaatcaggcatcatttattattaatgcttggctctgataaataccctcatctaaaattcttcacttgcaggaacccttcaggataatttctcaggataaccaaagagagtacttcagccaggcctttgcaggagaacgggatgtctatggcagaggctgggggacaggatgtgacacccactgaagtggccggctggagcgttttagggaaagctgaacagtctcagccaccgagagagggaaagccgtcagctgcagaaggggctctgcctctgttgtgaccacctcagccaggttcggtgcagcttctgagaagactagcactcatattaattccccagatgagatggctgggagcaaggggccaatttctataatccagaggtgtctgctaattgacatcagtcctcccacaaagccaggctgtggtgcggaggctgttccctgatggagtcgcagatgctattagtgtcccagccaggccccctttacagatggacactcccatcccctcttgctctaaatgttaggcagctgggcctcataggtgcccccttctccagcaaacttccctcacccaggggagctgccggaggggatggcccactccccaccctagggtagctcacagccaacatcagacagtggtggtggtagaggaggtcacccctccttccctccagagggaacaactctatgttccagagtccctgatcaggacaggctagacttacatgataccacatccttccttgtctctttttcctctctaacctgcttccctccataaatctcagacacccaacccctgtcccaggctctgcctctagggaacgtgactggagacaattgggccctccagatccactactgggactctggaaggctgactgctgtggacggcatggccaagactcccttgtccccaggtcccttggtgatttgaccaatgggagacacaggcaggaaatgagagggtggagagggggtgggggtggggaggagggtgggtgagggtgggggtgcttctcccctggctgcctccttgctgggttgactgtggctgcactacctgctccagttgctgtcccctctctgtgccccttcaggactagggacaggaacacctcctgaggccacttcaacatagctggtgccctaactttgcccacacttctaggaaaactctgttcagggtctgtttgctaccagaccttagctggcccggcagaaatgctccatcccccttttccttcctccaatttaaaatgggaggtttcatcagagccaccctagaaagagagaagtggccagctttcagggttattgagaaacaaacatcgggcacgtctgcccccagctaatccctatacaggcagcagctcccacgctatcaaatgagccctgctccccagtggagccaaaagaatgaaagccaaacaacggcattggtttttccagaatccctgtgtgcatccagacacacggaagggtctgcacctctcactcatcggctccttagtaactaacaacttaggaagatccaatgtgaagcaagagattaaaatttcatgcattttgcttcaaatatctacaaaaactaagtttcctgggagaaaagagaaaactcttttctctaagcaacacaaaaagcaagccatggcccaagcccccccaggttggtgttgcggtgtaaatctttaatttcacttgctgctctcatcctctgaccccagcagcattccataaatatttaggcagcaagcatcaggcttgttttctactttggaatgctaatgatgagaatgggagggtgagaaagcagcctccatggtccatccagctctgggcccatcagcaaaatacagcaggcatactggcgacacagggagccaccggcttccttaatgagccgagatgcagttcatggggaaaatcactacctgcaggcgcactgatggtggaaccaccagccaaatcaatagagctggagaaacctcaaagggagggaggtgcaggggagaggagaaagcacagtggaggggagaaagctccacggacgtgcatgcagatagactttttcccaaagaaaatgcagctgcccagttcagccctctcggcctccctactccccgggccagagcctggccagctctctccttgggccttgcacactcatacatatgccctcctcaaatattcaggccctggagaaggcccagtcccaacctcctagtcctccacccaccaccaaatgcaactgtcacctcccctgcggctcccacattgcagagggcagaggtctctcaactcctgcccgaggctgacctctctgtacctggcagtgtggaccacagacccaggcctggagaaggctggtcttgctttgaattctgccttgaccattttctagttatggtcttcagcaagatcattttaaacagctttattaaggtacaaactacatactatgaaattcacccattgcatggttttgagttttagcaaatttatacaattgtgcaaccatccccactatccagttttacaatatttccatacaccccaaaggtcccctcatgcctgtttacagtcaatctctgcttccacccccagctacagccagctactcatctggtttctgtctctatagttttgccttttttggaaattgcacataaatggaatcatacaacacgtagtcttctgtgtctgccttctttcacttagaataatgttttgaggttcatccatgttaagcgtgtatcagtgtttcattcttttgtatttctgagtagtattccactgaataggaatatccaattttgtttatctattcaccagttgatggacatttgtgttgtatccagtttgaggccatcatacataatgctgctatgaacattcatgtataagtctttgtatagacatatgcttccttttctctttcgcaaattcctaggagtggaattgctaaatgatatggtgaagtatatgtgtttatctttttaataagctgtcaaactgtttttcgcagcagctgcatcattttgcattcccgctggcagtgtatgagggttccagttgctccacattctcaaaacacttgttactgtcttttttattatagtcatcctagtgggtgtgaagtggtatctgattatgttttgatttgcatgtccctaaagactaacattattgaacatcttttctgcatgtttatttgaaatctgtatctcttttttggtgaagtatctatacaaatcttttgcccattttgtattgggtggcttgtcttattgaattggaagactcatttatatgttctggacagaaattcattataaaatatgtgatttgcacgttttttctcttaggcaatatttcaacctctcaatgtcttcacctgcaagttgaagtatgccataacactttaccatgttgtagtaaagaacaaggatgatgagtgcctagtgtgtcacataggccattgaaaaacggagccaccactaccatcactgtccccacttcatccctagaagtcaaggtctgcatggtcttggccttcaacttgaagtacccagtgcaatacagatgaggacccaggacagcttgagccctaggccattccggcatccccagcatgttccctccaccacctgcatacatcatcaatgacactagctccagtcttcacacagcaaagtgcaatatcagcaggcaggacccattacgggagcactgagaatggagcacagtctcaaaggggacaggtgtgagtagggggaggatgacaagacgtcttggcacaggggtcaggaggagcagaagcacagagaaggaaaatgtgcatggcaaatcctgggtgccagggaagggctacacgcctgacccagcgagtgtggccaggcctggctctcagggttagcaggagagcagagagcaggaggcagagtggcactctgggggccaggccatgctggagcccctgagcactgctgctgggaggtagacgtggtgagatacactcaggaagaacttctaattccatgggcaggcacgacacagtcctctgcttctgcttccacactccttcccctcagagacccaaagcccaggaaagccagggagacctctgtgccaggatctgtgtcatgaacactgtgccatttctcactacgctcctgggaggaggtgacattacctcctatgttaagggctgaactgtgtctcccttaaaatgccctaacccccagtacctcagaatgtgaacttatttggatacagggtctgatatggtttggatttgtgtctccgctcaaatctcatgtcaaattgtaatccccccagtgttggacggggggcctggtgggaggtgactagatcatgagggtggatttccctcttgctgttcttacaataatgagtgaattttcggaagatcgggttgtttaaaagcatgtagcacctggatgggcacagtggctcacgcctgtaatcccaacacttttggaggccaaggcgggtggatcacgaggtcaggagttcaagaccagcctggctaacacagtgaaaccccatctctactaaaaatacaaaaaattagctgggcatggtggcaggtgcctgtagtcccagctactcaggaggctgaggcaggagaatggcatgaacccaggaggcggagcttgcagtgagccaagattgtgccactgcactccagcctgggcaacagagcgagactctgtctcaaaaaaaaaaaaaaaaagcatgtagcaccttccccttctctccttctccctctcctgccatgtaagacatgcctgcttccccttcgccttccaccatgatcctgaggcctaccttagtcatgcttcctgtacagcctgtggaactgagtcaattaaacttcttttctttataaattacccagtctcagggagttctttaaagcaatttgagaaccgacgaatacagcaaattggtattgagaaaggcggcattagtataaagatacctgaaaatgtagaagcgactttggaactgggtaattgccagaggttggaacagtttggagggctcagaagaaaacaggaagatgagggaagctgaatataaaagtttggaaaatttgcagcctggccacgtggtagaaaagaaaaacccattttctggggaagaattcaagcaggctgcagaaatttgcatatgtaaagaggagccaaatgttgatagccaagataatggggaaaatgcctcaaaggcatttcagagacctttgcagcagccctcccatcacaggcctggaggcctaggagggaagaatggttttataggcaaggcccaggacctgctgctctgtgcagccttgggacatggcacactgcatcacaggcactccagctccagccatggctaaaagggccaaggtggccaggggtggtggctcatgcctgtaatctcagcactttgggaggctgaggcaggcagatcatgaggtcaagagattgagaccatcctgccccccgtctctactaaaaatacaaccccatctctactaaaaatacaaaaattagctgggcatggtggcacatgcctatagtcccagctacttgggaggctgaggcaggagaatcacttgaacctgggaggcagaggttgcagtgagccgagactgcaccactgcactccagcctggtgacagagcgagattccatctcaaaaaaaaaaaaaaaaaaaaaagcgtttggcggggcaaggtacagcttgggcttcagagggtgcaagccataagccttgctggcttccacaggtgttaaacctgcaggtgtgcaaagtgtgcgagttgaggcttgggagcctccacctagatttcaaaggatgtatgaaaatgcctggatgtccaggcagaagtctgctgcaggggcagagccttcatggagaaccactactagggcagtgtggagagaaaatgtggagttggagcccctacacagagtctccactggggcactgcctagtggagctgtaagaagagggccaccatcctccagaccccagaatggtagatccaccaacagcttgcaacatgtgcctagaaaagccacaggcactcaacactccatcctccagagctgtagaggctgagccctgcagagccatagggacagagccgcccaaggccctgcgagcccaccctttgtattagtgttgcctggatatgagacatagagtcaaaggagattattttgaagctttaagatttagtgactgggttttgggcttgcatggggcctgtagcccctttgttttggctgatttctccctcttggaatgggtgtatttagccaatgcctgcacccccattgtatcttggaagtcactaactggttttgagcttgcaggctcataggcagaaggtacttgccttgtctcagatgagactttggactgtggacttttgagttaatcctgaaattagttaagacttgggggactgttgagaagggttgattgtattttgcaatgtgataaaaaatgagacttgggaggggccaaggacagaataatatggtttggatttgtgtccccacccaaatctcaaattataatccccgtgttggaggaggggcctggtgggaggtgattggatcatgggggcaaatttccctcttgctattcttgcaatagtgagtgagttctcacaaaatctggttgtttaaaagcaagtagcacctgctcttgctctcttctcccttctccagctatgtaagacatgcctgtttccctttcaccttccaccacgattgtacgttttcagaggcctcctaaccatgcctcatatacagcccagagaaacaattaaacctcttttctttataaattacccagtttcaggtagttatttataataatgtgagaatgatcaaatgcagggtccttatagaagtgattaaattaaaacgaatcaggaaggtgggccctattccacctttataagactggtgtcctcataagaagaggagatgaggacacaggtacacacagagggaagaccatgtgaagacacagggagaagacagccatctacaatctaaggagaggggctcagcagaaaccaaccctgccaacacattgatcttatacttccagcctccagaactgtgagaaaataaatatctgtttttgaagcccaccagcctgagggactttgttatggaagccccaggaaaccaaatatcacatttccagataaggaaactgtggctcagaagcggacactgtacctgaggcccatggctggggagaggcaagcctggctgtctggtttcagggccctgggcctccacactttccacccccatcactccagcacacacatcactaggacatgagcttcctgggagctagaacctggcctgggattgtgcctggctcacaggggcattctgggaccatctggagaatgagagtggagtgctgcctcctctgcactgagccccatgctggagggccaggggcactgagaggaaggtgcagggaaggcagcaggtcagtgaagcaggtgctgaaaaagagctgtggctattgtacgcaagagggcaagatatgtccaggggcccacctcttgggtgggtgcggcgggggcgggggtgggcagggcagagctgggacccttgaaaagcagattttagctccagaagagaagagaccaactgctcccctatggaatgtgctgcccagataaggagtccaagcagcagctgcacgcagtggagcagccaccaggtgcatcagggtgaacctaacaacatgtggctttccagccatggcatcaatgctgccgccaagcagtggctcactggtggtcacctcaggtccccatcctccagagatagcagcatgggagccccagaccagcctcggggagccaagcacagagcagcaggagcagccaatgtggaaaggcgtggaaggtgtccctgccaggctgggtcagagcccctgagaaggccccactggccctggggacatgaagcctgaatggacactgcctctttacccaagcacacaaggagacacagcctgatgctaaagtctaggcaacagggtctggggagaagccaccattctttggaatcagtggccactgcccagtgctctgtgaggggtccaaggccctgttgcccacaagatgcaccagctcccacttgtttaccactctcagccttggctatgaactctcaccttatctctgacccttcagtccaccatgccctggccccccagcccctctcctcacctcacccaggctgtctattccctgaagtgactttggctcctctttgtaactccctctctgtcctagcccttcagggcaaaggctccacccgctggctggccctggccatcaggacccctccacttctggcaagttaagagtgaggcatctttacaggggggccccctacagccgcaggctgagtccctctgggcaatgcccctgccaaacgagcaccacccatcagtccacaccacctcaggcagggcctccaggcctcatctgggccatgctccccttaagcagaactcccccccaccgctatctggtcaccagggagttagtatcactaacttaatcctagacagagtttgcatagttatttccacatttttattcaattaattattgcaatatcaatagatctttaattttctcatcagtgaataataggaatgagcctcaattccacaatataattaattagttatgagtgatctagtgcaagttcctactcaaagtcctgctgagacaaacccccaaccactgcccctgggaggccatcacctgcaagagcccagactgcctggatggagcagaagacacccccacctgacccagcctggtcagagccccgggtattttgctgagctcaacagaccctcaggaagcacctcctgtgtgccaatgcctatgctgggtccctggatgcaaggatcgagcttcaccccaccctcaggggaatcctggcctcaatggctcacatggaagaagcaacagagacgtgaagcagatggcttgtaataatgtacactaattcaattacacagatttttgttgagcatttactatgtgccaagccccgtgctaggttctggcaacacagtggaacctcatggaaacaatgagcccacctggcagggagtatgtggttgctaaatcatgaactgagccttttgaaggcagagcaagatttaccaaggaaagaataaggtcaggtgttcctggcagaaggaacaacacatacgaagatcggaggaggacaatggcattcctagcttttggatcatggagtgtttggagcaaaaggccccacaagttgctgatgagggtatggaggaagagggagactgcctcctgacccagacgctgaccttgagagcctcagggggctaggctgagggctgccacacttcccctcccaggacatccaagaaaggacaagggctcttgacgtatcctgagctgcctgctggtggagggatgccctcatcaggcattcacaggccctggctcagcctgggctgaggcagggggtacttttaaaacttttgaaagggatataggtaaggcagccaacttaaagagtgcaaggggctaaggccatataggaagaatggccaagctggagcccctgcccatgcccacctccaaaacccctgtccaggccacctcgtccaaaagggcctctccagcagtacactcttcacaccctactcccaagaatcagagctctccatgtgccagatactggtgctttgcatggtgaccttgctccatcctccgagtaatgacatccaggccacagatgaggaaactcaggcacagagaggtaacatgcccacagtcacagtaacaagtggtaggacagggatctggtactgacagccaatggacactgcttgtccatcagctcctcacccagccccacctgcctcaccaaattccccacctccagcaggcctacgctgggcccaggctcaagctccctgtgtctcagcttcctcgcctgtaaaacaagagttataataatgcccacttcccaggatgggtgtgaagatgtcaactccagcagaatgcatatcaactgtaattctcagtgctgctgctgctatctgacagtggtggtggttcatatcaaggaacccgatgcaggtgtgggtgccatcaggaacaggtgcaaacccaaaagaagaggaagaggacctgccagtaggcagtaccaccaaggcccagaggcctggctctgcagacccgtgctcaatagggtaggtctcctctgggggaggacaggataggggtcagccatcctcagatggagtctttaggggctgagttactcctgggccctaaccaggcctggagagccaagcactgtcaggctgtgcccacccctcctcattcattgacatggcccaaagccactcagctgtctgggtcctgtgtgtcagatgccaatgggaactcagctcctcataaccaccctgtgagctagacaaccccacttaacagatgaggaaactgaggctcagagtggtaaagaacaaaaaacaataatgaaaacagctaacacagagggagcagttcctctatgccaggccctggagaaagagtgtcaattctatcatctcccttaattttcaaaaatagtctgagtgagggattgctgctgccagtatacagacgaggaaatcaaggcctggaaatgaaagttgcttgcccaaaatgccagcgccacccattaacagcatggggttcccaccttccagtctgattctggccaacctccattcacccgcagcccccagcacaaggcgggcagatgtcacggccgagcaggggtcaagccgatccctcaggacatttaatccagccttccccagtcctcgccaccatctctgcacacacgtgccacacatgtgcacacaagcacatgcatacatacctgcacatacatgcacacacgtgtgcttgtgtgcactgtgtgtacacatatatacatacatgtatacatgtatgtgtgcacacctgtatacacatatacacaggcatgcaaacacagctcctctccttatctctcttcctcaattgggggcataatcagggtgagggctgatagtgggacctggccagggaatttttttttaaccaactgcacttcctaccaatatccaccaaaagatgacaactatgcagaaacccttagcaaggtcagtaatcctgtcatagccccaagttggtgggacagtggcacagaggagcagcccttcaagggggcagagttgcggggcctgctgtgtgtgcaagtcctggacacagattcagcagagccaaggcctccctaattcccctcagaggccccaggcaggcgccagaacaggaactattgtctggtaagagacacgtggatctgatgctcccgccctaatttctctaactattacagattaaatcggggataatgtctctgatctagaaatcggattcgatgcagcttaaagcctgctcagacaccgcaccattatgctaagcagcgcgcctgcaaggaggctgccaccccctcgttaatcatccctggcagcaggagcacagccagtcagccccacctctggctccagcggcgaacacaagaggcagcgaggcctgggcccctttaccctctcgtggatggacagacagagggcagccatggccccctccctaatgccacatgcccaaagaaatagccaaagtgagaggtttcctttcaagacaccatttctgagagcctaagctgagctagtcctcgaatatcctcagagatgtaaattatgtgggttgagctaatgagctatatacgtatctttcatcccctaattaactgtggtttaatgaatttctcagtgcattgctgccagaatagccttgcagcccaaaagattttttcccctccattgcaggtaaatatttaaacaccccaaattaaaaggagcaccagggcccaaaattggaggcttgatgctacccagggtaattagacccctgtcgcactgattccatgttttcattttttcctttctcctcctgaggcgatggcgggggaccttaggcactaagaacctggcctggtacagagcctggggctccctgtagaccaactggcctgtgtccagctcccaatacctggaaactcctctcctgggctctgggggagtggattaagccaggggagggaagaggggacactacccgcctgcttctcccagagttggcacagaaaccccttacggcaagtgggccagtggcctggggaagttaggaaactgcccatgctggggctcatgtcccagcacctacccctcagacagtcacccattcctatggcctgtcaccatcatcactgcagctcctactaccattcgctttactccattcctcttctaccattcgctttactccattcctcctctaccattcgctttactccattcctcctctaccatttgctttactccattcctcctctaccatttgctttactccattcctcctctaccattcgctttactccattcctcctctactattcgctttactccattccttggtggcctctgcaaaacagagaaggccccacccaaaggaactgcctgtgacagtgctgtccccaagtggtgaatgggcatctcaggtggtccttgaagccacatgagtgagcagccaccactcacctgccccaaagctgtccctgccccactttcccatgagaagtttgggcagaaaggaagcccccgcttcccaccagccacagctggccggccttgggcactcacaaagccacaggccagaggtcagcagaagaagaaggctggggcagcacaggaagccagggaaggcaggaagaaggaaccctcatggtccccattccagctgcagcagccagcctccctgaggcagatgtcaagagtgtgcacgcatactcccaaacccaccatgatccatacaaaaaggagaggtgaaccaaaagctggggcaggcacccatgtgcctgggggccaagacgacccagggtcagggaaaaacacaagggtccttcccagctctgctctcccagggagccacgaggctgaaaggtcagtgccaccagaatctgggaaccagggcctgtgctgctccagaacctctctggccttgacttagagccagcctggagggcaaaggatgctctcccctcagctgcactcaccggccctgccactccctgaccccactaaccacagccaggcaggtaaagccacagggccttgtgaagccacggcccacctgggctccctgagggccctgtgtggacacttctcgctctcccgtggcctctctctgaggacagcctggcctgtctgctatctgagaggagcccagccctggccaccaacagaaggaacaagcaagggagctcctgacagtgactccagctgggtctcagccaccacaacccggccgcacctgggccagctcacagggaagaggaggagcctgagaatctgcccatccacatggggaccactgagccatctccccttgctggcattccctaccattaacccgggcctcctcaaagcccctgcctccttttccaggtccctccatccaccctccaccgcccagaaccctgtcccacccccacgtaccttgcacaagaaccccctcttgtcttcctgacaaccctgccacccacagggaatggcacagcctgaaagcttattctaggcctggtgttctcacagcagccacctctccaaagccaaccccctacacagggcctcccccagccagtgctggctcctacatgcccctccccactcaatttcagtaacaatcactgtgatgactgtactgatttgttcagagcccttggacagctcaccaagctctgtggcatccttggatcactaaatatggccccataagaatgactgatgtctcctctgcacattgcttatccaattagaaatgagcctcatctctttttgggtccatgctgcctgacaccgtgcctggaacaccacaggtgtcagtaaatacatgttggctcaatgactggatagactgatggtcagaaggacagatggacaagtgggcaagggggtaggtggatggatggatgagtggatgatggatggatggatggatggatatatgagtggatgggtgggtagatgaatagatgggtaagtagatggaaggacagagggatggacagatggatggatagatggatggatggatagatggatagacggatggatggatggatatatgagtggatgggtgggtagatgaatagatgggtgggtagatggaaagacagagggatggacagatggatggatggatggatgatggatgaatggatggatggacagatgagttgatgaatgaatggatggttggctgggtgggtagaaagagtataaaaggattgacagatagatggatgaatggatggatagataaattctcaaactagtcaccaaaaaagagaccaaaccagccccataacggtgaaagtttggctaagcagtctccaagggcagaaggctagaaggaaaggctctgggtcttccagtaaggggccatgactacccctaaaagttttttcaaagttgggaaactaagatgagagaggtgggagctagagtctgggattgagagggggaagtgccaaggaatgtgggaacaagcacactagacagagcagagactggcaccggctgggcccctgagaccccagggagcacccagccatgaactagagaggggatggcccagcactcctccttcaaggaggcctggcataggcacagagcccaggcagagtctgaagggaccaacttgagcccaagaccaagccctctgaacaccaaacatgtgttggtagttgtctccagatccaccaagcaggcccagaatgtggttatgaccaccctgacaaccagatccccccacaacctccacagagatgggggatcaacaagagctgcccccaaggggcccaatagagggagctgcccacccctcaaactgcctcccacttcccccagaatgttcagaatcactgcttgcttattaaattccttcccaataaaccaaagccacttccacaaagtaggcagacggtgcagacacagtggcttcagatggcaaaggcaccatctaatgaggcagctcctgccagcgggagtcaccttcacccaccttcacccccgcagcaggctggggctgcctgagcactgaggccccacgcacagcaccacccactgccatgctgggccccacctcagcaggtggccatattcagacagatctacagaaccaaattgggagagggagggcggagggattgcaacctggagtggttaaaacaataatatattatcaatcaacaaaaaataactatgagcttcagaatcagcagacttgaaagttttctttctgcactggtcgtacaaaacgttggataaatcccaatctctctagacctctgctccctgtctgcaaatcgggcatgacaattcttttttttttttttttttttttttttttttttgagacaaggtctcactctgttgccctggctgcagcggcacaatctcaactcactgcaacctccaccacctgggctcaagcgatcctcctacttcagcctcctgagtagctgggactacaaacatgcaccaccacacccagctaatttttgtattttttgtagacatggagtctcactatgttgctcagggtggtcttgaactcctgggctccagtgatccacctgccttggcctcccaaagtgttaggaatacagtgcccagcctgggcatgacgattcttacctctcagttgctatcaagattgaaggagctgaaaaagcaaatcagctcacaacacttgagccgtgcaggacctaggaaacagggccacccccaccctcagtttcccagggagaaggagccagcctgtctgatagctgcctccctcactggaggagccaagactgccagggggccgagatcagcacttaactttggtgcagggcagtccacaagggctcccagaaaaccctcctgttcccaaataccttccccttctgacagccacgatgcctggaaagccacgattaggtggggagagggtcccatactgagatctccctatttcttagaggatgggggatcccaggatgcccctcccttggcagcaggacctatgtcctggggttagacctgggagatcagagagggcttggcatttggccacccacaggctagtgagtcccaaggtcaccatcagtcctaccttcaaggacttctctggagttaagtcacagtctcctctggatccatccttggaccctcatatcccacaactcatcctctccagtctctgacatcagacaaatctacttgaacacagacctgattgtgcccctagcttggccctcagaccagccgcacaacagttggcatcccctttgagggtcttgactaccacccaagctcctctcctaccacactccacctccatttgtcttccacacaccccgactcacctccatttctacccccccacaccctcccccacaacaggaagatagctgtttcaggcctctatgcctttgcccaggcagtcccttcttcctgaaactcctctccctcaaccatcactttgctaatgctcagatggccttccttgagaaagcctccaatcaccacctccatcactgggcctccaggtcctctaatatatgtgttcttctatgtctatctccccacaatagaaccttccaatccccagttcctggtacagtaactcctcatcaatgtttgataaatggatggatggtggaaggatgaatggatggatggtgggtagatgaatgggtgggtagatggatggataggtgagtaggtgaatggggggtgggtggatagatggatggatgcatggatggatgggtgggtggaaggatggatgaatgggtgggtagttggatgggtgaatggatggatgtgtgggtagctgggtgggtggatagatggatgggtgagtaggtggatggatgcatgcatgtatgagtcaacaggaaggtcacataaagaagaggcaaaggcaaaagtcagtggggacattgcttccagtggccaaaatctcctccatgcagtctcctccagactgggaatagggcaggtttccctctgttccaggcattcaaggtggccctaagcaaaggcagagggttggctgaggtacctctccagcttcccctcaacattaagttttcccctcctgctgcctttgagcagcccctccgtttctacagttaccatccccatgcacaggtcttcttggaagaagagccattcaggacagtttcagcattgcagtgtattcatcagccaagagaaatggtctcagtaagcagcaggcagcttgtgtgagtgtgctgtgttttggctcccagtggggcactcagcaggctaatctaaggaatgcttaaaaattgcatgtgtactggggggcagcccccgcccggccagctgcccagtctgggaggtggggggcagcccccgcctggccagctgccctgtctgggaggtggggggcagcccccgcctggccagccgcccagtccgggaggtgggggacagcccccgcccagccgccgccccgtctgggaggtggggggcgcctctgcccagccacccggtctgggaagtggggagcccctctgcccggccgccaccccgtctgggaggtggggggcccctctgcccggccaccaccctgtctgggaggtgtacccaacagctcattgagaacgggccatgatgacaaaggaggttttgtcgaatagaaaagggggaaatgtggggaaaggaaggagagatcagattgttattgtgtctgtgtagaaagaagtagacataggagactccattttgtcctgtactaggaaaaattcttctgccttgggatgctgttaatctataaccttacccccaaccccgtgctctctgaaacatgtgctgtgtccactaagggttaaatggattaagggcggtgcaagttgtgctttgttaaacagatgcttgaaagcagcatactcgttaagagtcatcaccactccctaatctcaactacccagggacacaatcactgcggaaggaaggcggcagggccctctgcctaggaaaaccagagacctttcttcacatgtttatcttctgaccttccctccactattgtcctatgaccctgccaaatccccctctccgagaaacacccaagaatgatcaataaatactaaaaaaaaaaaaaaaaaaaaaaaaaattgcatgtatttttatatgcaatatgacatatttatgccaaattactgacagcattggggccatggctggtcctcatacccgaggctcagttccctcatgtctgcgggagctggtccctcaagccttgcagggctactacctcagcttttcctggaaaaccctagatttacagccctctgcttgcctccctagaacatcaggcccctgacaggagtggcctggggatctgggatcagggctgggcactgacccaggaagggaagctcagaagctcctcctccaaagttgtcacacttcagaatctgccaatcactgctgacaagtgtcagagccaggaccaggcatcagccagattgaaacaggccttcaccaggggtcaggaagcacagatacctagcacctgtatggcctgacattcatatctaaaaacacttttgatgaccctgagcagctcagggctgggctgtcttagagtgctctgtgagcacaaacctcccacaggaatatcctgtgagcacaaacctcccccatgggataggcactctcattgcctaaaggagtcatctgcagcaagaccagcagtggcacctgcatcttgggctatggttagatgtcatcctcactatcacttgcagaggttggtacgggtgtccccgttccatacatgaggaaactgaggctctgaccttacctggagttgctccactactaagtagcagagccagatacagagcccaggtccagctgacccacggccctagggtgctctcctctctgccttggacctgtgaagcagtactggattctaagggaggcagggcaatgccagtcctcactccagcagagaccgggatgtggcccaagaagagcgttaatatcacgcccagcctgcagtgtcttccttcagcctcgggctgtccaactcagtcacatccatccaggcctggtccaacatcaccttcgttgtgggcctcctgggactccccaggcagttcatgtgcctcctgctctgtgcttcctccactgcagcaagcctagtacatccctccattagaatactcatcacactgcactgtaaggattacttacgggtctgtgtgaatggatccacaaagtgcatgaataaacagatgaataaataaatacgtggtttgacaccatctctactttggtgtgcaaattctgtatgtctccaggaatggagaagaaactcatcttccccctaacaagctacagtcaatgacttccatttttctacaccaaagacactcagcatctgtcacctttgttggtagccaagtgacaccatctgatgcctactgtggtcgagtggtggaaggatgtatttacatagtttgtgctccctgagataacattaccgtctctgggggcctccggctgagtgtgagatattggtgcacagcctgaattacctccacagtgatttcatgctgaatttgctgagtctccaagcaaagtcataaatgtaaaggaggagtgtttctctgggcctttgccacatctttcatccagaaaataagtggtgataatatttgtaatatgtttactgacagaaccaggggctctgggcagataactcttttatgacacaaagtacttaactaagatggaaaatggcattactcatgttaaatttaaaatgagcattttgtcccagattgctagaaacccagtaaatgtcattagctctctgaggttacaatgaaatccgaaaagggttactttttggtaattacatttactgtagctatagaaaccagggacatcagacacagccaggctgacagctctgtcttttcccctaagatcagctcatctgcatgtggccatctccaaaagccgggttccacatcctgcatctctgcatcggaggcctgctcttgggagaactgttttccccacaggcaccaggctggagccccaggacacaggctgctgtgattcttcattggaaactgatgataaaagacagagataagaacgctcttcctgtggcttctgcattgaaatgtgcctcctgaatgtgtgcagggagtgaggcttcctggggccatcgttctgtggcagatgcattactgaaggccagcatgaaattgtgcaaagcacttcctcagcacagagctgtacattgccgctccccagcccatccgaacactcctccctcccaggcccagagacacacccacccagccaggccctgaagctccacccgccttcttggactacactgcagcatgggaggacaagaaggccaggccccgagggcatcaggaaaggggatcaggacagacacacgagggaacttgggagctggagccaccttcagcctcagtgggaaataggccaatgtccgtgttagccagctagaagggccagccccttccctctccacctgtaaccaccttccctcacgatccatgacacagcaacaactccctcaccatctgtgacacttgacaccgaccctcacatctatgacaaagccataccttccctcacctcaggtatgtgactgccagctacttcccctccatctgggacaggcagcacctgccctcaccacctgtacagaaagccaacagctttccttaccacccaccaacactaacaccttgatttgtcacctgtcaccgccacccccttcccttgccacccagacctacagccaacagctttcctcattactgataccaggcaacaccctcctacaccacctatgtgcatgacagcaaacacctttccttagcacaggatagcaaccaacactttccctcagcacctgtgacagtcagcctcctccctcacaaccccatgagacaaccaacacctgtcctcaccacctgtgagtgctgacacctgccctcaccaactgagggagctaatgcctgcccttgccttctggaggtaaccagaatttcccacatcatcttcatctaggccagaggttctcaaagtggggtccccagaccagcagcaccagcatctcctgggaacttgttagatttcaatttcttacaaattctcagacaaacatagcaaatcagaaacttttgaggtggggctctgtaattgtgtcttttgacaagatccaggtgacggatgcacataaaatttgagaactaccgtagctgctccttagaatcacctgggtagctttcaaaacccttgatactcacgttgcagccccatagtgcgggagcctggagtcagtgttcacacactcctggatgattcatgcagctggggccacaccctggccctgtgtgcttctccacaatggcaggcagggcccagtaggcttccagctgtgctgccactaaagcagagccgctgaagcctggggctgcccatcacctgtcagatgcccagcagctccccactggaccacagaaatgcctaggagacaagagttcctgcaagcgaacctggctgaaccagtgccggctgcacagccccagccagggatccccaagcaggctggccttgcctgagggaccctcactaaagcaggggaaaacctccaggactcaggaagcacagataaggaccagcccctggagaaagccacatgaggaagcccagggcaaacaactccagcctgagcctggcctccacacccccaagaccaggcctgcccttggtcatagccactctccctgatcctttcccactgtgtctcctgctccatgggctccccacccacctggatgtcaccccacacccttgtcccccactccctggggaatcacaagtatttaagaagggcgtgcaaagaagcaagccaagatgcaaacatgcttttcttttctttattttcaaatattctgtcatgcatctatattgtatctgtactttaaaattaataattaaaacaaactgtgtccagagaagctggacagagaagctgtctctccatcccaagggatcaatgcctatataattcacaagactctttgggacattaacaagtaactgagtgcagcacaacttggaggctgggtagcacttttagagaagcgcactaaggccaaggtcaatgtcccctgacactcatatactagcccctcaggaggccctccctgtgctcaccacccttgggatgcagtggctgagctcccttgccacctgtgtgcacatctggctaggctctgtgcacctgtggctcgggtcacccttttcctcctgcagtcgcaagctctcttgcccggtgcccagccttgtggcactggcaaactgacacctgtcatcacctcagagaggacgtgcactgccccctggggacctagggtgtccccagcactgtccccataaggatttggtttggtcctatcagctaggatgtcagagctagagagatggctgcgtgcactcacttgtgctgggctgagtcggcaggtggacagaccacttgagcaggagccccaggggcctcgcctgggctgcccagctccacacacaccacatctcacctcccatgtccaacacagtctgccctgtcttctgaagctgccgcacccccaaccactacacggcctcccccatggtgtgcacaacagccggtaaccagggctcctggagaggatcccagggtcattcggatcacagcccttgcctttccttaaaatacaggcatgaaacagaaatcttccagctcagcagtagttggcacagcttttccagacgcacaggtgggtctgtgtgaattttgtctgtgtgtcttgctcaggacagccctggacagaagggtgactccatgggcccctacccaatagctccaactcctaggaactctgactgctcttctttcccctattgtcaccctgaggctgcatctctggccacggcaggggctctgctcccacaaggaacagcccagttggctcccatgggcactgaatttgctaagatgatatcaatgtctcagggtgctgtggttcacacctgtaatcccagcatttcaggaggctgaggtgggaggatcacttgagcccaggagtctgaggctacagtgaaccatgatggcaccactgcactccaccctgggtgacagagtgagaccctgtctctaaataattaattaattaaatgtcgtcatgtccccatgactgcaattaaactcaccctgttggcaagagggtccaaaagtgacgattgacagagaagctctctctctctctccatcccaagggatctctctttgtctctctctctctctcttcatatatgtatatataattcacaagactctttgggacattaacaagtaacctagtgcagcacaacatggaggattagagaagcacatgagatcacagcctgacctggtgagctgcctattctgctggtgtctcccgtccactctgttgtgtgcccttcaaagctggcctctatggactcagctcctgggctcccttgccccttggcttctacctggcttcagccaccgggaagcatcagcagatcagagggctgagctgggcctgggtttacagtagctgtgttccccagtgaaggacacagttcccactggcagcccctctctgcctgctgcatccttctctcaggctcagcaacacagcccctgtcccttcaggcccagggatagtgcatctccctagcactgataccctctgagtgcttccctgtccctgctgggttcctctgtattcaaatctgttcagtgcccctttggaatacgtgatctgtttcttcccaaacactgactaaagcacctcaagagtcaacaaccttaggctttgacgcagagttggatttcaatgaggtattcacacagtcctctctgaggtgggctgggtgctagtgcaattaggtgcattcagagataacaactggcagagtctctagtgataggccttagggctctatcctcagacctgtctgctcaacagttttatcaatgactgcagaggatattgattgctactgattccacttgagagagacttaatacagtgtgtgggatacaaaaagatctggccatctggaccaatgggccataatgagcaaaacggagctcaacagagatggattgagagtcacagacataagaacaggtggaaaagactcaactaggagcttgtgggagaagatctggatgcaactacctttaagcttaatataagccaacagactgatgtggccaccactgtgtgaattcatgatatcataccctagataaggagggagagatcccctccaaacagtccagatggcagctgagcgctgagatccattctgggctctacattcagtagggacagtgatactatggggaagaattagaagggaatagccaggcaggtgtatgggacacagaactcatcatggggcatggctgagaaacacagagagggcctgggagaaggcagactaagtgtgaagatgacatgagcgccaactccagacacctaaaaggattatctccaggaagataaagaacaggggagcaatgccaaggaggttccccctttaatccaattaaaacagtctgtaatccactgaaacaaagacttcctcagcagcaccaacagcaatgagcaaaacacatgcccagtctctaactgcaggcttcctgccaccaaccatggtgctggttggtgtcccgcctccagccccacaacttagttttctaccccagtgaggcttctaaacccctcagcaaaacaggaagaaacaacagagaaaactcaaagtgcagtaaataggtaaaggaaataaaaatccctacagtccagtttcaaaatttcatgagaatagccaaccctaaaacagactcacatatagagcataagattttagaaaaatactaccaattattttcaaagataaaaaaatacatcagctgaatgatataattcaaaacaaaattaatatctgtatgattctaatagaatcactgttggaagctgtaaaaaacaaaattggtattgccaagaaaccataccagtgaaacaaagaatatatttgagaaatgtatttgtcagtttaagctaagatatgctactgtaacaagcaaccccaaaatctcagtggcttaaatcagcaaaaagtgattttcctctcacactttttttgtaggttgtttatggtaggttggctgcagctctgtcccacagcatctttattccaagacccaggcttgagggagaagcccccatctctcatggcagagggaaaaacaaaccatgtggcagctcttagagcttgttcaaaagaggcctctgtcactttcaccctcacttcattggccctggcaagtcacatggccaaggatgacatcataagggcagcttgtaaatcctcccacagagagaagcagtggatattttgaacaatgaaacaatctactccacatatccagacaacagactaagtaagtggaggctttttgtaatgtgaaagatgacacatacaagagaaaatgcagggagaacccaattacagggacacgatttccaaagaagacataagaaactgatcatagctgatcatcacctcaatagaaaaattcctggaactgaacgaagaactgagattagaaatcaaaaggacaaaaccagtcttagtttatgcacagaaattaatgctaagtttcataactgaacaatgcttaaatttcaaagaaaaagagagaacctctgatgaggaaaacagagcagctgtggcctcaaaaaggtgggcgctgatggctggacacaggccaacatgtgctgcccagctgtgcccttaaagctgcaggaggagctataagaacatgaagctgtttcctttgacgacccagccccctgccctagggcaagtggcctagcctagcctctttgcaagctgtcagccctaacagtttaacccaaaaatgtaaagacaagattctgtttccagacctctgcagtctttacctctctctctacctctctctctctctcctctctccttaatctgtacctatccatgttcactgatgacaactaatgactttcctcccttgtgtgcgtgtaaacaatgcgtacagaaagttgaatgtctctgaattattaaagaatatcattaaattatgtaaatacatctatatcattacatacgaggttgtatattaatttaaaaatacaaattgtcaaggaaaaacttgggtactgccaacataggggagtggggaatctgtaagtttcaaatcagaaatgaagtcaattatttcaaattcaatcaagtgcagagtccagttgcattcctaataacacatgtctgtgtgtgtgtgtgtgtgtgcacgcacatgcgtgtgcaagtctgcacaaatggcaggggcagggaaggaaagacagcagaaggcaaagggaagagagtccagtaaggaaagtgaactgagaggaagaggccagatagaggccacactctgacctcttccatagcaggctccaaatagtgatcaagaagtccctgagacccaccagcagtccctctgaaggttcctccattcagtgggaagcacctagtcacctggctcactaggatttctcactggggaagcacatgagagcccaggcagtggtttctccttgtgaattaatacgctggcttgtgttcagccaaaaatcagtctcttctgagcttggttagtgtgaactggtctctagctggtcctgagataacagtgagcctgccctcaccccatggaacacctgtgtggagtagtcagggcaacaaccagcattcctctcctgcaccttgttctctgttctaccttcaacagggaaatctgagtaccaaccacgtggcttccttccacttttgggccagcattggaaagcactgattccatcccaggcactcagctacagactgtggatattacttcatgataatacttacaccaatctttacaaacagcacgtaccagtaacaccttcattttagaaatgaggaaagccaggctcagagaagttaggtaactttccctaggtcacacagcaagtgacaaagctagatttacaagccagatctgcctctaagaacttctatgctcccaccaccccaaccatgtgtcccactctgtcttcctggttggagcttcatcaataatccctggactctaatgggaccttcaggagctcccggtcctcatagggatgcagacagacacaactggaatggacaccagtagcagatgacatcctagaaggctcaaggcagaggccagggagggctgttaagagctgggccatcggaatgagtaagaaggcagaggtgggatgtgagcctccagaaaatggaaaatcctcgcccagccccacgtcccctgagcctgattgggaatgagataaccatgataacagacacggacagtgatggaaagcatggtccccagagacaccccttcattcagactccacaattaccagcacacacatgccaagccactcggctccagagctgataagacagccggttccttcacctgtgatggaggaaatgttttgtattttctgctttagctttaatttggagctaaacaaagacccagcaggtgggagaaggagtgctgcctggagagccttctcctagcctcctaaacacacgttcctcaaaccgaagaaaaagctgggtgtgggctgcaaagcccggagaagcctctgtgcccactccacagggagcaaaacacccagccatgagggctggggcccctgtagcaacccaggttctatgcttggtgcttcctccccacaaccctgggaggtggtactatgattatctcgattttatggatgaggaaactgaggcttacacaagttatgtgacttgcaaaataacaggacagaaccaaatttgaagctacccctatctgagcccagagctctatgctagcagggcctgcaggacccctgggggagaaaaagggcccccaggacctgccggcatggcaaaggggtgagattcaaagctggccacagactatccattgcatagtgaggatcggatgtgaaaagcacttagcacagagcctggcactgggcaaatgctcagtagctgtcattactcagaagactgcaagcaccacaaggacagagacctcatctgctttgctcacctggagagcacccaatgtactgggaaggaggtgctccactaaccgctaggacccatattcctgccccaagccaggggcgttttcctcttccaacctcttggttaggtcagtgagaaactcgagtggatcaggtaagaaggagcaaggccaaaaggacaaggaaaaggcagcgcaagacagaggcaacccaccatcccaaaggccagatcctgctggatgcagcaaaaccccaggtcacccactctcacctgagcaggggcattgaggtggcacacacacacatacacatccgggcagccaccagcatccaggtcatcctgctccccagtcaacccctggaggtcacacaaggcttcattgcttaccattgtatctcagagcctggcacaagtatgtgctccataagcatttgttacaggacattggggcccaaagagctgtgtgccagacatcagcccaggagcttcactcttcatgccagtctcacaaagtgaaagcattattctggcatcggcaggtgaaaactgaggctcggataggtgaagcagtgtgtccagcgtaacacagccaggaggtggcagtggtgaatctggccccaaagcctgcgctctttacactgtgcaagtcaccttctagaaggaggaggaagcaggggaagaaaggcgctgatctgaaagcagttagtctgcccctcagcagcctctcggagctctgctcctactgagcccaggaagccaggcagaaaccaagcacaatggctcctggaggcaatggctgtctttaagtttggcccagagcaaagccaagctctccactgagattctgatcccacccagccaggggcttactaggcactggccagaccttgggcacccaggaagggaggctttattcccccacccacctcgaagagcttgcgtccttcagttcggccccctggtccatgccacagggtctaggcccagccggacagcagcctcctgggtccccacaccccaccacaccatcttgggcatggatgctggcagagggccaagagtggagggcgccttctggaggaagggaacgtggctccacccccaagcgttctcttattacgtgctctggaccacagccctgttaggaagggccccttccccacttcactgttaacaaactgagctcagagaggttaaataacttgcctgaagatcgcccagctggccaacgacacgcaaacctagggacacaaaacgcaaagccctaaccaaggaacactgcctctcagcgcaccctaattccaaccccgattctgccagacttctgcgttgtccacacaactaaaggtttgctcctttaccatggaggcttggcgacagagagcccaggagccagaagccctgagcccgcccccgcaggaagctccctgcgcggcgttcccaggccggcatcgcccgccctccctcccccgagagcataggctgcgtttgtgggaaaccagggctcagcgcgctgggagggagtcaatttattctggagaaaacatctttgttctgcgagtgaaggggagccatttccaacaatttaatgctctgttcgcgggcccgggtgctggggttgcagcacgaggcttgttcttcgaggcagagccgcacataatgaggcttctcactactgctccccgtcatcgtgccaaaaaccagaacggttatttatccattaatctgacattacaccccctgcattttatctgcttaaataaatttggtggttagagtgtgtgcctggcggagaagctcccgcattcaattcccttcgcgccacggcgcgcaacgttgccattgtaaaccggccttggagtggcggggccgcggtgggccagctgggaaatgagacggcagcggggaggatcccgcctctcccagctcgtcagaatccaggcccaacgggacggttccccagacactgacttcggggttccagcgtgcagcaccaagtcacgtgggcgccgtggcctttcacctgcagaacaagccgcccccttcgccagcacctacaggcagcgagaacagaggccaaaccccgtcctagaccccactgcctgggctggaatcctgctgtgccactcactagttgtgggaccttgagatgtcacctcacctctgatgcctgtttccccacctccctccccctcgggttgtgagaattgagtcactatttataaagtgcttagaacagtgcctggtacatatcaagtgctcaataagagttggttttaaaatattaatttttaaaatctaggacaattgtttatgtttggaagtaggctttggagatgggctagaccactgggtttccccacctcaacccacttcactaagttaagaaaagtgggtttcatggaatatttcatttgaacaaagagtgccactgcttgaaaatatttggctcacattttgcagaggagcaaacagaaagccagagaggggaagggacttgtccaggagcctctgcaagttcacagcagagctgggagccgaatccaggctgcccacctgccgggtcaggtgttttattggcagcatgagctcctgggatgttcattcacctcattttcattgccagtcacgctgacccacagaaggtactgctgggcaccctcctctcccatcccagcagctgcagtaccaccccacgctggagctaagagcccagccccaccaacaggtgagacccatgaccctcagacttcaacacgccccactctggagcctggccaggccttttcatttgtccttcatttgttctttcctatcatcctctggttctctacaacatttccttggcccggaaacttgctggaacttcctgcctgtcctccctacatctgtctgccccttgtaccctgtacccctgccccataggctggagactaccccagagggaggaatcccaccaccactcagtcccttggatgtgggccccccttggaagcagttttgcccagctcagatccagcctgagctcaccacactctctaggagcccattcctgaacacctcccagaggctggccactccacctggagagcaaggtttccacaatcttctctggctcaggagggcctggcctgatgccccacgctgactgtggaggtaggttgggagcgaagtggtgagtctgtaaccagagagaagagccatgtcccatgcaggagccgctctgcccaggcagctgcaggcccagcccctgcctccttcagagcaacagagaggcaggcatgcgggcagacagacgcccaacacagagacctcccacacgctcgtctgtgtcaccgccgccccttcctggttggccctgcagacgaggaagccctccaacctgcagccaaattcactccttgctgacaagaggctcctagaggagaagggctactccccggcccccaggaaactctctgaacatagctatctgccatcaaggcctggatcagccaagcaggagctgcacttgcccagccttttccttcctagccacacttaagcaagacaagtggcatgggcacggagaggctcccctggccacacactgggcagggacagacctgggctactcatcctttctgagcagctagcctggcccaggcctgcagactgagtggcccaccctgcccggccccccataggcatgagctcccatacccccacctcaggcatggttccattataacaaattatcctcgttcacctcccactccacttctctgacggctccctctcttgactcttgtcctgcctttgtcccatccttgcccccgaccgatggctgctattgcaaaagtgatccgagttctgaatttcagcagcatttgatcatttcaactggacccagccctgataacctgtgccaggcactgtgccaagtgctttaaaatctaggacttaattaggtatgacccttctattttacagatgaggacactgaggcttgcccacaggcatagagctattaagtggcccagcgtggatttgaatccagatgtgtctgaatccagagccccaggtcttaccaccagccctgccacgtggctggcacacccacagatgtgttctcaccccatgagtaaaatcagacactcattcttgctcttgcagccatagaggttggagggaagagggctgagcccctcaggggatggtttctgcaagttctgttcagggatctgtcttccttcagtgccactaacactcacctgtcattgcaggcaagaggaaatcaacattttacagcaataaaaggctgctcctggttaggcatcaaacgaatcaatcttctctgacagttaattttcattttgcaactttccccagcaacaacagcaagtaatgaccctgaggatctgcaaagtcgctgatcagcagcccagcctcccatactcctgactcatccactgccctggctcagccccttgccacccatgcccaccattcacctcccccttcagccctctgagatccaggggtctctctgcccagtgacccctctcagaggctcaggtctaaacttccccgtggagcgctgagacaagaaacagacacaccagagctcacagttgaagccaccctgctggggtagtcactgaggaccccctggccaacagcaccattccatcctcgctgctcccacctcccacctcatcagtgatcctccccctcctgataacccatcatcactgcctccctaacacacctatgaccccagctatgactccaggacctgccaccaacccccaatgcacagcaccagtgacgccatcagaaagctcctccagcaaatccctctaattcctgcaaacctcctcccagagcattcacacacggcatccctgcctacccccaaattccatcaataaccccaaaactaccacatctgacccccaaatacaccatgccttcccagcacttctacacagctgaggagcccccaggctctgcacctgtccccagccctgccctaatctggttcgaggcttcctgatcttttacacaccacagtcagatgagaggattctttcccaggggagggccctcctgcccaactcccatgatcccaggtcagtgatgagtgtcagcccagctcagagccgccaggcccaattctccagaacctactctgtggcctggcaagagagataagaaaaggcccactgggcccctggactgtggctccatggtggcctctacaccaattgcagcagctttcacaggcttaggaaaccctcttggtcccctgaaccctgggattcacaggcagcatggagcttaagtccccagagttttctcatgaggcctactacttcctgccgggctataggattgggtagtgggactccccctacccctccacttccccaaaatgcccaagaccaggcaaacaccaagccaaggaggactcttcccctatccccacagagcctctgtccccaagaacaagagtaaataccatttagtgaggctctctgtgtgcctagcatggtgccagccaggctgaccactcagcacagggccacgtcagcatcacgtcacggcatggattcccaccccgggaaagtgcttggcacacagcagacagccacaaacatgtattaaataaatgaatagatggaatgccttccaactgttacctcatgaaatatctcagcccctgcaagctggatattatcatcccaacttcaatttgaggaaacaggcttcaaaagggcagcttgcagctgaaagtcatgtagccatcaatgggcagagccacattcaaacccaaatctgtgcaaactcagaggctctgctgtctctgatccacatacggtcccattcaacaaggacaacagcggtgatggcagctcaacccagccccgccctggggctgctgagtgcccatctcttcctgacaccaaactgcagctccaggaagtacaggcggcagcccctacatctccctggcaacccaggagcttttgttcaggaagaatgaagctgattcatccccccagggtgaacagcagggtctagacctgtgaatgcagcctagagccacccaggctggatagatgcatgcagggacggggcccttgctggagtttctgggcaggcagttccgagtgcccaccacacccactagccagaactccacggccatggctcagctgaaagacaacaaaagggacatgacatcccacccacaatgaagaaagccttactcctggccctgcccagctctccagcctcctcctctgcccacacacttccataggtccccagagctccagagacacaggccactagcctgcacccagcactgtgctctctcatccctgaaccttttcacactttgtccctcaaactgcagaggcccttccattcttgcacctcactagggatttcttagcttcaaactgggggttcagacactgttgcctctgcagttctccctgtgaagaatgtgtcactgctctgcgcacccacagcccggtgctcgcctgtgtcatgcacagtcatcttacccggaggcaaacctttcctgggttataactgtcccttccctagacagtaagcttctggaggggcccctctccaccaagcagccccagtttcagcacagaaagacacacacggggcatctgaaagtcaccactgatgggagctttcagggtatccatagttaactgctacccggtatgctccccaactcctcagagctaggcctgccagggacctgctctggccaataaaatggaagccgtgtgataagcatttcttcccggcagatgtttccaagctggttccagcttcccggttcctctctaccggtatcaccaacagcatttggatactggctgcttgtcagcctgtttcctggaggaagaggatggcagggagcatagcccaggaccgtccgtgatggacatgcagcctgagcaaggaatcagtcactgaagtgtgggggttgtttgttaccacgggggctagcccatttgaacccatgcaaggcgtgagagaaccatgcttcctgcagcatccaggccagcacaagggtcagggactcgaataggaggccaccaacaccatttgctggctttctacataggcttagtgccagatatgtccctatgataaccacatgatgaaatctgaaaaagtaagaggcacgtgaagcatgttagaaagattggggtttggagccgggcgcagtggctcacacctataatcccagcactctgggatgccaaggcgggctgatcacttaaggtcaggagtttgagactagcctggtcaacatggtgaaaccccatctctactaaaaatacaaaaatgagctgggtgtggtggcacatgcctgtagtcccagctacttgggaggctgaggcaggaggcttgcttgacctgtgaggcggaggttgcagtgagctgagatcacgccactgcactccagcccgggtgacagagtgagactctgtctcaaaaaaaaatgaaaagaaagattggggtttggaaagcagacttgggttcaaatccaagctaagtcacgtctgtgaccttggacaaaccccttcacctctgtgaaccttggtttccttatcctaaagtaggtgcaacaaaacctacctcccagtgcattcttaaaataacaggagcacagacatcacataaaaagtgtctagaacattgagaattttccattgctcagggtggctaacctttgattagctccaagatgcctggaggggtgggggcagaatgaaatggcctgagtcccaagccctggactgggcaggctccagcacggccaggtaactgaggataggctgtatctaagatgacactcactcacacagggcacacagaggccccagctcctgctgtgtggcctcactgaggccaatactccaagttatgcacccagctcccttgccccttcacccacacacattctgagagacaccatttctggctctgcacactggctgacattgacccctgctaattaggagttctcttggcctcggcctctgcacactggctgacattgacccctggctaattaggagttctcttggcctcggcctcttgcctctcctggttctcagtccttcctctcatcctccctggtcacagctggccctttcctcaggccccatctagggctgctttcactcccctttagtctcaattcccaagctggacttctgaggcagattggcagcaacttcttggaggtaggggcacatcctgtttgcttttttgctttttgctgtccctctaagccctctaagatatgggacccacatttattgaccatcgcctaggtgtactccatggaaaccctgaaagatgcctgtaatacaaggtcccatttcactgtactacgggcactaagaccccctgtagggaaggggtctacagggctcacacatgagtcttctgacccaagctcctctctacagcctccctcacagaattaaacatccccttcccttaatactaaacaaatctatccttatttgtaggtcttcctggaacagcgtttataattgcattcaatgaaaacattttaaatgaatctaattcttaatagtttggaaacatggaacatctgctttgtctgagcagccgaatcttctgattaaaacaatgataaactctttccctcaccccttcagactgtggcctccttgagggcaggggctatgcattgttccattcagtacccactgcagcctggcacagaacagtgatcagtagcagattaaatcattaaatcactatccacctcactccaacaattgcctcctctctaccacccccacccttcattctctccattccctccatcattaaatgagctcagatacaactatttaaaaaataataataattggtccaggcgcagtggctcatgcctgtaatcccagcattttgggagaccaaggcgggtggatcacttgaggtcagcagttcgaaaccaccctggccaacatggtgcagccctgtctctagcaaaaacacaaaaattagccaggtgtggtggtgcgtgcctgtaatcccagctactcaggaggctgacgtaggagaactacttgaacccaggaggcagaggttgcagtgagccgagattgtgccactgcactccagcctgggcaatagagcgagactccgtctcaaaaaataataataataataaaaacaatttgtacttctgcttctaacccagctaaagtaagaggaatctagtttgccaatcagaatttattcatggaataaccaaataaaaaaatgagcaaaatatatggagcaatggtttttcaagacattggagagaaggcaatgaaggacagtgattccagaggctaagatcaaacaaggcaagccctacaatttcttcagctgtctttcttcccaaggtgacacaggaggcagagtctagcagatgtcctgagttgcagatttggagctcagagtctagagacaaaggctgccagagttcacaggacagagtaccagagaagagtgatgggcacagagaaagacacctggcgagctttcagaaactcccactcaagtgttcagcagagtgtgagcaaacgccccaaagccaggagaagaatcatccaaaagatttgaaggaatagtatctggtactctcaagaacagtgactgttttcaaaccctcatgattcacaggacattgggtagagtatgtagaaaggtcctgcctcagtagtagtagctctgtcctgcctagccaatagtaaaaacaagacccaaaaggatcagactatttccacataactgcattccagaataaagcccaaggatatttctacgaatgcaaaaatatccatcacaatgtctggaatccaatcaaaactgattaggtatgtagagaagcaggaaaaaaatttacccatgtgaagaaaaaaatcaatcgatcaaaatcaaaccacaactgaaacagatgttggaattagaagacaaagatattaaaacagtcattataactacatgccgtatgttcaaacgttaagtagagacatggaagatttaaaataagatgcaaatcaagcttctagagatgaaaagtacaatatgtgagatttaaaaaataaactgaattggattaatgtcaaatttgatacagcaggaaaaaattagcaaatttaaatacatggaaaaagaaactatccaaagttaaatacagacagaaaaataatcaaaaaagagaaaagaagaaagaaagtaatactggtgagcaatgggacaacttcaagtggtctaacatatgtgtaactggagtcccagaggggaggagagtgggaggaaacagaaaaaatatttatagaaataattcatgaaaaatttcaaatttgacaaaaaccataaatgcacagatgcaaaaattttaagaaatcataagcacaagaaacatgaagaaaaatacatcaagacacattataatcaaaatgctcaaaatcaagataaagagaaaatcttaaaggcagccagagaaatatattatgttcagaggaacaaggataaggatgacagtaaatttcttatcagaaacaatacaaatagaagacaatggagaaacatctttagtattgaaagagagaaaaactatcaacctagatttttataccatgaaaaaaaatctttcaaaaatgatggtggaggagaacggcagagtagacagctccaagttctaatcttcctacagaaacattcaaaaaatgaacaaataaaaaaagcagaaactgccagagccaactttgtcaaaactctggaaaacagtcaaaggtttacagcaaccaagagaacacttagtcaagaaaaaggcaactttaggaaggtattgtggcatttttacttgcccatgccccatccctcccccagcatgatgttatgttgaagtggtaccatcttgaagtgccatcccatgttcccaatataagaccttcatctctagttctagagggagcagagcagatattattcacaaattattgtgactatctgttataggctgtctgagggatacctgaaggattgatacaagacactcttctatgttccccctaacttggaacttagaccaaaaagtgacaggcattactcacaacattgcaaagcaaactaacaactcaaagacacttgggacaaaagacacagttgagacatacaatagactgcctaagacctgtgaggaatagcttggaacattctttgggaaagtggtacactcaaaagtacctatttatactgaggaatttagaaagctacattaggcatagggcaagatgcatgctaagaaaagaaataagaagaccctaagctttctctaggcacactaatctctttttgtttgtttgtttgtttgtttttgttttttattattattatactttaagttttagggtacatgtgcacaatgtgcaggttagctacatatgtatacatgtgacatgctggtgtgctacacccattaactcaacatttagcattaggtatatctcctaatgctatccctccccactccccccaccccacaacagtccccagagtgtgatgttccccttcctctgtccatgtgttctcattgttcaattcccacctatgagtgagaacatgcggtgtttggttttttgcccttgcgatagtttactgagaatgatgatttccaatttcatccatgtccctacaaaggacatgaactcatcattttttatggctgcatagtattccatggtgtatatgtgccacattttcttaatccagtctatcattgttggacatttgggttggttccaagtctttgctattgtgaatagtgctgcaataaacatacgtctgcatgtgtctttatagcagcatgatttatagtcctttgggtatatacccagtaatgggatggctgggtcaaatggtaattctagttctagatccctgaggaatctccacactgacttccacaatggttgaactagtttacagtcccaccaacagtgtaaaagtgttcctatttctccacatcctctccagcacctgttgtttcctgactttttaatgattgccattctaactggtgtgaggtagtatctcattgtggttttgatttgcatttctctgatggccagtgatggtgagcattttttcatgtgttttttggctgcataaatgtcttcttttgagaagtgtctgttcatatccttcgcccactttttgatggggttgtttgttttttcttgtaaatttgtttgagttcattgtagattctggatattagccctttgtcagatgagtaggttgcaaaaattttctcccattctgtaggttgcctgttcactctcatggtagtttcttttgctgtgcagaagctctttagtttaattagatcccatttgtcaattttggcttttgttgccattgcttttggtgttttagacatgaagtccttgcccatgcctatgtcctgaatggtaatgcctaggttttcttctagggtttttatggttgtaggtctaatgtttaagtatttaatccatcttgaattaatttttgtataaggtgtaaggaagggatccagtttcagctttctacatatggctagccagttttcccagcaccatttattaaatagggaatcctttccccattgcttgtttttctcaggtttgtcaaagatccgatagttgtagatatgcggcattatttctgagggctctgttctgttccagatctgtatctctgttttggtaccagtaccatgctgttttggtgactgtagccttgtagtatagtttgaagtcagatagcgtgatgcctccagctttgttcttttggcttaggattgacttggcaaggcgggctcttttttggttccatatgaactttaaactagttttttccaatactgtgaagaaagtcattggtagcttgatggagatggcattgaatctataaattaccttgggcagtatggccattttcatgatattgattcttcctacccatgagcatggaatgttcttccatttctttgtatcctcttttatttcattgagcagtggtttgtagttctccttgaagaggtccttcacgtcccttgtaagttagattcctaggtattttattctctttgaagcaattgtgaatgggagttcactcatgatttggctctctgtttgtctgttattggtgtataagaatgcttgtgatttttgtacattgattttgtatcctgagactttgctgaagttgcttatcagcttaaggagattttgggctgagacaatggggttttctagatatacaatcatgtcatctgcaaacagggacaatttgacttcctcttttcctaattgaataccctttatttccttctcctgcctaattgccctggccagaacttccaacactatgttgaataggagtggtgagagagggcatccctgtcttgtaggcacactaatctctaggcacaatgccagcctggctaagtgttgaaggatttccctagcacagagaaatctgcaaagactgagagagatgtttggggtatttttgtttttcttatttgtttgttgttgttgttttgtttttagctcatggcattcaaggaattatctgtcaaaacattagccaaacacaggctaaaggatcagagacttcagtgatcacacaagacaatgaatacaatctttgagaaagttactaaacaaagaagtatacacccttcaacaactaaaaaaaaacagcagcctctggggaaggaagacaatatgttttctagagttaacacattataatattcagaagtccttttttaaaaaaggacacaaagaaacaagaaaacatggcccattcaaaggaacaaagtaaatttacacaaaccatgcctaaggaagcccaggcatcagacttactagataacaactttaaaacaactgtcttaaatatgctgaaagtggtaaaggaagacatggacaaagaactaaagaaaattggggaaattatacataaacaaaatgagaaaatcaataaaaagattaacattaatttttaaaagaagcaaacagaaattctggggctaaaaagtacaataacaaaatgaaaaattcattagggggttaaagagcagatttgaacagacagaagacagtgaacttaaagataggacaactgaaattatcaagtctgagaatcagaaagaaaagagaaagatgaaaagtgaacagaacctaaatgacctatgagataccatcaagcagactaacatactcattatgagtgttccagaaggagaagagagagataaaggggaagaagaatatttgaagaaatagtggctaaaaacttcccaaatttgatgaaagacatgaaattaaaatccaaagagttcagtgaactccaagtaagataaactcagagacccatacagagatcctttataatcaaactactgaaagacaaagacaaagaaagaatcttaaaggcataaagaaagaaggaacttgtcatgtacaagggattcccaatgcattggtttactgggagtgtcataacagaataccacaaattgggtggcttgagcaatagaaatgatttgtctcacagtctggaagatagaaatctgaaatggaggtgtcagtaaggctggttccttgtaaggactttgagagaaggatttgttacaagcctatctctttggcttatagattgccatcttctccctatgtctcttcacacaatcttccctctatatatgtttatctcagtgaccaaattttcccattctatagggatgcaagtcatattggattagggcccaccctaatgaattcatcttaaccaattatatcagcaatgactctatctccaaataagttcacaagttcacattctgaagtactgtgtgtcaggacttcaacatatgaattttttgagacacaattcaacacttgatactcaatacgactttttttttttttttggagatgggggtctcactttgtcacccaggctggagcgcagtggcacaatcttagctcactgcaacctctgcctcttgggttcaagcgattctcatgcctcagcctctagagtggcgcccaccaccacacctagcaaatttttgtagttttagtagagacggggtttcaccatattggccaatctggtctcaaactcctgacctcaagtgtcccacctgcctcaacctcccaaagtgctgggattacaggcgtgagccaccgcacccagccatcaataagattcgacatccaatttgtcatcagaaatcaaggcagaaagcagtgggacgacatatttcaagtgctggaaaaaaaaaactaaaaaactcaagagttctaaatccagcaatactgtcctttttcaaaagagagagccattgtgttaaatgaaaaaagccagtcaccaaggacaaatattgtatgattctgcttatctaagatacctaaagtcatcaaaatcatagagacagaaagtaggatggtggtttccaagagccggggggagaggaaaatggagagttattgtttaacaggtacagagtttcagtttgggaagattaaaatgttctcaagatggagggtggtgaaggctgcacagcaatatgaatgtacttaaggccactgaacaatacacttaaaaatagtttaaaatgtagagtttaggttatataaattttaccacaacttttaaaaagagaaattaagatatgcttagataaacaaaagctgagtgcatttcttaccactagatcttctctgtaagaaatgccaaagggagcccttcagattgaaatgaaaggacactacacattaactcaaagctgcatgaaggaataaatgcaaaggtaactacacgggcaaacataaaagccattcttgaatttttagtttataactctacttttattttttacataatttaaaaaacacatgcatttttaattataaatctattttaattggcacataattgacaaagatgtgatttgtcataataacataaacaaggaaataaagctatataggagcatagttgtgtatgctgttgaagttggtatcagttctaattagattgttataaatttaggatgttaagtgtaatcctgagggtaaccacaaagaaaatatccaaggaatatacacaaaaggaaattaaaagggaatcaaagtgtttcactaccaaaaaaaatcaactaaacacaaaagaagccattaatagagaaaatgagggacaaaaaagtaattaacagacatactgaaaacaaatagtaaaatggtacaagtaagtatattcttatcaataattactttaaatgtaaatgggttaaactataaatagtaaaatggcagaagtaagtatattcttatcaataattattttaaatgtaaatgggttaaactataaacagtaaaatggccaaagtaagtatattcttatcaataataactttaaatgtaaatgtgttaaactataaatagtaaagttgcaaaagtaagtatattcttatcaataactactttaaatgtaaatgggttaaactctccaaccaaagacaggggctggagtaataaattttacaaaacatgattcaaggtaaatgactcattttacatccaaagatataagtagctcaaaagtgaaaggatggaaaaagatattccagacaaatcataatcaaaaaagaagtggggtggctataatactattttttaaattgactgtaagtcaaaactgtaagaagagataaagtttcattgtacataaattttaaagggtcaatccagtgacctgggtttctactttaagaatttgtcttaagaagaccaaattaaacccaaagtaaatagaataaaggaaataataaatatcaaagcaaaaaaaatgataaaatagaaaacagaaaaacaataggaaaatcaaggaaaccaaaagctggcttttcttcaaagatcaatagtattaataaacctctagccacactgatcaagataaaacaaaaagacataaattaccaatatcagaaataaaagagatgatattactacagatactacaggtattaaaaagataataaggacatattatgaataagaataaactcatcagcatagatagaatggaccaattccttgaaagacacaaactactaatgctcactcaagaagaaacagataacctgactagccttattatctatgaaggaaatggaatttgaagttaagaactatccaacatggaaaactctaggccctgatggcctcactgatgaattctaccacatgtttaagaaagaaatgataccaattctacatagcttctccagaaaactgtaaaggaatgaatacttcccaatttgttctattaggacaaaattaccaccataacaaaaccaaagacgttacaagaaataataataacaaaccacatgtgtaatggactgaatgtttgtgttcccccaaaattcacatgttgaagtactacccctaatgtgatggtatcaggaggtgggatctttggaaggaaattgggtcatgagggtggagctctcatgaatgttatgaattctttataaaaggaaccctagagagctctcttgccctctttccaccatggaaaggtaccacaagaagtcagcagtctacaactcagaagagggccctcatcagtgctggaccatattggtatccccctcagacctccagcctccagaactgtaagaaatcaatttctgttactgataagcttccagttgacagtactttgttatagcagccttataaacgaagataacctgccaatatccctcatgaatttagatgcaaaaactttagcaaatcaaatccaacaatatataaaaatgataatacatcacgactaagtaagatttaacatttaacttaacatttgcaatcaaatcaccatatcaccaagcccaaaaagaaacacatatgatcatctcattgaacatggtaaaggcatttgactattccgaaatcaatcctaataaaaattctcagcaaactaggcatagaaaggaacttcttgatttgataaagaacatttataaaaacctacagctaacatcatatttagtgttgaaagactgaataggatggtttcctcctaagatcagaaaaaaggatgttcactgtcatcacttctaacattttacaagaatttccagccattgcaataaagtaagaaaatgaaataaaaatcatccaaattgggaaaaagcaaaactgtctttcttcacaggtgacattatcatttacttagaaaatttgatggaatctaccctttaaaaaaaggcactaaaaccaataagtaagtttagcaacattgctagatattaatatacaggctgggtgcagcagctcatgcctctaatctcagtgctttgggagcgacagacaagagatcacttgaggccaggagtttgagaccagcctgggcaacataacaagatctcatctcttccacaaatttaaaaattagccaggcatagtggtgcacatctttactcgcagctacccaggaggctgagatgggaagattgcttgagcccaggaggtcaaggctacagtgagctatgattgtgctccagcctgggcaacagagctagaccctgtctctaaaaataaattcaaataaaattaaagatcaatatataaaactcaattgtatattacaaatttaaaattttaaaaatatgattcacaatagcatcaaaaatagagtatttagggactagtctgacaaaatttccaccatgacaacttatccttcatcttctccctcctctacttgctgctccttcaatgattccttgttcttcatttcaggagcacagtcaatgccaaactcaacaagctcctcagtatggccagtagattcagaatagcaatggtatcacttgcaaagagagttttaatagttaacatggagacattcattatggagaacccttgtgaaagcaggaggagcaaagccctcctaagtcattgtagcaggggctgagtggcttccacctctcctcccttcatttattttacaaaagctttcatcatgcctttccctatggaatcaagcccagactcttcagcacagctttcaaggccatgacctggccccctacctacttttccaatgttctttcccctaacctcctttcactgaccctttctgccagctaactggattcactgctccccatacctcctctatagtttcccctgtcagtgcataacatatccatgtattttctctcccccattttcccttcctccttctttccttttatagctcattctccagcctcgattactcttccttctgctcacatccaaatccttctcaacccttacagacaggctgaaaatacctgcttttctaagaagcgctccctgattctaccaaccatggggatcacccttcctctgaacctcgcctggagccaggggcattttccctttgggacttgttccttgtctaattcctgtactgactgagaatgcaatagggagggggcagagcctacatctggctcatctatacaacccaaagcacctccatcagggcctggcacagcaaaagaaaccattggtaagtgttggaagaggggggaggaagtggcttcatctggaaaaaggaaggaaatggaacacttggataaagagaggcaagaaatggtgtggtgagggaaaggcatctttcatttacttcctgcctgacgctgagctgctgggattgcagaggagattgaggtgcacagcagagctgcacctattgcagccagtggctgcagaggggttatggggtacagcaaggtgggctggctcttcagggagaatttctcaccagagctgtcctgggctagaggaaaactgtaacatttctgctgcctcatctacccttctctcctacccactgggcaggcggttgtgcctaaccttggcttatttggagttcatctgaaaatcagcatggggaactatggccaaaagcaactttgttgttcatgagatcttccaaattcaggagagccatgcccaacagttacagaaaggaagcaggtgctctgggctcctgttgcccacagacccatggcctgaggcctaggacagtagtcctaggccttcattgggcatcaggatcagctggggaggttttttaaaatgtagatgcccatgtcccatctccagaaatgcaatttcaattgatcagagcttgagcacactttaaaagctctcccagatgattctgctgggcagccaggttgagaccctggcctgggaaggactccttcctccagcccacagttgttctaggatgggggtagagcactgctcagggagggggcctcctgccttctgtaaggtctgcttaaatgccactccttcccatactcctcagtggaaagcacaatagcccagtggttaggttcagacagacactggcatccagtcatctgggtttgcatccccatcccacagagtggcgccttggacaagtgattccaccacttagaaccttggtttgctcatctgcaaactgggaagaccattctcagcttgcatggctactggaagaatgaaatgggaaagtgaattcatgaagcccctgcaaatcctagcatacagcagatgttcaagcagtgccctcctgctcccatcccagcctccaaaggtagaggcaggaggcttgggtgtccctctctctccctgggtgacttgggcaaatcattggacctctctgggcctcagttgcctcatctgtaaaatgcagaaaaccacagcaggagccgagcctttgttttcttcactccaccagggaaatcagaggcagggagttttcagagcacagcccttccatggatccaggtgccggctgagcctgtcctcacaggggatccgtggtccatctcagggaacagttcaaagagtgcaattccccagcaagctcttgaatcctcatcagcccaggaaaaaaaggggctgtactggagcaagtttgcatgtaagtaaagagcgaccatgagcagcaagaccatttaagcatggcagtacccaagggtgggcacggagggctcttcccagggagttacagagagtgctggcctctatcactagacaccccctaaattcagggattgtggcccttccctgggggctcccctcccacatcctctgagccccccactgccatggcccaaggtcagccattatctccctcctagatgtccacaccagccctgcctccaacccattctccaccctcagcagagaaaccctccaagagtcatgtctgtccatgtcactcttgccacatgtcactctgaagccaatcagcagcaacccacttggctcacagtcaaggctaacctctccccggtggcataaggacccttcacagtcagggccaggcctctgcccaccagtgcacccttacccctgccatcccctacaccttctgaactgctctcacttcctctaagacaccagccccctaccctaggcacctatctgcctgtccatgtgccctcatggcctggaatgccctccctgccctgctgtgtgcctggccaactcctccagctcatcctccaaggctctgctttggcaccatctcctccaggtagtcctccctggagattcctccccacatagggttaggagactctcctctggaaaagcccagcccccacactatcccttcctctgtgctatttgcacaggttggggagggggaagggaggactcagacctcctcaagatagcacccaggcctttcacctcattcagctccccacatgtggtgaggggccccagtatctagcccactgcctggctggaaggaaggattcagcaggaccaagcagattttagtgaaactgtcctgctagagaaggagggcctggcatcaggcacttggttggaaagagctgtggctgggtagcttgcccacatgacacacacacacacacctgcccttacacacacatgcacacacacacctacccttacacatgcatacacatatgcaaataaggtgtgtacctgcatacacatatctgccctcacacacacacctgcacatacaacctgcccttacacacacatctgtatatacacatctgccctcacacacaacagcaaatacacacctgccctcatacacacacctccatatacacactgcccttgcacacacacctgcatacacacatctgccctaatacacacacctgtatatacacatctgccctcacatacaaacctgcatatacacacctgtcctctcacacacatctgcacatacacacctgccctcacacacctgtatatacacacctgccctcacacatctgcatatacacatctgccctcatacatgcacctgcatatacacacctgccctctcacacacaccagcccatacacacctgccctcacatacacctgcatatatacacacctgccctcatacacacacctgcatatacatacctgccctcacacataccagcacctacacacctgccctcatacgcctgcatatacacacctgccctcatgcacacacctgcatacacacatctgctctcacacacatacctacacatacacacctgccctcatacacacacctgcatatatacacctgtcttcaatctgccttcacacacacacctgcacacaacacatctgccatcacacacacttgcacacacattcacccctacacacacacagcccacccttgtctggtcattgctgcattttcaattacaaatggaggctcctctagcagctcagccacctcctaatcaggctctgattcactgaagcacacaggaactgagaggttccatctccaagccgtggagactacaaatgctcctctgtgaacaaaaccagagcaccagctcgcaggacacacccacttccaccactgctgagctgggggctgccctaccactgcggagttgaaccagctcttctgccagctcccaggtgggggccaacaaagctgctgtgctccatcacacagccaggcctctcagagcagaccccaaagcagcgaatgtgggcctgccaggccacaggctctcagtatggcagtcaaggcaggcagaaaagctaagagagcgccctcagtaaacgtggatgctgtggggaaggccacaatgccatccactgtcaggagccaaaatcccaggtcagagtctgaggacggggcatagggtcgcagcagagggagatggcagagtgggcagtgggcactgtggtataggggaagaaaattgggctgtggccactcaggtctggctctaccctggtctgcagagtggttcaggacagccttgtcacctctcgagcctccatgtcaagacctaaaccatggggacaacagtaatggggttgctggaaggtacgagaccatgccatgcctctccagcccacaggtggacagtcctccctccacagtgaggcagtcaagaagaggagaggagcgagccccccaacccaccccccatggccagggacctttgcctctacccctcctcagcccagggaaagcatccagagtgtccctgcaaacaccacaccagcaccagtagtgtcagactccacagcctatgaggccctgcttcccctgagccaggtgaacatcagttgacagcgatggctctgaagccagacaccctctcccgcctctgtctcaggctgctagcagggacttcctggatggcatgctgaggatcgccctgcacatgacactcatggtgaagccctgtggtgacatgcttgcctaaaccaaatgtgacattcttaatgacccacaaagaggatgcagccagggagactccagccaccgcctgtcacagaaacaaaaggcgcagcttctcatcaacatgctgtttaaatgccccagcccagggcccctgccgactgggtcaacaacacaggaaccctgtgccacctccaagagaccagcactgtgcccaccacctggcctgcagtaataataaccatatgtcagcacgcccacacagggcttccaggatgccagacactgctctgagatatgtaccggagatgagggcgcagctgtaggtgctggtgttggcatggctgtaggtctaggaataggtacagattagatgtaggaataggaataggagtagaaataggtcaaggcatagattcgatatatggtaagtccttacttaacatcactgataggactttaagtgaaacaatgtataatggaaaccaaatttttttctcatcaacattgtaatgaaaagacgtttgagcaaaaccgtatttgagaacctgctgtacattgttttgcttaaagtttccaataacttatcaacaacattaagcaagaacttattgtagatgtgggtttaggtctagaaattggtataagtataggtgagatgtagatacagatatagatttaaattagatgtcgggatagggatagggatggggatagggatacgttagatgtaggctgtaggtgtaggtataagtagaggttagaggtagcctgtaggtataggtataggtagagagaggtatagatgaggcatagatataggtgcataggtatatagaagtgtagatgtatagttataggatcatcttgttcctcaccacaaccctataaagggacagatatttacagatgaggaaacaagcatgacggtgagcctggaccaacccagcactgacctgagtgctgtgcctttattgaggacccaggaaggacgcctgagggagcagcctgtgtctccgtgggtggagatgagaccatctccatggctccttcgtcagcaaaagattccacacttgggcatctttcccttccctgcctttttactaggtttgggggaaccaccatgggctccacgaattccctgcgtcctcccacgagtgaggccacgagaagccaggcaggaatttgcagtacaggatgcgctccacaaatggcttctccgtggcatcacgaggcagataggaaacacttctcagtggctcagcaaattgtcaagatcctggaatcaggtcagatagaggcaggatttcatcatagtcctgccctgccatgtgaccgtgagggagttacctgccttctgcacctcactttctcatctgtaaaatgggacaacaacggtacctaccccaggggcagagcctgacagctctccgctctgggcgccggcagggttgacagctatctactgtgagtgggaagaagtcagcacccatgcagaaaaccagaggagcagaaatcagggccctcaagacccatcccagcagaaagcccactgtggtatgaccaccactgcctgggcacctgcaagatcctgggccacagacatggccacctggtgttgctcctatgagccatgctcttataggctggtcagggaggcagacacgtgactccaggcagttccgtagggacttgaggagcacagcagagcaggaccctaaaggctgagaaggtgaggtccagaaggatgcacaggacagctctggaggcacggaagtagatggaatgcctgggcacaggaggtcccgtggggaaggagctgcaggtgaggctggggtagaaacaggaccagacagaaagcaaccttgtcatatgagaagcctgaactgcagtccccaaattcccccctgtatccctgagggactggaagttcctctgagtcaggtcattgactcaattctctcgtaactaaaagttgggtgcctacctcaaagcaagagataatcaggggagagccctgggcaccattcctggtcccagtaacgcaccacttaactaaaagcagctgctgctattgttttaccaagtgtcttctgcaacagagaaaaaaaatgaaaatgaactactgcacagtgcttgcactggcaccctggatcaaatgggcttgtgcaccaggaccagtcctgacatctcaatactcaggccaacctgccacgttgggtccttacttcctagccccagccctgaccacaaccatcagagtccacaggagagggctggttgtgcccctccacagagccttccctgaacaggtgaccgcgtatcctcgtttgcccagcacagccgttgcacctgttctttagtgaaattattaatttcactttaaaaagtttcacagtttaaatggtttctcggtggtcagcctaacttctgagccacatggtttcagcccaaaattcctgttgccagagattttctgtggtttcctagacactcatatctaggatggcagaaggtggctggcatcaggatcactagaggatgtacccacaagactccaggaaattgctccttagccaataagggtctcttcctccagctccacatgctccatgcaggcctagcaccacccttcaagcctgcccagcccctgccatgctctgcctccaccaaagatgcttgttgcagagttgtaccattgcctcctggggaaaaggcagcaggaagatgccaggctgcccggcagaagctgagtctatgggcacaaagtgagggcagagactcacatctgcccacctgccacattccccacaagtcaggatctcactggccacgaacctgttcacctgcgagagcagagttcagcagcgaacaccaagagtccctcatgtctcctgaacagtaactcctcagctggagcgttcaggcatggctgaccaagaacatccccagggagcctgggagagcccacagtctccagtctccagagacaataacggcacctgctgtttggacagtgtgtgatcagttacagttttgagggagggggttctctctggcaatgttcattcagcttaatatgcctacaagtaaggcttttaggaagcaaccacactgctattctagaatgtggtcaacatccacttcagcaacttggtcttcagttgactcagaaaccagaaacaaggtggaactctgtgagaacccaggagtcctgctgaacagccgtgcttgcctctcggttgcgttctgggggaaaagtagcttagttatgttggagcctcctcaaagcagcacctgggtctctgggttccctctcaaacatcaccattatcaccccaaacctcaaagcggcagcactcaaattgccagataatgtcaatctgacagtgggtggccgtcacctcttcttcagtgtgcagagacggccagagcgcttctatgagcagggccgactggctatgccagcctcatgaacacagcaggcagcgcaggcaccaagacaccccacacaagcatggggtgaaggctgcaggagaacagaggccccaccactccccagcacttagtggcctcctgctcagcaataggacatggccctggacacagctcaccccaccatgtctgtccaggcttctatgtgaacaaaaatatgtgtagacaccactgttctgcctcccatgcctcttctcccactgggccccaagagcacagtcactagagctacacacttgaaagatggactcagaagatccctgtcactcaaggttggcagaccaatggacccccagtgctggttgggagagacacagtgaggcccaaagcatcctcaactctcaaactgtctaatgaagaccaattaatgcccaggaacatcagccccagccatgaaaaacagagggccccaagaagcatgaaactgagtgaggaagaggggaagggcctggagaccactgctggcaaggtcatccctcatgtcattatcctaattgtgaatccctgagaaacagaacatcggccagctgaagcagtcatcaccccttcagacccctcggctgcccttggtgattcagcacaggccaagccaagctctgctacctcagcctcttccacctctgcttccagggaacccaggatgctgcctctcggtggcccagcccccatgcccccaactgccccgtgccactctcctaactgcagttggcttaatctttctaaaatatggctctgatctccccagctcctgcttaccaagctctaatggctcctgtagggggcagccactcatccatcctgcccagcctcccaccccgattttcttttgcagagcctcctccctctactcctagtccatgacttctagtgagctggccagacacagtggcagcccaccccaacgaaacagagtgtcctactcaccccagttggttcagggatgggcagccaccccagctgggccaatactatatccttaaagcctttgcctgagctttccaaacagggactcttacttgtgctgagactgtggacaccaaagaccagacaagctggagttgtggtggttcctctttgtcattgggtgggaaggacattcctaagagtcaagccaatgagagaagaagagaaacaagacaccgcgagggagcaagaaagagaaagcaagagcagaaggcgtaaccgctagatccagccatgcctgaagctagcccatccttggaccactttgtcatataagctaaaacgaattcccttttttacttaaacaagtttaactggtatttttatcactttcaacaaacagtcctgattaatacatctcctcatgcctgcaaaaataagtggactcaattatagataaatgaataattatcctaaaacatggagcctaataaaactaagaggaactgcaaattgctcttgtgagcactgaagaggcagtgcctcattctggctgagagcgttggggtgctcctggggaggacacatcaaagccatcatttaaaagatgttcccggccaggtgcggtggctcatacctgtaattccagcactttgggaggccaaggaggcagatcatttgaggccaggagttcgaggatagcctggccaacatagcaaaactccatctctactaaaaataaaaataaaaaaattagccaagtgtggttgtgcacacctatattcccacctactcaggaggctgaggcaggaaaattgcttaaacccaggaggcagaggtttcagtgagccaagatcatgacactgcactccagcctgggcaacagagcaagactctgtctcaaaaataaaataaaataaaataaaataaaataaaatatgttccaggtaagagagccacaaagataaagcatgaaagaccatgatatgtttgggagaaataggaagtagtatgaacaataaggcaagaggcagttgtggaaagccaagaatgagtcagcttggatcatgaggtgagggtcttttcccgctgttaatgaacctaggctttgtttaatagaccagcaagagagaacacctcctcaggccacaatgcacccctgaaacccaggacagagagctgtcctggagaggaagcggcccagggcagcagtgagattctgacagtccaggtcccagtccctgaaaggctcaaagggaggagcagcaaagctccaggtcccaagagcttcccaggaccaggacagcttgtgaagatcctggaagtctgcgctgctctgctcccagcagctctgagcccccagagagtgtggccaccatgggccacaggcacaaggcccagggacaaagcagagaaggggacctgtggcggggggtggaaagcagagcccagagggcctccagatccacagcgcggtgcacagagcacacaacaagaggcaggaaggggatgagacccccactttccatccccattgacctccatccccactgactcctcgccctagcctggccctagactttggcccagagaccgtgttaggaccaggctagaggaagggaagctgaggagcccagggaaagcagaaatgagtcactcccagggaaggcacaggctgagtgagagggactccccaaccccgggcagtaccaggctcaccccacagcagcctcgccagtaccagccctgcctcagcccaggggcacagcacaagactctcactcagcctttgggcttcagcacaggccatccacctccaggaagccctccagacaccttctcctgaatgttgggctgccctgggctgctgtccccaacaccactctctctgttcatctcagctggtgcaagatcacacagcgctaagtctctgtttctgtgttggttcccccaccaaacggagagctccgtgggaatgagtaccacatcagctcatctccaaggctgatgcaaagtgaccattccatcaatgctagcaccatgccctgagcccatgacacacggacacagcacagcaaggtctggggcgggggcaggtggcagcaattcaacatgcggccctgatcgaggggttatcatgcccacctgacagaggaaatcaagggcaagttacccagccagggccctttgagaaggactcaaacccaggccagtctgattctcaagccagggcctattcctctccttcactgtcatcatcacctggagtctggggctgccagccctggaaacctgagcagaggaggcactggggcccacacacagggtcagggaagcccctccacagacaccctccaggtcaggcccacgacagaggctgcaggcttgtgcaagaaaaagcacgcacgccccagcacagactcaggggaacctgaccaaggggagaagccacaagggcgccacctctaggctctgcctccagccctgcttcctgctttgggaaggatggcacatccgcaggcctcagagctgcaggaagctcttctttgctcacctgcaagcttcatttcaggagattgtcaggactgacagcagccaagatgcacagggtgacatttccctgttgggaaaatggattccccttttgccctgcagccacatgccctagggaagcatcaccatgccgggaagaaagtctcagttctcaggaagagcagctcctacagcaattgttggtaaactggagttgagctcacagataagcgtcgcccctggcacctcctctggtcccatggagcaaacagcaatctgctgccctgaggctggggaggggtccccctgtacctcccttcacccctgccttcctccctctcttcagggccaaggcatttccgtgtgtgcatgtgaatgtgaggagtgtggctgtgtgtgcaagtgtgggtgagtgtgagtgtggatgtgggtgggtgggtgcgagtgtgcgcaggtgtgagtgtcgggagtgggtgtgagtgtgacggtgtctgtgggtgtgtgtatgcaagtgtgggtgtgagtgtggatgttaacgtgagtttgtgtgggactgtatatgtatgagtgtgtgagtgtggcagatgtgagtgtggaatgtagctctgtgagtgtgggtgtgagtgagggtgtctgtgtgaagagatggatgggggcagatggatgggcccttgtgaaaagaaagccaactgggcctggactctacgaaaatcacagacctcagactcccagaggccctgctgcagacccagtctctcactcctgagcctggcaccatgcccagcccagagctgtgtcctgtgccctagctgtgccggcgctgcctctgcccaacccatgtgccattgcaggttattgtgggagggtctcaagaagcccagggtcttcctcgagctccaacctttcccagctttgttatcactccttctttctttccctgtggcccatgcagggctgccatggctggggggctacacactccaatgccagggagggagaaggagccatcgcctacctccccatgtctttccctggcccaggcatgccagtcactgagacttgaggagaagggcccccacactgctcaggcccctgcagctacccccacaagctgactatcaaagccccagaggaacttcctagcgccagcaatgccttggggatggggtaggcatagaagaagagccatttgatttgattacttggctctgccaagcagagccatttacatgttaaagactttttttgttattattctgcatattacatttcaaacaaaaaccccaaaccaatcctcagagcaaagacccttttgtattccccacaaagcaacctgctgcttccagcaccaggccctggattcagggctgcagcatcagggaacctgcatccacaccaacctgtcagcacagagacacagactcaaacgatagggaggggtgggggaggagacactgcagctggggtggaatgcattcattcattcattcattcattcattcaccactcattcctcccacaaacgtcgtcagcgctgtctctggtccaggcactgtgctgggtgcatttgcaccagacaaggatgtctgtattcttggagctaaggctctagtaaaattaaaaatggctgatggataaaaaataacaataagataataaataaaaatttattgcaataaagtcaaataaaacattttaagtcaattcaaaaatatggctgagtggatgatagagtatattcgcgggtgatcactgttatgggtaaaactaaatcgaggcagaggatcaggagagcctagtgtagaagctggaggagtatggagaggaggctaggcaggcctggtcagcaccagaaagtgagggtagaggcttcacggagtcctggggcaagctctggggttgagtctctaagagaggtataccggttctggtgaaggcaaggagaacagcataaggtggcccagggcagtgagccctgaggcctgggggagcagatgggcagcacaaggcctggcgactcctgtgtggaccctgacttttcctctagcgagatgggagctgttgggagctttgatctgagtgagctgtgtgcaccagcatctttctggtgccatgatgagaacagaccaagtgggacagggcggaggcagggagacctgtcaggaagccattccaagaatccaggggagagacgatggtggcttagccatgggggtggtcagtgggctgagctagaagggtgggctcctggggatgggaagaggggagagtgcaggggaccccaaggcactggacctgagcactggagggagggcagatggagaagcctcacgggggctggtgtgggctgaagcacccagcttggggacatgcttgtgtaagaagcctatgtcatcccagtggagaagcagtggacagagaatccagagctaacgagagaggcaagctggcaggactgcaaagtcctccatgggtaggtgatattcaaaggtgtgagacggtcagaagtcatcaagaaaaggagtacaacagaagacagatgattaaagttggggacatgggacatgccagtgttttgaggtcgggagatgagaagagcccagcaatgggactaggaaggtgcacccgccacagagccaggaggagggaggctgcagtcctgagcccggggaacagtgggggcgggacaggtaaggaaaggactgagattgggccactggaccaagctacacataagtcatgagaatgctcattggagcagctctgagagtcgtgagggcaaatgcctgaccacagtgcgcacaggagcaatggagagaaaggcatgggagacagagcatacagaacggccttttcaagagcttcgctgtaagtgggtgggggagcggcagaggagacgcagaggacagtagctgcagaggaagtggaccaagcgcaggaatctttagggcaggagataacacagtgtccttatgagcagatggaaataatccactagagaaggaaacttgatgatgaaggagaggagggagagaactgctgggtgatggcctggagcaaaggaggcggacggatgggatgtagtgcccaaggaaagggcgtctcagacaggacatgggcaggtcagcagtgagcccgagcgttgtccaggacacgggtgggtaggcaggcaggtgtggggatggagcatcgccatccactgccaccttctctctcctcagtgaactatatagggaacaaaactctgctgctcggggctgtggccagcatggaggagagaggaggtgttgcagatgcggaaagagaggggaaggtcagacggagtggagaaagaatggcccggagaaacgcgatatgacggccaaaactggtcacgtgggtgttctttttttttccacccttagctgcaggttggggttttgcccagtgctactgcagttcatacctgagcttggcttggtcatccatatccccagcatctaacgacattctacggacactcaacaggtatgtgagagacaaaaggaccaggaggaagacaccaatgatgggtaaacttcgcccacctggcaccagcaccaacaagatctagaaagcacctgctcacctgcactgtggaggggcagttcctcagctgactcaaacacctcatccatcccccctacagacagtgtccctaccttcttgctcctcctgttgccagagaggtttgaggggcttagctcagctcggccctagctagtgctactgggaagtggccagtttccccatagcactggccccaccagccctgagttaactacagtggctcccacaccatggctggcagccacagcccatctccaatgtccccatacactcttcagggcatctgagaaccaacactcagtcccagtggctcaccgttaagtgaaaccattagcaaaattctgtgacaagaaggaaaatgctatggtattatagaagaagccactggaggcaaaacagatcatcactgtggttatagctgtgcccaatgtctgtctgtttgaggacaagttctagaaagaaccacagaaaaattaaaaccatttgcttgttaaggtggtgagatggtggttcctcctttgttttctttttaaattctgcaatgctgttgccatcttggttatacaataaattaaaagtatgattttaaaaaaataggctggacacacctttaatcctagcactttgggagcctgaggcaggcagatcacttgagatcaggagttcaagaccagcctggccaacatagtgaaaccccgtctctactaaaaatacaaaaattagctgggcatggtggcatgtgcctgtaatctcagctgcttgggaggctgaggcagaagaatcgctcgaacccgagagacagatgttgcagcgaatcaagattgcaccattgcactccagcctgggcaacagagggagactccatctcaaaaataaatatataaatacatacatacatacatgcatacatacacacatacatacatacatacatacatacatacatacatacatacatacataaaaatgattattctactgtattctacacaggcaaaaatacttttagaaatgaacaagaagatctcattcacagaagcaacaaagagtataactatttagaaataaacttcactagagatgtgcatgacccgtgtaaagaaaactaccaaactttatttagagctataaagatggcttgaataaatagagaaaataactgttcccagatgggactttatgttataaagatgttactttcccaaaagttaacttatacatttaattcaatctcaatcaaaatctcaaaaggatttctccaaggaattatataaagttattctaaaatcattttgaaaatagatgagaaaaataaataaaattcaataaatgaaaagaaatgagaggaaactagatataaaaattattagaaagcaataacaaagtactgtagaacttgcacaaaaatagaaatatggatcagaatttaaaaatctagaaatagacctaattgcatacaagaatttaatgcattacaaagcaggtatcaacaagccatggggaaaggaattcttgattaataaattgcgctgatagttttgaggaaaagtaattagttcagaaacacacctttcctcacacatcagaaaataaacggtggagagattaaggagtcaactagagaagtcaaatgaaagaaacctagcaggaaatagaaggaaaaatttatctattccttggagggagtgataatttctcaagtttcatactgataaaagaaagtataaataaaaagataattcaacaatataaaaagtacaaaagctttgtaggaaagaaacaagataactaaaattaaaaatagtctatgaaacacatttgtagcagtgtgtcaggcagcgttgataactataatataaggagttcacacaaaccgttataaaaaacaaaactcccagaggccagcagatgaatgggctggacagaaagtccacccatgggaaggtgctgttagcaaacacaggaaaatccacctctccgggaatccaatgggaggtcacttcacatctattaaatagcagaaaatgaaaaacaaaggcttaattgccacatcaaatgcttgttgagttgtggtaaaaccaatcttcttgcacactgacaggaaatgatcttttcgaaagcaatttggcgttaccattgcaagtaccataaaaatgcccacactctttgacccaataatcttcttctgagaaaataattcgttagaaagaaatgactgcttcaaaaagatgttcaacatgatttataataaccagaaacagaaaacaatctaaacctctaacaaaaggtgatgtttaaataaattaaagaacatcaatttaatggccaatttatgcaaccattgaaatgataattatgaaaactgtagcaacagtgaaaaatgtttacagtataataaaggaagttgcaaccaaagctgtagttgtgccataattaaaaatatgtctatggaccaaggactggaagggaatatagaagatgaaaatagaaccatggagtctggctctattatttccattctaatgtaatagcatttttgtgtattacataaaaactcagacaaaggagtctctttagctataaggtcagcctcacctgacgttcactccctgcactccagaacccctgtgctgggggtgtggggctatgggcagccctggccgttcttgtgaggactcacccaggcctggagacccaggcttctactgtgcttctcctggggtggctgaaacgccctccccacctccctggaaaggcccctccttcaggactcatcctggagctaaacatgcccccgaggcttcctcacctccctctctgtttctcaatcccactccacccctacggcacctgcaactctcccagacacagagttgccagagtgtcctgtgccctgctcccagcctggggtttccttgagggcagtggttctatccagtttgtgtctggaggcccggtgctgagctctggcctggtataaggctgacattggtaatggtttgttcaccactcacggatccctggcctgcaattttatgccaagcctgggtggcacgtgaggaaggagtggacagcatcccgtcttccagaagctcccgggctagctgcagaggaaaggagctcacatatctgaggcactgggggtagttccatgtcctattccattccacccccacccggccctataaggggagctatcatcacctctactttatagatgccctcacaagctcagagaggtaacgtcacatacaaccaatcctgcctgcctgttccatgtggtactgcaggacaacaactagctttccatgtgggcaataagatttcttttttttttttttgtataataaatgtctacatttattcatcctacataacataaactttatatcctttgaccagcatctccccattctcccttctttcctggcctctggtaaccatgtcctgttctctatttcttttttttttttatcattatactttaacttctagggtacatgtgcacaatgtgcaggtttgttacatatgtatacatgtgccatgttggtgtgctgcacccattaactcgtcatttacattaggtatatctcctaatgctatccctcccccctcgcccccctccccacaacaggccctggtgtgtgaagttccccttcctggaaaccatcattctcagcaaactatctcaaggacaaaaatccaaacaccacatgttctcactcataggagggaattgaacaatgacaacacttggacacaggaagtgggcaataagatttcaatagcgctttgccaatgtggattgtgagggcttagcagaaagccagcagaaaatccagggcttgtgcctgtccctccaacaccaagcagagtcaagggcccatgaaccacactccctaccccaaagaccctggttcccactgacacttgggccaccaaactgcaaatgggacagacccacgtgctggagttagtcttggggacactgaaattcggcactgctgacaatctccatgaggcctttccaatcccctgcctggacctggcccagtggaatatgtacttggctaaatagtgttctccaaaaagtcacatccaccccaacctcagaatatgaccttatatagaaatagtgtgtttgcagatgtcattagttgagatgaggtcatattagattagggagggccttacatccaacacctggtgtcctcatatgacgaggagagaacacacagagacattgcagagagaagaagcccatttgaggatggtggcagaaaatgggggatgcatctacaagccaaagaaagctacggcacaccagaagccacagaagctacaagaggcaagaaagaattcctcccaaactgggagaagaatacatttctgttgttgtaagccatccagtttgtggaaatttgatatggtagccctagaaaactaaaacagtgggctcgatggcgcaagctggtggtcccagctactcagaaggctgaagcaggaggatcgcttgagcccagaagtttgggactgccatcagctatgattgtaccactttactccaacctgggtgacagagccagagggaacaggggagggaggaagggagggagggagggaggaaagacaggggaggggaagggaggggaagggaggggaggggaggggaggggaggggaggggagggaaaaaacaaaatacctggaaagagcttttccttaaatagagttccctgcagcctccaccctcccaggctgatcctggcctgggaatggcaaagaccagcttcttctaggtccacctgagctatccaacacttatgaatgaagctatggtaactggagcaggaggaaagaaccctcctgagcttggcctgggactccaagcacagcatttccccgggctccagtccgctccaccctgatgcagccagccacttcccactcccacctggagaatgcacctagagtccagggtgcagtccgggaagcctgggctaggaagaaaagacagaagagaagacagagctacagcatcctggggaatgggaagggcagagagtgggagctttggaagcagaaagactgggttcaaattccatctccaccatttaccagctaggcggtcttggagaagttgctgaaccctctctattgctagtccatatgtttaggccaaaatgcacaggccctggagggtcccctgccatccaaggaaggctaagggaataagtgcttagctttcaggtgccccccacccaccagcccatgggagcagaaaagagacaatgaggccggctcaccacgaggaccaagccacaggccacagaccagctgagaggtacctcaccttggacctgctgctgggggccctggcagactctagctcagagtggcttgtcgattttctgcttcaggttgcactgaagaaacatcaaaaatcaatcagctccatctatctatctttgccactgacacccttcatttccattcattttccttcctgttgtgctaatggtgtgtggctaagccacagcataaaagaagatataaaattacacagcattatctttcccctgagcctgcacacatgtgcttttctctccatctctgccagctctttaaagggggagcagacacacatctcacccagatctagacccattttcaaggggcctaccatccagcagatggacccttggccacaaggaactgttccaaccttgtatccccaccttcccaaggaaagggggagcagggacccccaaggcccgagaatgagaaagccagtgcatccaaaagccagtgcatccagccctctgcctctgagcagtgtttgcctgaaccattgtcaccattggtcccaggatggacaatcatcactgataaaggaccccaaggaccccttctgcaatcagtttctttacccttcttaaggcctcagtactattaaaaagagcagatgttcacagccctcggataacagctttctgattcaacagatcaaacacatttcaggtgtcttcattggttttgtacctgaaagaccctcttaagtcatcaaggctatatttgcacccccaaaaatgggctcagacacagccatgatttgctgcctggctcccaggccacctgactggccctcactctacttctggccttccctggctcccagcccgccacctacttctgtgctaaaagcctcacttggctcacacagctccatttatttgacccttagcttccctcctcaccctggcacatggtctaggtcacagccaggtgaggtctctgcaggatgtggcccagcctggcaggcagatcctggacatgaacagcagctcctccttgagactcactccacaggggccaccatgccttcttgggagacacatctgcagcaagaggcagtagtcctcgcccagcagaggaaaagaaaggggaaccaggggcagcactgatgagcctcggaggtttgagaagcactctggggtactttttgtgaatgaaaacttctaacacctccttgggaatttgatgcaaccaatgaatcctctccccacctccccacaaggtctatgctcacatccacagagcctctgcctacaacctcacatggccaaggatgctcaaccatgaatcgcagtgaaaggtttgtggatgtgcttcttgatatgatgatatttgaaacacacagcacccccaatcctgtatgcttaccacaaatgccttccctggatcacactcacctccagacccaacttccagcttgcaggcaatacaggggacagaggaacaggttaaatgtcaccctaaggaagcaattggctagattcagtagctgaaacattctacaggacaactggcccatgctatacaagtcaatgtcataggaaagaaagggggttgttctagaccttagttactcaaggtgtatttcttgaaccaccagcagcagcgccaattgagagcttgttagaaatgcagaatctcaggccctccctggacctagaagcagaatctgcattttagcaagatctccaggtgatctgtgtgcacacacagaagtctgacaaacactcgtctaaataggaagagatttatgtgaaataatgaatcacatgtgttgtcctggattgaatcccagctggaaccaatcaggtataagagatattttgggggcaattagggaaatttgaatatggattgtgttagactatattaagaaattagaattattctgctaggcatgaaatgtaggaaaatgtcctccaatttttagggatgcatacttaagtgtttagaagtaaaatgccatgatgtctgtaatttactttgaaatatttcaacaacaaaaaatagatgaagcagatatatgacaaatgttaacaatgtttaaatccagatgtaaatggctatgtccattacactagtctatacttctctgtatgtacaaaaatatttttaaaaaaattagaaatataaggaaagaacctcttacttcattagagtttttctgaacaaagagtggagcactgcccaggaggatgtcagcacaggttctctccccacatgacagagactgtgctcagcaggaaggaggggcacagggaagaagcaggcaaggggagagcatgcctctctcgagcactcactatctaagaggcatgacagctgcagatatttattttcctcattgatcttcctgccattccatgaggtggtctcattagctcccttttacagatgaggaaactgagccacctaatggacatcgcgttgccccacatcacacagttattaagggttgtggacaggatttcactgacagccctgggctctctccaatccaccagcagctcacccagttgcacagggagctatttgagaagcctcacctgaatctcttctgggcactcagatgtcagcaggagacgccagcagggctcgtcctgagccgttcctgtctctcctggggcttttctgggcacaccctctaagatctgcctccacatgttatctccaggcttaattgacctcactgcctctgaccttttaaagacacaccagttttccctttttagtctcaggtcattggtcattacttctcgttgccatggtttttcctatctccatcatttcctcccctccagctggagactcttgcaggctgtgaagcccccaaccctggtagtgactctctctgctcttaccccactcagaggaggcatcaagaggggcccaagggcctaccccagctcactccattgcacttctctgcacctcctacctgtcctgcctcctcaatagcctgcttcaaaatgcattctgcccctcggctcactgtgtgatgtctcctgggaagcccagaagctgtgtgtttaagatgcaccaggacaaagagaaggcaggagccccaacatacttatgttgagaaagacatctggcagaggggactcctcctcttcctgcccctggacacatgctccacatgtcccaccctcagctgcctcactcagctccctgtgaatcctgacccttgctcacccctggctctgctgctggggttccacagaagaacacttctgctcctggacctctgagcaggacccagtaggcacctgctaagccccacagaactatgcctctgtccactatcctgagcacagaaggcatggcagatttcagggctgctgacagaggcccccaaaggcagaaagagaaactgggaggaagctaacacactggtaaggtatgactcatggcctggcactgtgctcagtcctgccatatccatcatctctgtcgatctccaacactcctgtaagatatgagctacgatctccattttacagatggaaaaatgaaggcttcaagagggacaaggaaacttgtctttgtcagagaagcaggggttagaactcaggctggcaaacttcaaagccacacgctttccatggtcaaggtgtgggtgttctcagccctgagcctcttggtctacatctgggttagagcagtactttaaagcatctgggtggcgttgtccctgtctgcggtggttaatttcatgggccaatttttctaggctatgggggccagttatttcgtcaaacatgagtctagaggttgctatgaaggtatttttcagatgtgattaacatttaatcagtagattctgagtaaagcagattaccttctatagtgtgggtaggtcttatcagctgaagggcttaaggaaaaaaaaaaaaaaactgatgtcccctgaggaagaaagaattctgccctagactgtcttcagactcaagactgcaacatcaactctccccaggtctccagcctgctctgcagatttcgcactttgccagagcctacactcatgtaagctaattccatctcttgggggaagccctccctcaacttcccatcattggtcaggagcacacgacaggtgctgagaggcagggcctgtgcctgctctgagatgtgtcccataagcctatctctatttctcttaaactgatgggaagtgacatggctgggcattgatcttggctttaggattgtgtaaaacccaaaagaaagagttgttactgcataaccatgtgattctcagacctcactgccttctccttggtccctcatgcctgggaagcactagaatgtctaacatcacatctgaggccccaaaggctgtggaggcagcagccagtggggaggagtgagggcctctgcatgcagacatttctcggtttgccccccaccaccaccataataggaggagtggcagcattatctctcaggaacaacaggaactggggattccaataaggtcttcccctggggccagaacagatggctcccctgggatttcagagaggaggatcacacaatgcctctggccctctggggagaaaggaggggctgagcctcccattgagcactttctatactttgtctacaatcttcacaaaaattctataacattgtctccattttatagttgaggaacttgaggcttaaggagttaagacacaagccttctctttctgaagaccttgatacaagacatttacaaatgcacattcctatgttccagcccaattccgcccaccataacttgggggtgatcagtgccccaacatctaccctgactacatttagaaacactttttcctgctgtctctcagccatggaaaagatgactccacctgacctgtggatgcagagaggaggaaaagccttcagggatcgttccatcaaaaccctttagtcaaggctttgggcaaacaagtgggtactagcctcttctccagatcttaaaagaaagagtcctcctctgagcttagggacctagcttgggagcccctcatgctggagccccaggccccagttggtcccctgctacagctctggctctcacaaggactgagtattcatgggctctggtggcttatacagggctctcttgagccaaaaccagtggagaaagctctttgttcaggtaacattccccaatagcttcctcccagtgatttaaaatagctcctagtcacatttggcactcccttatctgattcaaggagacttccaaatcccagggacagacaggggaaactatctagaaatttccaagtagaaacctgtggtaacctgggctcagaaaccaaagggacttcaagatgaaggcctcctatactgggctcagttccctccaatctctccctcctgtgattgccatgatctggcttccagaggccagcagtcggagcagtgaagaaaggaggaagggaaaaagagagagggggaagaaggaggtccagcacccaggctagaaaacaaaggtgtcctccagaaacagagatccaaagtccctgaggaccatgttgacattaaagagtcctaaggtaccctaacagctaaaagttccagagagccagacagttctgccttaccagagcttaggataactgtgtcttcctggcgctgtccgaggtactgatccacctttgttgcgatacagttggtatacctaacactgcacataatcaatatctatagtttggttagtttggacatgtgtaaacagttgtgtcgccctcaccacagtacaagtaataaacatatccattacctccaaaaattaccttgtgtccccagatgatgacaagtattggtgaagatgtggagaaaatggaagctttgcacactgttggtaagaatataagttggtaatagccattatggaaaacagtattgggtattggcagttctataaaaaactaaaaatagaactaccgtataattcagcaatctcacttctggacatgtacccaaaggaattgaaatctgtatctcaaagaaatattgcactcccatgtccattgcagcataatccacaatagccaaggtatgcaaacagcctaagtggccatcaatgagcgaatggataaagaaaatgtggtatacatacacaatggaattcagccttaaaaaagaattaaatcctgccatttgcaataacatgggtgaacctagagaacgttatgctttgttataagccagacatataaagacaaatactgcacaatctcacttatatgtggaaatctaaagaagtagaactcaaaaaagcagagcatagaaaggtggttgccaggagctgctgtgggggggaatggggagattttggccaaaaggtacaaacttagttgcaagatgaataagttctaaagatctaatgcacagcacgaagattatagttaataataatgtactgtatacttcaaatttactaagagagaatttcttaagtttcctcaccacaaaaaagaaaaatgttaactatatgaggtgatgatatgttcattagcctgattctggtgatcactttacaatgcatatcaaaacaccatgttgtacaccttaaatatttttattgtccattatatctaataaagctggaggaaaatcaagtaaaaacaaaatgtcctttgttcctttgtttttgttgatgtttttgtgcatatgtttgtgcactaaacatgagatctacgctctgaacaaatttctacatatacaatctcctgtttttaactacaggcaccatgctgtgcaggggatccccggaacttactcatctcatacaactgtaggtttatacccattgaacaacagccccctacatcccctcccccaaggaccaccattcttcatccccactcctggcttccacctcagtgtgaattctgcagtccagaattctgctctcactccctgccatcctgcccatcttgactgtgccaccctagacactcactttccagcctgccccacctccagaagcagttcctctttatcctcatggatgtgcaaactgagcccacctctgagtggccagctgggtccgtctacctccagacctgaactagggcccaccagacattgggatgaggccctagcccctggtcccagccccagagccacttccagaatctgtggatatttggttgaaacaggtcattgcttctgtacatcctgacagattggagaggcaaggaagtctatgcccaaaggaactggtgaaatacaaacaccaaacacccagcctcagagtgactgtgggtcactgttcacaagccacagactctcccatggggtggtattgttcaaaagagaaatctactatgctgcagaaggaaatgtattaggtccaatgggaagtatgttaaatacacttggttagaggatctcttaatccatctcatgttgctgtaacggaatgctcgagactgggtaatttattaaaaaaacagagatttattccttacacttctggaggctgggaagtccaaggttgaggggcccacatctgctgagggctttcttgccacatcatctcatagcagaaggcggaaggcacaagggcaggagagcacgagagagcacgagagggcctacctcacttcggtaacaactcactctcaataatgaacccactccctcaatgacattaatccattcatgagagcagagccctcacgacctactcgccttttaatggtctcacttcttaacaccatcataatggaaattaaatttcaacatgcgttttggagaggacactcaaaccatagcagatggtttctaaaaatatatttatctagtaatttatgtttggatatagcctatactctatgtcagtaggaagacaatagagtaaactagtgaatttaggaaaacttgtcttagtacttagggtttataaagtcacaatagagataaggggctaggaagcttcagagcattaattttcttaagacaacagagtaaggtgagtcccaaagacacagctggagtttgacaaagtgaaaaatggggtccagatgagacaagagcctacagacagcatcctcggtcatccattaagggcccccctccttatactaatgatacaataattaacaaaaccatagtagataaagtaactgagcagtgttgggtcttgtcagaactaccctggaagaagtactggcatagtttgcagggagttaaatggtgggccaagaaagcggtcatacataaaagggatcatgcctgcatgctcatgtgtcctgggcacagtacacagctgttgtggctcccgcaggcattgtttcaacacagtaaagaatcggagaagtccacatggccttctctgttctacctggcagcatcctgtcctggcagcaccgcgtgggaggaactctgaactagagatggcagcttttgttctcccagtgatctttatgggggacttgaattgctagcagtgtggcctctgacctccatggtcactgccgtcaaagaaccatctaaggaacgtccaataagtagaatgggatcaatagccttcaatgtccttccttctgaagtatatttgtccaattagcacacaaaggttgtactgaagtccctcctcctacaaagcctcactgctgggagagacatcctaagagaggatgccagtgcctcaatgatttcagcctctgaactgtgtttcctccagccaggacacagctggctcttctccatctctccctcaccacctttccagaactcacagcttcaagcccactaccacccctttatgtccaagccggctggcctgaggccacctgctagggtcagcagcctcagctccaccacctgcactgcttgaatcacttctgctgtttgctgagccagaatcctgtgcccagggcagtgccctcaccctcacctggctctcctgctggctctgacctgaccctgagaaattttgaggcagccctcataccttcctggccccatccccaagcccagattcttctaaccaggcccatagccactagtgggtctcatggtgaacagacatagcccaatgcccccaaagctttctccatcatgctcttctcaatggactgtacctcaaggggctgctcaggacagagccacactgagattctttatatacttggccattgtgcctctccatccccagcactttcaccagaccagcatctgtcatggtggtccccagccctgtgtggggtagaggggtgggcagcaagaccccatcagcttccaacttgtgtctgacaccaccaatatgccttgagccctcaggaccccaatcacaattgggtgcatcagccagccagtgcccttgctgaggagcaggtacctgagtgttggggagaaaggcatatatctacctggtctccaggcttcccactgcgccacgcatggtttctgcaaagaggatggagactccagaaaaggcagctgatggccctcaaacctagacagacatgcctgctgcccctctgtcacctcagcccagagactccacatctgctggagcaccccagtctgctggagactgaaatgcccccacatttatttttggagcatccaaaaagccaaagtcagaggaatttacaacttggctgtctttggtaacaccatgcagcagtctgttcagtaatagcctgttatctctcagctcagatctctccatcccagacagcagagggtacaggaaggtgagcatgacagatttccaggcaatccatcctgaaagagcctcgtgggtcaagatggaggaggagcagagtgaggaggacatgggcaggaggaagaggaggggcagtgaggacaaggagaaaggagagagggaggaaaggtagactgatattttctgagactctcctctgtgccagccacagaactaagacaccatatagtggtaccttgttcaatcctccaagagcctactgagccggagttattccctcattaccattgacaaaaggagggctcagagatattaagaaatgtccttaaatcacatagccagcaagtacagactcagactgtcagacgtgaaaggccatgctctttccactgcacggtgcagcttcagcaagcaggaggaggatatcctggggcagctgggagacctagtcggggcagctgggagacctaatcaggacagcagatgggtgtcacccatatacttgctcccataatgctttgctgtatcatggggtgtggctccacaacaaaacttgcctccaccaaagcctgagggagttactggttcccatttgggcctctctagccaggcagggcaaatgcctagaccacacttgtatgataaatgcctagagaggtgcaggggctcctgagaacactgggatgccagagtggaaaaaaaaaaatgcactgctgcctttctttttctcttgctctctctctctccctctgcccttccatccatccaacctgagagttcaaaacttaactcaaaaaactactggcagtttaggcatggtggctcacgcctgtaattccagcactttgggaggctgacgtgggaggaccacttgagcccagaagttctaggctgcagtgagctatgtgactgaaccactgaactccagcctgggcaacagagtgagaccttgtcttaaaagaaaagacaaattggcagcctcacaatctgttttaattagctgattttgaaacccttgatctataggtctgagattctcacagattattcaaaccagggtatccaccaatgtaaacagaactggggagcccacttctgcattgggggctggcctttgtttcccagcacttgtaatttgtgcaaagtgccttgtggctgactgccaccgcacaggctctttctgctgacagggcacttctgtaaagttcaggctgcctcagctactgtgaagttaaatgtgggtgaaaacaaggcaaacctatctccaaatgtttctagatggcttagctccttcaagcccagatgacatcagagtcatttcactttcaaaacaaattcccccatgctggaaaaatgactttccacagtggtgccaagaagtagctggaggaaatgcactctttggtctcccaccccaccctaaacacaccgtccctttctttgctggagctaatgacaagagcactcacccatcgcctcccaaggagcaagttcacccttcattagtcagcaaagggaggggactgctttccttccaatccgctcctccaaaaggatttcttcccatctgcctctggcagtggattcaaaagccttggttctgcctccccgaagtccatggagaggcccatcttagaccccaagggccagtgaaataggaagcagtgggtgccatggaaggaaggttccgatcttggttccaacactcactagtcctgcgacttgggcaagatgttccacctttcttcaaatcactgtcgatcacatctcacaaggtgacttgggagactgagccttttataaactattaggagctatcagggctgtgacctgcaccaccccaggggatgccatccacatagactgcagtgaacagagcctggagtgtgtcttctgcagtaggggggtgtcagtggacaaaccccagtggccacattagcggtggcccacccactgagggaggagcaacaggacacccaagaggctctgcagcacaggaaaccaggacagaggatcccaaactcaggcacgcctcaaggatgcctagcatcttgcagagctgtggcaacgaaacaacagagcagagcacaggcagcctcaggaggccccaagcctttagccacagctcagctagcacaggctctagggctgagagaggccaggtgggttggacagagccgccagtcagggctgggggaggagcctgggcaagaggaaagtcctgtggagggaactggggttgagactatgcagtggggaaagggggatcagaagctggaacttggcaagctctgtttaattcctctgccattaaaataaccatgaaaatactaacagcgatcattacccagcactaaccatgtgccaggcaccaggccaagctcctcacacatatcttctcaggtcatcttcacaacaaccctgagatgttgacagataaggatacagaggttcctagaggctcaacaacttgtccaaatcactcagccactaatttatgggtctggaattggaacccagtccctctggccctgtcatgcataggaaatgttagtgtaatgaacagaggactctccaggcctctgagctcccctcctcagatccccactccccagaacttgaagtgtggcacaggggcaggaagagccaccaggggagtctccgtggcagggaaatctccctctttaggctcagttcagtaggtccttggcacaagatataatgacgtccgggaacttgcccgcctatcaccaaaccctcttccaatccaaaacctcaatgtcaaagcccaggaaattcgtgggagaggaacagccttctccccagctgaggagcaagtgagagctgggctgcaccctgcgctggggcgtcccactcttcccacacatccccagcccccagactggcgctcctggtggctggctccctgagggacagctgggcctgtcggcgcttgttgtttctgccaaactccatgctattacaacaaaacccctgtatttcttgcaaacaattttccccttcgcaatctcataaattaattccctcctttcaagctgactggcttcctgctaatctaaccactaacctatcaccatccataaactaaatgatccataaacactctcccatctctagcctaatgcactaaaattagttttcggtttttcctgctttatctttctttgttaagggcagatcaggtccagcttcctctcttcttcctcctgaacatgagtggcttccagctcttcactcctgaagctccacttccttgcccctcagatactgtagccaagaggtggaactggctgctttcagctggtgctcagggcctgagctgctgagggctgactcctgcctgcaacccaccatagaatgagccccacatgagcatggatgggacaggtcccaagggttgtcccaaccatgaagtcagaaactccagatgatggtaggtggcataaaggtggctcagatccctgagacaagggctcctcccactccttgggctctggtgatcagtggccatctgcctccctgacccctcagggtgggatcagctgtgcttacagagcctggcctggggaaatatcagaggaatccctggcctagctcagagatgggcaaggaagcttcaggtgttctgggggcatttcctgccaggcctgggaaatggtggcacaggtgcccttagaaggacagggtcagtgggctgcaagaggtgcctgctgctcaccagaacaagaccccctgaggaggctgctctctgaaggtggcacctcttatgaagtcaacctcagctcttgggccaacagtcccctttcccagcactcctcagatgtgtgccagctgtcctagccctctaggcagggcccggaatctgaggctgccatttggagctctgcccagtgccctgagacctactgcaggagcatcagaaaggccacatggtgcagagccagagcccccaggatccatcacagagccaccaaggctttgtgttagtccatcccatgggaaccctccctgaagccctcccctgcttgggcctgcagtcaggacctccatgtaacctgtccttcccaggactgaccttctgcccccgcccactgctggcatccgatcctgttgtgccgcacccagttcagagccgccctgcttccatcaagcttccaggctctgcctctgtcaaacagcatgaccttgagcaagtcaccttcagactcctcatctgtggggcccatacctccccagctgtcacaaacatgaaacagcaacatgatgaaagcacttagcacattgccttgtggagaccccataaagcaaaggcccattttcctcagcctttgtcctccagcccccgcccccaatagccactgcaaggttcttgcaatttgtcaccctggccaggcatagccacacgccagccagcactcctggaccccaggcaaggagggctgaggcatcagcacatggagcagagaaaagcccagggcaggaacatggtctatgtggcccaggaagggggctggggctgcttcctctaatgagtccagggctggggaactcctctcagaactactacagcctctgagtcacacaaggaactggattttggcatatctggccacagtttaattttgtatcagtgaacctggtcacccacctgatctgcttcctgccccacaatgcctccttccagccacattaacccatccacctgtgacccatccatgcactcaccctccccttcatccatccatcctcccacccatccattcatatgcccccatattttccttcagccacccatatacatctgcctccaaccatccacccatccatctatctactcccactcacactctatcaacccaaccatctatccaaccatccccaacctccaattcatccagccacctatccagctccaatccccaataatccatccatctacacatcatcccactggccacccacccacccaggcagctataaactcagccaggttttcatctatccatccatccatttacccatttttctaactcctatctgtcaacccatccactcatccatctatccatctacacatacacccatccatcacctattcacctacctacacacccatcccccactttgatgagacagagcaagaccatcacaaaatataagactagatagccagggaactagaactggtcacagacagcacagcaaccactctggtccacactggggacctccactcgaccaacactccccatgaccttctggtgctgcactctgggacatgccaccaggtgtgccccagaatcccccaggcagactttgagctgccaatacattctgcacatttggccagtaaggcagagatcacatcacgctcactgtccaccctcccacacaccctcacagccaggactgacagctccttcatgtcaggggctttgcagccctgacttgcaagggaacccagtctaagccagtgttctccagagtctccagagatacaacaatcccccccatcaggcacagcctggcccctgaagctctgcacatgcctgaaaccagacaaagagcctttctccagtgctggacccagaggcccctcaaagctgccccagcctaggtggaacagcccaggcaaagcctccaggctcgggagggcagagccccagtggaagatgggacacagggtggagatggagccagctcctgagacagcaaggggtacctagcctagaataagccagcactgtgaatttaaagccccagggctcctgagcaccagccttgcatcctccgaggtcactcctgggcgctgctcaccagacccacaaaccccaactgacctgttcagcctccctcccattcagctgccagatgagatggctgtcttgcttttatatgattttccatgagacatggacaggctggcattcagaagcacattattacaagctagtgcttctcaccctgagtgtgcacaagaatcacaagaatcacccccactaaaatgcatatcctcagccccttccccaagagattcagtccagctggtgggggtgttgggacaggaatctgtataaaagtacggccttggcaattctgatccacgtggccctaggaccactcagtacagaacaacacacatctgaatcccctcagaagagagctgcctagctccccaccccttgcctctctgcagaaggcagaactccccccggacctgcccaccctgggcatctgctcagagcttcagggctcatcccaagtctgcatagccgcccctttgtcctgacctcctcatactctgattctagatacttggcttgcagctccctcctgggagggaggccgcacctccaggcctggctggctcatccacaagcccccttccccactctgagcaagacagactcctgcagagtaaaggaaagcatgtgagtgggtgttctgtggacctgtgagtttctagaagtgttatgaatgacccaggaagaaagcatttgtaaaaattatgacaaatagctttgatggtgtttttcaattacccacaattacatctcacctgctgaaagtgtggattctccatactgccacatttcttgggaacacacatctggcatccttgcaccccacttctgctgggatggcaggaagaagaagaggtgggcaggcctcgggcagcaaggaccctacactcgattctctcagccagtgcttctggctgggccatgaaagcaagagggtccccattcctgactgacttaaagagcaggaggtcaagggatcctccaccaaactgtgtcattttttaattttaatttttatttttatttttagacatggtcgcactctgtcatccaggctggagtgaagtggaacaatcatagctcattgcagccttgacctcctaagttcaagcgatcctcccaccccagcctcctgagtagctgggaccaccagcaaaagccactacacccagataattttttaattttttttgtaaagacagggtattgccgttgcccaggctggtcttgaactcctggcctcaagcaatcctcccaccttggtctcccaaagcactaggattactggcacaagccactgcccctgacctgcatcctttgacttatatagactgaagggctgggctgggctccccaagcagaaaaaaaggcccaggtgcttggggagcctcaccccactgcctgcctcctcttcagaggcatgagaaaggccaaggccccctccaggcaggcaggaaaaggcaatgactcagcacctgagtgctggtgccaggagtggctgtctaacctgctgcagctgctagaacacagtggaccccagaagtcatggccccaccttggctttaattctgcacatcgcatgtaactcagacctagtcatggccactgctgccacacagaagccatgccagagctgaaaaacaccttctgtcaccagtcaagctccgtgctctgctgcagtggctactccgaaggtcctgccctctgcctgccagggccagcccacaccaggggtccacacaggctgacaggttgggagtaaagctcagattgcagccccctcctgctatgaaaagcccacttctgatgtcctggggatgccccagggcctgaggacaagagaacccacacaggctaggcctggcatcctccctgtccgttccctggagccagaagttgagcctgaggacatggcagggtgagggacagcagggaagaggaactcacccttgctgagaccctaccataggcagggcaatctgctagatactcattcactcattcactccctcattcattcattcattcatccattcattcaactaagcacctactggtcaccaagcgcttaagattcacctgagaaccagacttagaacctgttctcatggagctccattctagcaggagagaaagcactaaaaactaaacaagtaaatacatatacatcatgagtgccaggtgagaagctctatggaaaaacagatcaggaaataggaaattggggcttgtcatgggttttaagatggggcttaagataggtctcacggagacagtgaaggtagaagggaagccatttgaatgtcccagaaagggcgttcagggtggggggaactgggagtgcaacgactctgaggtcctgaggctggaccatacctggggtgctgcaggagcaaggagtaggccactgtggctgaaggggaggcacccagggagaaagggagtagatgaggccaaaatgagacaagatcatgagggtctcttgggcttcgactctgagggaaatggggagctatggtgggttgtaagcaagagtcacagcctccctttattttcaaaggctcactctgacaattgtgttgggaatagaagtatggagaccagcctgaagtgctagcttcacccaacctggccacaacctaggggtgttacagtgagagggccaaggtcagagaggttaagcagctcatcccagctcactcagccaggattgcagagccaggaatgcaatccaggtctccagctgttgcctccacccttttctgcctggcatgggatgaaggggtgggatcccctccccctgccccaggccccgggaaaactccagctaccctcccctctccccccaactcctgtgggtaaagcacccatcccaccatggggagcacactccagctatgactttaggcaaagaggttccaataaatagtagcagctgcctcagaggcttccatgagataatctgggaggtgggcaatcctggtgtctgcagaagttgctgacgaggacagggagcgtggtgaaagcactgctgatggctttcaggaggatctgctgtccagggtgcccaggggctgcccctcctcctctcctccttctactctatcaaattccctcctaggatcagatattagaacatgaactgcagtgacaagcagctgtaccaggagctccctagctccctcggtgacagcagcagcagtaatcaagtaatgaaatgcaattacatgttcaaaccaatcaccaatccctgctgcacctccataagcacagagcatcctggggcctcccctcgtgcctgggcccagaggcccaatgtggcaatacatctggcagaggtgggagaaatagagccggcagagcgcgaaaactcaatttatagattacggtaaagcaagtttatgagcacaaactttcaaactagccctgctgggaacgaaatccatttcatttggctctagctctgagatgaatcactaagcgaatgaggatggcagagtctccaggaagaatccttttgcacaggaatgaagagggacacccaggccacctcctgagagattactgtgcattcccaaacattgtagagggtggatctcagggagggcagccaggaggtaggggtgacagaatgggcatttcaaacacacacttgcaccacggatgaaccttgaaaacctcatgctaagtgaagtaagcacgtcacaaaagtactatatgattccacttgtatgaaatatctggagtagtcaaagtcagaaggagagaaaggagaatggtggttttgcggggctggaggaagaaggaatggggagtcactgtttaagggctatagtatttctgtttgggaaaatgaaaaagttctggagatggatggtggtgatggctgcacagaatgtgaattaatgctattgaactgtacacttaaaaatggctaaaatggtaaatgttatgtacattttaacaaacacacacacatccttaggactctaccttaggaaaatgctccaaatatggacaaaatttcaagcacaagatgttcattgtggcttgttattattattattatagtaaaatgtcggagagagccgggcgcggtggctcacgcctgtaatcccagcactttgggaggctgaggtgggtggatcacgaggtcaggagatcaagaccatcctggctaacacggtgaaaccccgtctctactaaaaaacacaaaaaattggctgggcgtggtggtgggctcctgtggtcccagctgcttgggaggctgaggcaggagaatgccgtgaacctgggaggcggagcttgcagtgagccaagatcgcgccactgcactccagcctgggcgacagagtgagactccatctcaaaaaaaaaaaagaaaaaaagcaaaaaaaaaatgttgggaagaaaaaggaaacagcaaagtcaattcagatgtacccaccagcagaaatattatgcagtcattaaaatagtgattatgaagaaattttaatgacccaggaaataattaccatggcatggtaattatatgaaatgatgtgccacattataaatctcttctgcaacaaggtcacccagtaaaaatgaatagagatcgggccaaaatggtggcctggggtcacattctgcctcttcccaatacaaaaccctaaaagtaacataaacacttttttaaaaatccatagcagtgctgaaaaaccagaatggggttctttcctgcaggagctggattttttaaaaaagaagaagaatgaggttcttactagggcaggaatcatgaagaatgcttgcaaggcagaaggttgatgggttcggattggaaatggtaccacagggcaaagcatatccgggagagggctgccatgaagctggcagctccaatctgggaagcccagcaagtgaggacccagaagaagccccaaatcaaatgtgagggtggctggcagggccatgatgccaagcagtgacctgcaaaagcaactgcccgcaggcagaagcagggagtaggggagacagccctcgagtggcaacaacacacaggaggtcagtggagcccatacccaaagactgggatctgctccagctggcacaacagtgcagagctcttcccatccagtatgtgagttcagcctcacagataggacaacagaaaccttcaaacacaaagacaagcaggcaacccagaatcacccaccttattaagaagattacacgtcgaaagaggcacaccaaactcatctgctaaacgaacgcacccctgaggacttgggtactaggacaagcagaatgacactttgaacgagaaaacagagagaggggagaggctatcacatccatttaaaacgaatgaactagatctgggaaccaaacatttcatcattaaagtttaaaaaggggctgaatagcagcatggaacagatgaagatcaaattagtcacctagggggctgaaacaggaactctcccagatggcacaaaaacccagagatggaaggataaaagtaaattaaaagacatgaaggatataagctccaaccaccacctaaaaggaattccaaaaagagacctgagagaatatgggaaattagaaaagaaaatgcagaaacacacaagtcctcagattgacagaacctaccacatgcaaagtagaattatgttttgttgttgttgttgttgtcgttgttgttgttgttgtgacagattcttgttctgttgcacaggctggagtgcagtggcatgatctcgggtcactgcaacctccacctcctggttcaagtgattctcctgcctcagcctcccaagcagctgggactagaggcacacgtcaccatgcccagctaatttttgtatttttagtagatgtggggtttcaccaagttggccaggctggtctcaaactcctgacctcaggtgatccacccaccttggcctcccaaagtgatgggattacaggtgtgagccaccttgcccggccttgaattatttttttttaaataaaaataaataaataaataaataaataataaaaataaatattgggcacagagtggtgaaatttcaaaatccaagggacagccaggcacggtggctcatgactgtaatcccagcactttgggaggccaaggcaggcagatcacttcaggccaggagttcaagaccagcctgaccaacatggtgaaaccccgtctctactaaaaatacaaaaaaaaaaagctaggtgtggtgccgcacacctgtaatcccagctccttgggatgccgaggcaggagaatcacttgaacctgggaggtgcagaagttgcagtgagctgagatcgcaccactgcactccaacctgggttacagagcaagactctatatgaaaaagaaaacataaaaatcaaagggagaaaggaaaaatgccaaattatcccagaaaacaacacagcctgcctacagaggagcagaagctgcagcagtagatggcaacttctcgagagccggggtggcctctttcctagctgaagggatgtggggcttctcttcactcagcctcactttctctgcctgttaagtggggagcagccccgacctcacagagttgtcagcagaattaaatgacttactatgtataaagcactggtgcagagcacacactgtatttgacttagcagtcactgttcctgaggacatggatgcatacaagtcaatgaaacaatatctccaaagagcttaggagagaaatggcataaaccttaaattctctactcagcttttaggaaggaaacaggcattttcagaaatgtgaagatacagaaaattcaccaccacaaaccctcttggaaagaattaccaaacggtatgctccagcaaccacaaaaatgaatccagagagcagagaagtgagtggctgccagcggccgggggagtggaaattggagtgactgctcaatgggtacagggtctcttctcaggataatgaaaatgttctggaattaggtagtggcaatggttgcacaacatcggaatgtactggaagtcactgaagtgtatactttaaaatggttaaaatcatgtgatgtgcattttaccacaatttttaaaaatgaatcaaagaacataatgtggaatgcaaaagcagtagtgagaaaaaactaaaacttatcattaaaactttattgaggcccagcatggtggctcacacctgtaatcccagcacttcgggaggccaaggtgggcgagtcacttgaggtcaggagtttgagaccagcccagccaacatggtgaaaccccatctctactaaaattacaaaaattagctgggcatggtggtgcacacctgtggtcccagctactcaggaggcttaggcaggagaatcgcttgaacccaggacgcagagattgcagtgagccgaaattgtgccactgcactccagcctgggtgacagagtgagactcatctcaaaaaaaaaaaattggtttttattaactattaaaatttggaactaaaatcccagctggcctcatgttaggtagtgatacagctcggggcagaaggacattgaggcatagaaaggtctcaatttgttccaggagacactgattatacgttgagagacacgtgtaaacataaaggtatctttaacatataagcagtcactagaaaaacaaacatgtaatgtattattgaacccttagtggatggctctccactgggagaaagggggaggggactttttggttgtcacaagacggttggagtctgctgtagcttagtgtccagggtgagggatgccaaacgccctgtggtgcagcaaagactcccacagcccaaggaacagtcccacccaaaggacacagggccgctgttgagaaaactgctttaaggaacaaaaacctggacaaagaaaacacagttgattcaataaaaggcaggaaagggcaaaagtagcacaagaaagcatagcaaacaagaaacacaaaataaaatggcaaggaaaagtccaggcatatcaatcatctcaataaaagtaaatagattaagttatgctaataaaatcttcaaaaaaaaatgagatttttttcatcatgacataacttttttttttgacataactttttacaaaagatacaaaacaaacacccaggaaggttcaagataataggatgagaaaaacaacacctagcaaaaaataaccagaaaaaggggctgtttatcagacaaaatagaattcaaggtggaagcactcaaaggaacagggagagttcattttgataaaagacaccatctacaccaaaaatataagtcatgacactatatgaaccttgcaacacagcttcaaaatagataaggcaaaattaacaataattgaaggggaaaccaaccaatccacaatcttaaagatgattttaacatttttctttcagattcagtgagcaaaaaataatatgaaagatttgcacatctcacttgtatacgtttacctaacaatattgtattaaatacttacattctaagttctggtttaaagttctgcatatattaactaatatcatccttacacactaccatgaagtaggcactactgtcccacgcattgtacacaatgaaactgatttccagcaactcactcaccatcctgcggccagcaggaggcagggctagggttccagtcaggaactggccccaaagcccgtacactcaacctccacttatgctccctctcgagacccaaaagagacagcacagtcttccatgtacacccaactttccacagtataaatctcagtaaaatccttaagaaaaaggtattcaaaaattcattgtgcattaatgaagtccaatgcaataagaccaggaattaacaataaaagaaacctccttcccaatctatctacttagaacacttaaaacattcttttttatacctgctggcttaaaagaacataacaagagaaatttcaaactattcagaaattaatttgaattgagcacctattggaatgtggctaaaatcatactctttgtaaaattcttggtaaactagggatcaaaagtaacaaccctaacctgataaaggacatctcctagaaacctacaacaagcatcacacttaactgggaaactgtagaatgttctaccactaaaaatatttagcattgtcccagacaacgtgacagcacctgaaaaagaaatatggacaagtgttgaaaaaggacagacaaaattgacataatttgtagcaaatataggtatctacctatgaactccaagagaattaactaataaactattggaactcatacaagagttcagcaaaactcaaggatataaaatcaatatgcaaaaatcaatagctttcgtgtatgggagcactcccaattagaaaatgtaatctaaaagaaagctcatttgtattagaaataaaatcaataaaatccctggggataaacctagtaagaaatgggcaggacctacacaaagaaaaacatacaactttactaaaagcattaaagagacccaaaataaatggggagacacactatgccccgggttggtaactgttcatattatgaagatgggagctcctgccttatctatgtattcaaagcacccactgacagacatatattttcatgtataattgccaacagtagtggatgagaagtagctagtgtctactcacaagaattgcatgtgtttactgagcacttatttacctaatcaaatgtatgaaagtttgaagaagggtaaaacggtctgaaccacatgaacaaattctgaaaaatcggagggaaactttaatgaaaaagtagaaggcagctcaaatcgtccataagaccaaaattaaaatttaaagccatagagagaccaaagagcatcaaataaagagaagaacaatttgccattggaagagaagcaatggagtactgttggaccaagcaaatggtgccaggttgcaataatcagggagctgaagtcccatggatgcacataatgtcggaggtgtgggccacagctgtgggcacatcacgtggtaaattggagacaagagtggagcaggtgccaggttacccaggaggaaaccagccaagtggggccctaaaacaagaacacatttttaaaagaattttattttggccaggcgcaatggttcgcacctgtaatcccagtacttcaggaggccgaggcgggtggatgacctgaggtcaggagttcgagaccagcctggccaacatggtgaaaccctgtgtttacttaaaaaaacaaaaattagccagacatggtggcagcgactgtaattccagctacttgggagggtgaggcaggagaatcactggaacccaggaggcagaggttgcagtgagccgagattgcaccactgcattccagcctgggcgacagagcaacactccatctcaaaaacaacaacaaaaagaatttgatttcaaagtaagtcatcctgcgaaaatgaacacctttgttggacatccttacatttatgctatagtttactgctgttgttattttgagttagatatggagcctaaaatcccactgcttagaggatccaagggtcttgctgtaacactggttatatattagttatctctacccagcatgccctcatcaggacggcagactttactctgcccactgccagagaccccaccattggacaacagcatcttaaagaatttccccaagcagccaaaaagcagagcaaacccacatgagaacaatagcactcacaatcaatcaatgccaatattgagtcatggacacctatatactgctctttcggaagttttatcactgagctcattaaatgctgtatcttactggagaagaatgccattgttaattgtgtttgcagtgaactcttaggataaataaattaaacaagatgatatttctgttaacaagatctgctagaactgcatgtgttaggtagaagagaaggctcacagtaattagggaaatggaaaagaaaataacaatgaggtaccgcctatcagccattggactgacaaaaattaagactgataatatcaagtgttggcaagaatgtgaaaaagtgggtgctcttcttaccctgtcgctgggtgtgcaaattgattccactttctggaagacaatttggcagaagccatttttaaattaaatgtgcatgttattcagacaagcaattccacaacttagagtccacctagatacataggcatatataaggatttccatgacaatatggtttgttattgtgcaaattaaaaacaacctaactatctattaagggggggtatctgttaaatatgtattcacagtttcatgtatgtcatgaaactctgtttgaaatgtggtggatttatatgaaatagcacagcaagctcaccaagacattggtgcatgaaaagaagcaagtgcagtaaataggtgtagtcagcattatttatatatacaaaacacacaaaaagaaagcaaaactccttattctgttatgtgtgtaggttacatttctctaaatgtaaacacagagggaaagttctgctggaatatagagcaagctgatttcagttttccctctgaggcaggaaacgggccttttgtttcttttaattatttcttcagtctttcataatgagatgtgtttgtgtattatttgtgacatttaaagaaataaaagtgttaaagttgaaggctgaagacaaaattgagtgaatggtatgcgctcagccatgtgaagaagtctgcaagaggagaggctggaagccatgagcagcggtgctctgcatggctgggttcctggcagcatttatcttgccaggtaccgaagcactttcatgggcttttccgcatgtcctcatttttccgtgatcctcgcatattgcttttacaatcagaaaaattcaggaagcacttttatgtgcagctggctggtgccccactctccattaaggagaggttccctatagattatctcacatccccagaaatgattcacaggtcaagagtgagccttggaactctatgtgtgcttggcaagaaccccgttcccccctccacccccaccaacatgctcagactcacctttcctgtaagctgtgagactcccaggacttggggactctgcatgaggccctttagctctaaggccctcccaggacccccgggtcaccccacccccagcctctacctccctgtatagcacttgacaagagagtaagtccaagacctgggattttgagggctgaactggggacacccaaggctataaggactgagtgtctttcaagcccaaaagccctgtcactatgggctgggtgaccatatccaagaaggccaggaggaaagcaaagccctggctcagagaaagaagcaggggtgtgagacaaatatccgccagcattgcctcccacatgcagggacagcttcagggcatccctcccgagccctctaatgtaaagtgataaagcggctgcctggttcccttgccctggccagccccgctgaccacagacatgcatgctgcctgctgcagggtccacaaggttgccttggccaggctgcctctccccagctgtcataccatgggccctcctctagggccctccaaggcaagtgaacatgctgtggttacaaacaaccgccaaccccaactagccagatgtctacagcccatgtggttactgggtgaataccccaatatgcctccatggaagccaggaggaagggggcccgctgatgtccatggaccagagcctgagaagggctttggcaaggagccccctgcctactggtgaaaggataggggtgggccgagtgtgcagactccctcagctggcaatgagagaatgacccaaatgacctttctgaacatatatgctaccttctgtgaccatcccctggtccacactcactgactgacccctgacccccaaccagccaactggcagaacccagaggtcccagacacaaagtctcagcagaagggccctgctgggggtctctgctcaaattggcctgccagtctacccctgctcatgctctggacaactcagaatccaaccccaaggacccagagcctggatcttccttatgaagttggaggtggccacctcccttgaagcaaaccaggccacatcacagtttggcatcactggtgcccttccaggccagcctgtgaggccaagcatgacccaccccagatactgaccaccacagccctctcctcagctcctgtgccacttcccacactctgatctcgaggatgggctccctccctgcatgctgagctagccagcaggactttcctcccctcattgcctccccacaaagtccttcccctcccccatcccagtagcgtcaggcatcagggcctgtatcatggacgagaccgtgactcccccagggcaggagcgcatctctgtttcctctgcatccccagccccggggagggcctcagcccttcctgctgaccccagactcaccattcccatctcgggggtggttcacacccttccctcttgcagtgcgccaatttcccttcctccctaccttcttaccagccttccttggggctcctctcccctcaagctcctcaggcaggcaaaggaggcctctgcagaaggcaggaggtcctggccaccccacaagtttggacgctgggtccagcaggctggcaatgccaccagggctggacacgtttccctctttcagttcccctccagcaagcccacccacagcccagggctcaagacagatggccaggagcagacccctggagactgcacagtcacattgatggtggatgcgcccatttccaagccctgaccaagcaccgggaacagcatctcaccccgttcttgccccaaccacaggctgccatcaggatccgtccccacagcgccgagcagcaagtagaggccaagatcaccttcatactttgtgtgaggccacatagccaggaagaggagaagctagaaaataatcctggtgtggctcacagcaaatctcaggtgaggccagatgccgagggaagtaggtttcctggcaaatacaagccacataagacaggagcagcacgtccaggaagcccgctgcacatgggcacaccacagacctggtacaactgccctggcaggtgatggctcatctcacagacgtcaccttgcaggagcttagcctcagagagctaggggaccacagcaagttcccgcagccaaggggcaggagggcctggaggccaggactagtgagcaaggaaggaacaggaagggcaggctgcatgccccaggcctccccaggaacaccatgagagaagggccaccagggtcccaccataaacaatccagggaggctgtggcagggatggcacatgcaggaggcatctggaagcccatcgctgatcatcgtcacccatgtagagctgctggcttggcctggcccacgggatgtgttgctaattccacctttcccccatccctcacctctctgccagccgcccagagtatcatggcctctttaagtggctcctaggttctcactgggcattccagccttggactcccatgctagacagccctggctggggcaggaggcacacagagccgtcctgacagggcctcccagcctgcagagccccccttccccaactacccagggaggccactacctgctgagcctgagcagctccgtgtgcagccaagggggtggcccagagcagtatgtgggcttggtagcaattgtgatgcccccaccctctccacaaggtgtacaaagtgcccacaaccccattggaagctggagggctggagtcaacacagtgccagacattccaccagtgccctccactggacagggctggagagacagagactcctagtctccccaaaacactgacttgggaccccaggagcagggggaacagaaagagttcagactttggggtcaccaagcctgggtccccagctcagcagtcacttctatcccagttctggtccctggggcaggtaccaagtgtctgagtttccatttcctcatctgcagacaagttgccatgagaaacatacacctactgctagtaactggtctggcacagaacaagcgctcagtaaaagcaaagccactgcctattctccagtgatgagcatccagccgctgtctctgccaggtcagactgggaactgtatggtgtgcagagatgtatcagacacgggcctactgcctgagacactggccatcctgttggacaggaatgacacagaaagcagaaaccgacagtcaggacagaccagacggaggctgcagggctcagggcacgcctgcaacaccacagcacctgccaatgtgagaccattcatttcagagatgggaaaccccgagtccaggccaggggtgacttccccgaggtcatgcagctggccaatggcagggtggggcccagaggggccgtccctggcctctccacccccatggctggattggcttcctaacagcccctccttgacccctccagaatccaggccaacttcctgctggaggagggggctgccccaggacggtgaagggagggcaagaacagcccctggagaggaagaggatgcattcctgaaggagaattctagacggaccccctaggattcagcggcatgaggtatgaagggtccaaccctctccctgcagctcagaacgcctctgaagggccactcagcctcagagctcccaggggtctgctggggcttcccctgggatggcctctcaccccttggcttgtgtcctgcctggcctgactcctttccctgccttccccaggtgaagatcccaatgtcacccccaataagcctcctaaaagccaaactcccacttgaactcagctccctggaattgacactgtgtcccaggcccctgcctcatcccctctggggcttccttccctgccttcccacagtgactcccgaagtgatgcctccagcacacccctctcctcctgaggcttcacccaggtcccccaagtaccccaaactccatggtctacaccgacctcacatcttcccctgctcctccctgactcctcatctcaaagatggcctccctgaggcccaagcgtagacgtgaccttcaccctgatcttccccttccctcactccaatacccagaagccaacctccaagctcctgctctgaccttcacacagcccctcctcgcttctccgcctggctgcaccatcagcctgtccagcccaccttccaccagggtggcctcccagaaacacaaacccatcacatcacccccagcttcaaatccttccagctcctctctgctatcagtatgaggtccagctcctgctcctgggagacccacctaccactcaaacctccagcctcatcttctaccaaatctcccatcaggccagtgctccagcaaaccaccaggcactccctgcacaccccacagatggaggtttctcatctctgcttagaatgccatctcccaccaccatctcttatctctcatcttaggcaacctggtcaactcctatccacatttcaaaaccccaactaaagtgtctttcaggaagccttccctaacttcactagagagcaaaactttcctgccagtctatgctgcttctaggataatttcccatttattccatgaactataaatatttgtttccatatctatactttccccactagactgggaacattttgaggaaaggagttgtgctggagccatcctggaatcccctgcatttagcagagagcctgccttgcagcaagctgtgaacaaatgtttgttgaaagtacagttgacacttgaacaatgagaggttggggcgctgacccctcatgcagtcaaaaatttgagtacaacttttgactccctaaaaacttaactactaataacccactgttgaccggaagccttactgataccataaacagtctattaacacatatttgtgcatgttgaatgtattatatactgtattcttacaataaactagagaaaagaatcataaggaagagggaaagtatatttactattccactattaagtggaagtggatcatcataaagatcatcattcttgttgtcttcacattgagtaggctgagggggaggaataagaggggctggttatgctatctcagggttgggagaggagaaagaaaatccttgtgtaaatggacctacacagttcaaaccaatgctgtttaagggtcaactgcatagctgaatgaataaatgaatcaacccactagcactagatgccagccgccaccccctcccttctctcctcttccctcaagctgtgcgctgcctggccaggggaagcccctcacctcctacatcactcatggcaaaggctgcctccccacacctggccccctagtcccctggcctatccatctgcttgactaatgaatagaacaaactgtgttccatttccggggactatgcctgccttaaactgctttgaagagcatagcacctgctcacatatcaattaaaattataattaggtggtgagagtatataattaaaataacacgttccatctccctcatttactgctgctgctggctgtctagatgaagtgaagcagttcccagagtggatgggggtggggatcgcctttgtctccgcatgcaccatgctttccttccaggtgtctcttctggcacagaaagcagatccccaaggttgccctaagcaacccaagtgaaaagggttttctgtcacttgctcaattatgactaacgctccttgcctggttatggttcgtgtcacatgtcagactttttcaggcctccacacctttttacctgaagtagaagaaaggcatttagggctatctgtctaaatgcccttcttctactgtatgcataagaaactcctactcatccttcaaaacccaattctgactttcatctgtgctgggttctggggacataggggagaaaaatgcagtccctacttcaaggcacacacaatgctgggcataatcatccccatgttccagaggaggaaaccgaggctccctgataatggaccatggttgggaggctgaggatgtggccgggtctgcagagccctcccacagcctcagtccctccccacttccagaacacaggcctgttaaatccactgccatctcctggccagccagcggtgctggcaggtaaacctgtcaagtggcatgtcctgctaaacaagaataggagtgtggtttgggaggagccatttgctgctgcatggtgctttgcagagattttgctcaaccaggagatatgcccaccacctagcacatcctgctgtaatatttatgaagtcccattttggcagagcataggggaaatcactccttgccttttaaaattaaactcacttagactttcattgctataaccattaaaaccagagtgttagctactgtcggctcctccgagttgatttgcagccagccagggctgccttatccctctgcctcctccaggatgccaggtgggggaaagactcacagttattgagtacctcccaggtgctgggcactctgtggggtattttacctatgctgccttggcatttccaaaatgggctttgcaaagcactaattacacaggatgttaataggtgctctgccaaataaagttccatgttcaactgagcctgcaaacactgagctcacaaaagttaatgggcttctttactgcaggacttctcagagccttaaatatgctgatgtatgtggtgatgtcctcaagagaagcatctggctgggtcatatgtatttggccacagaggctgttttctcctgcaatattcagtaaaatcagttgtacagaattcaatctgggacatactgctctattcttccccagcctggaaagtggccattgctgtccctattttagatatgaagaaacacactcatgaggtctctctcattcactgctatatcccctgcatccagcatggagacctccacacagcaggcccttgacaaacagctgagagctatatgaagagatgcccagccaatggccatggaggggagagctgggacaacactctgaaagtatctgactctttcaaactcctcacacttcccatggccacttctctaaagctcatgaaagaacccctctccaacctgccccacaactgggtagactgtgaagggactgggtatgcaggaacctggcctggtcccaacacagggtaaacccttagaggggccctctcaccctagtccagctgagtatggtttccatggggcctaaccagccagtgaaggggcaggaatccaggagtcacatgaacatcacacctgttgatcccaaacattgaagacagaagggcggcaggggctgctccactccacctttctgaaggctgtgtctctatcacagacaactccaggttgctctcctaggagtctgatcactggacttacttgtccagtgttgtgtctaagaaggagattgtttcacagtgtttgcaataaaatgtacacaataacacatagaaacactaatagggtgcacaatggcagaggcagaggctaaaggctgatcactgtaatccccagcccctggccaagcacacgcttaggaattggacaggatttcatgatggaatggaagaaccgtgacatccaggaaacagaaggctgggagtgggggcctctaaggatgtcagtgctccttgcagcagtggcaccctgagctccgggtctcctctagagcccaagcaggcagctgaagaagaaatacaagtgtatgtccacaacccggcctcctccacggtgacaattaacgctgtttcccaccatcacccggtccacacctccccatacccctgccgtcctctgggtgcctggaaccccgtggtgtccccacccagtaggctccagggctggttttcatatcaggtactaaagcgcaatgattaggtgacaaacctcatttgccagaaggcaacacgcagagtcataaccagacctggctccatgggaacatggctataaattgtttctgacagttgtgttatttcatgtaagcgtcgcccactcatctgtaggcatttccagaaagaccctgagccctgctgactgcctggcccactattttttttttttttgagacggagtctcgctctgtcgcccaggctggagtgcagtggcgcgatctcggctcactgcaagctctgcctcctgggttcacgccattctcctgcctcagcctcccgagtagctgggactacaggcgcccgccaccaggatggctagttttttgcagttttttttttttagtagaggcggggtttcaccgtgttagccaggatggtctcgatctcctgacctcgtgatccgcccgtctcggcctcccaaaatgctgggattacaggcataagccacggtgcccggccagcctggcccactctctatctgaccgactcatcgaacaacactaaccacaagccagccagcaggaacgcagcccatcccctgttagggaggccccccacgagcccaccggccactccaacctgcatgtaggcaggacaggaccaaaggctgcctgggagagtggctgtgccgccccaggcaggagctgggaggctttgatccttgactttgtgcgctcaggagtctgtagcccgggccttcccacagggacaccatcctgtaaggggcagacagcttccaaccacactgggccccagctacaacaccacagaaagccagcactcggggaggcactgaccctcccacgtcctgaaatcggggaactcccatcagtaggggtggcctagacagcctgaaaaccacaagggagaaccccagaggtcaatgtctacagccaccaaggaagaactgctcctcgtggtggcctggaagttacagttctgaatgtccagcgcagtttatttgctcaccttatcctgctaacagcctttctcttccctttgggaactttttttttttttttttttttttttttgagatggagtcttgctctatcccccaggctggagtgcagtgacatgatctcggctcactgaaacctcggtctcccaggttcaagtgattctcctgcctcagcctcccgagtagctgggattacaggcgcccgccaccacacccggctaatttttgtattattagtagagacagggtttcgccatgttggccaggctggtctcaaacccctgacctcaggtgatccatctgcctcggcctcccgaagtgctgggattacaggcgtgagccaccgtacctggcctggaacttctttctaattccacctggttttggaaagaagtgagacacgtggcttgggctggccaatgaaaatactcctccctgataacactgattggctcttggatgggcacatgacccaggctgtgcccgtcaggatactcccatccctggtaacactcattggttcatggataggcacatgacccaggctgggccaatcaggatatccattcccttgttgcactgattggttcatggataagcacatgaaccagggtgggccaatcagagtcctctgaagacctctttcccctcgagtggaaagggaatgtggtcttttctctgccatttttgctaagcccgaatagtggatgacgtggaaggagcctgtacaaaatgaagtcaagcagagccacaaagagatactctacagccccgaatccagcctgccctgaatccccttttggcaaaggccagggtgaattggatctttgtcctgtacaaccgaagaaaccacagctggaattcatttgggaaacttgctggtccctcccacctaagagtccacagtaacagccccccaggggaggggggagtctcgctctatcccccaggctggagttcagtggcgcaatctcggctcaatgcaacctccgcctcccgggttcaaacagttctcctgcctcagcctcccgagtagctgagattacaggtgcacaccaccacacccagataatttttgtgtttttagtagagacagggtttcgccatgttggtcaggctgatcttgaactcctgacctcaagtgatccgcctgcctcggcctcccaaagtgctaggattacaggtgtgagccaccgcgcctggctcccattttaattcacacaaataccctgggtatttaattcacacaaataccctgggtggcagggcctatgtttatccccattttatagatgaggaaagtgaagctcagagagcttcagtaagttgctcaaggtcaaaaactagtcggtgacagagctggggttcagatccagctggtctgcctccaaagtgctatctctcacctcctctctcaattcaaaggcaagctccacgtaccatgtccaccctgaaccccagcacccaacacagtgcctggtgcctggcccaaacaagacaccagtgaacatctgtgaagtgaacaaatgctctctgccctgccacacctggacatctcctaggagcctcccaggaatcctgcactttcgagaaacatctcctgagctgcaagggaaggcaggggaggaggaggaggaggtatggggtgagagaagccaccaaggctggcagaggccaggccagggcacctcaaagccccatgcgggaagcctggggattggcacgggcctgcccatggggagtggattcggtgattacccagtgctggctccacctacactaattaacttgcagctcccaggggtgtggtagttcccactgcaccctgtggctgggctaggcaggcagaaccacactgcaggatgcacaccgaggaagaaagcttaggcctttgcctcccgctggggaggagaacctagagccggccctcaggcatggccatgtgagcagcctcacaggcagtgaggaggccagctgcacctttctgaggaacccacgacagcaaaggagggaacgagcagagtggggaggctgggagtcagcagaccaaagtgacctcaagaggaggtgtcaaggtctggggtctggcagccagctcagaggtatttagtcctccatgcaacctgcattgatggaacacctgctgtatgcaaggcacggcgctagagatgaggacccaaaagacagcaatccctgccctcctaacgcttccacttgggatagaggtgaacgagcaacaacaaggttaacccatcgtccagccaagtggcctattaaaaggagatgagaactacggagaaagacaggcagcaccaggaggacgggaggggcggcagtggggtggggagcagggtgaaattctgcatggatcccagggaagaactcacagaggcggagacagcagggactggaggaggggagagtgagcctcacagatgagggagagtgccccttgcagcagttgggaggctccaggggagaaggtcaagcagccaagcagcggaatggaaagcccaggagttgctgagcaaggatcagagcaaggggacactcagacgcccagctgagagtgcggggatgaaatgaggagagatgcatagcaagcaaagccccgaaccaccaaaaagtcagtcagcaactccaggggaagcaaaatatcggacaggaaaggctaaggcaacgcttccctaactgggctgtgctgtgtgttgacacaggcctaatgcagaaaacgtgcaccacggatctgaccagactgcagagcaccgtcatgacctgccacccagagggcaggatgcagggcacagagggagagagagcccacaattcccctcctctgaggcaagaagccaatacagacgtccacaaggggaatatcaaggggtggagccaagcatgcacttgggaactctgcaggtgaatactccaggggcacaggggcctccgggggagtaaggcaggggaggggagtcactgtttctctagaccatagaagtcacgggctcttgaaactatctgcatgaataactttgatacaaccaaaaactagaaggggaggagggaagaaggaaaaaggcaagatggccctgcctgctgaagtccccatggcagccagggcctacaaagagggagcagagcaactggatgaggactggagcgggaagctgcctggaggcggtggccctggacaaacacctggagggtgtcaagggaggaagagaaaggccttcactctgcctctcaggagcctactcctgctcaggcctcctcctagtcaaggaccacaggcagcccccaaccctgtcccccttgacagtgggcctgtctgtccagtccctacagcagacagatccaggctagctactgtaatcccctggctctcagagggagccctgccttccccgacccccactcgcccttctgtctttacctcctcctgggcacttgtcctttggcctctggcgtttgcatatgctgtgtatcctccctcctccttattgttcaggtttcatttaagaaaccccctgctccagggactgtccctgatcccccaggtccatcctttcaacttagtcccctaaaacacaaaaacaaagggagcagagtgcttctagagatagcaagaaaaccctaccaccgacagggagctctggatgccccagagcctgcactgcccactaaacagtcccggaggatggaggagaagatgggactaggatgaggccctggtgggaccctgggtacttacgcgggtgcccctccctcacacgtttccagaagggcccgcttagggaaatgcttaaccaaggaccttaaaggtggcttttcagcagccagtgagggtgagcatcctcccccacagggctcccggccacggctttccctcagcctgagcactccctctcctgcggctcccagagctaggccctcctcaccagctgtaaataacagacacactgagagaacatgtcacaaaaccacggacacatttcacaacacgtagtctcttgctatgagcctggcatttacatctgcggagttggtgcctcgggcagtggggtagacgcacagctctgcccctcttcccagccctgtctgcccagagaggggccctgggctcaaagggcctggaccgagtggcttccaaatggggtttccaggctcaagagctgtgcgcctgcagttcttagtctgtggagccccaatttagggatctggcctcagggactttccagggagcatctttgccttggattctgtgccagagtttccaagcccagcccagggattgggatttttagggcactaattctagaagttctatcgtgagatggggagcaagtcctgagcttgaggttctcatctgggagcttttaaagaagagtcaccctgggcccctccaactgaggggctggtgtgaccttccgggcctcatccacctctgcttactccctagtttttgcagagacttcccacactgttgaaggaccctcagtcagtgggggctccaaaccaagtgccccatgtgttcaggagcagggatgagaggggagtactcaaataggcaggtcacacggccctcatgctgcgggcactgctgcacacagccagtgtcagaaaccagagagggctgtagctcacaaaggccacacagcagtgctgggccagccagcaggtccaagtccaggtcccagtgatgcctctaccccaggtccagagaaccaagaaggaagtgaggtggaaatcaagatgaacccagctcctttcccagtacacacacactccactatgtcctcacccaaggtctgtcaagcctcagaagtcttttgggcaacttggctggcctaactgggatagcccaacccagttaaggggctggctgggccctgttatatacccaagggggactgagacccacgggctggccatgcccccaggacggagtgggaagggcaggcctgagggacatccagagaacaggaagtttggcccagctgggcccatcctccaggaagccctagggagcccacgctgcttccctgcccaggagcagcctgagtcgggtagcgagctaccccctccatggcagcatacccctcagcattgagggagccccagcagtgggcaaaccctgtgcgctgtgagccccggcccgacagcccattccggagaagggctgaccattgaaaggtcttatttgtcataaatacaaatgtttgttcctgtgaaaagcacaggctctttaaagataaagatcctggcgttccttggtgtatatgcccaaggccagggccagtccacagtaggcactcaggaaatgaatgaacaaatgaatggacatttcctttatactatccccactgaaggatcaacagaggactttatgcagcagcctttcagccacacgaatgttctctctgctgatagcactctccatcacttgtgctcttaaaaccttgttttggagatgttcagaattccatccaggaattagggttgggttttctgcagagggttattcaccttcttctaacagaacagaacctcccagttctcatcttaagctacctcacagcaaattttctggatttctatatataaaataaatcatttaacaaaaaaatctgtatctacagtgtatggaacaaaagaagatttcaaagcccattaactcacagagatggtatgttactgggagaatatgggctgtataattaaaacaatttaaatccaattataagaagacagtgggctttactgcctgccaccatctcactaatggaaagaaacccaatatcttgagttttctaaaattactgtaaaattatgaattagaacacataggtaccatcgctccactgctctgtattactgataaaatgagatgaaatattccttgcagagaaatattccttgcagagaacataagccattgttggctcagagctctgctgggcatacacagcctctggtggctgaggcccccaaggtgggaaaggaggtggtcagccagtgtgagagggtatcctttctggagatcccagccttgaagttaatgaggcgtgaatccccacatctccctagtgaaccatggcaccctgtgtctgatgagagagaatcgctgtcatgcagggggatggacagaatgacagtcatggcccagccagggaccccgccttgtgcagcacaagtgtgtatttcagtctgaactgggggagaatgtccagagctgtgatgaaggaaatcaacagtgagagcacccccactagccaatcacctgctgggagctggggtgggaaagcacgtggccacgcctggcccttggcgttccatctctgtgtcatgaagggccaccgttcattggctggccctggccgccccttggcaccacccaggaagctcttagagaataccagtgcctgggcccttgcccagcttgttaaatcaggctctctggggtggagcctgggcactgacacttgactgaattcctggggcctgggtctgctgtgcccacagtggctggcactgggtcaaccctcaagagacatgtgggcagggaacaaatgggcacccactgtatgcacaccatgtcttcagactctcaaaacaattcttcaaggtagatgtgagtatccccatcctacagatgaggaaactgaggctcagatatgtagaggaacatgcactgactcgcacagccaataagaggcagaagagggactcagcccagccacagcactgtccagtgtcaaagatgattcagagacttcgccctatcccacctgccttccccccagccaagactggcccacatgtgccccacactggaccagaagctaggggaggagcagggaccagcaagagccaggtgctgcctctgaggccgtggtggtctagcaatgccaccaggtgctggggagaaatggagcacagcccctcctataccagcctcttttggagccaaagtacacttgtaggatataatttacacacaccaggaaagccctgtcttgacacctgaattttaccattaggtcattctaagaagtctagcagaatttgggtctctagacaactcttgtggcccatgtcacatcctctcagccacctctcctcctgttgctgtggtgactggctgcatacgggcatccctgggcagccctcatctctgctcagcagggggctctctgctggcaccaggcgggaactgcccagccaagctgctgcacaaacctggaatacctgggaagggagcagcaccgggtccctctgaccagtgaggagtgggctggtggataaatgctcccactttccctgcccggatggacaatccagatgcatttttttgtggttccctggagggccccagcaggaatgagccccagtggcccacggcagtgaccaatcagactggccttccctcccgccctgattcacacttcctcttcccttggcacatgttccaaagtccactgctggtgcatgagccttcatctcagatgtctgacatgagacatcttcatcttcatgtctgcatggaggggcctcgagctgccatatgttatgaaatgcaggtacccttgtcataagccagcaccatctcaacagtatatgtaataaagtcactcagagtggtgcagcttgggtggacaggaacaggggaccctggggtggaaaagagagaggcctgggtctatcagacctaccaccaggccttgggcaaatttgggggtctaagccctgcttcccatccagggagaagccagctagcctagcagcctggtcctcctctcccctctctgtggcagaccaggcatctgtggccatgggaggcagaagccaggcttagggatgggcctcagccatgtagaagtcctgaaacctccaagaatggtacgcgctgcacctgggatcctcagggagcggccctgaatccagagcacagatgcctgcagaggcaggggttgggggagctgactagcctgtgcaattctgccatccccacaggcctctctcctcacagcttaagggcctagatggaggcacatggctctgagccccagcgatgtcccctccagtggcccacatcctagatcctttgatgctcaggggttcagtcctgagccacttctgcctgtaccagagggaagccctaaggcccctgcagactttgccaggatgtcagcacctcctccatctatgcccagggaccctggacagctcacctctgagccctagctccagctatgccactgcctggagtgcctgcctccctttcttcacctgaccaaccactgttccacacttaagactcagctcagaagtcacttcttccaggaagcctcccctggttaaccccaagcccaggctaggttaggcaccacccctgtgctcccacacccctgggcaggcttcattctcttgtagcatgcttcacattcttaggccactcgtctgtccctgccacacccagctagtggccatagtatgcagagtgtccagacacgctgctgggtgtggcctgccagggcaactccagcacatgggttctgccagctggaaacaccgtctccgccccagcccaccttacaccccttaagaaggctcacgtttcttcttggaccaccaccacctgctttctccagctgaaattaataattttaaagtaattaagtccagcaaaccataaccgattaagtagggactggtgctggctggcagagctgccatagccttatctctgcccaggcctgtgtttggagggcagctgggtggggcctggccccaggtccaccccctccaggccctgaccatcctgtagcagagataaacgtctctgagtagccagccgcctaatgagactgtcaggggacttcttaatgagattaggcagggccctagctttgcctcacagtgctaggacttctattcaattaatcgttcagagcggagcagacgctgcccaggaggcaggagccaggcctttgctgataaggcagccacctcccagcagcagcccagcttcccgaagtccacggcagccccaggcattggccccactaggcagaaggataaacagaggctggccaggaggatggggcaaggctgctggcccaggactcctccttgtcccttggaacctggagggagctctcagggttccccacaaatgtgcctattgggaggaataaagcagagatccccacccacaatgtatgcatggggtaaggagaggcctcccggctggggaagactgaaaccaggtacaagagcatacatggcagctacatagtgagggctatgtgtgagaggcccaggcccggtaccctgcgtgaacgctgagcacaggtgtcatcctgcgggctggcacatgtcccttaccccagaaagcctaccctaactgcccagccccaccctcctgccctgccccacccacccatggacataccacagagctcaaagcctggcccttcccctccttactctcctgtccccaaagagctttccagccagcactgtttgggtctcctggagctctccggaacaactgtcaccaggtgttgccctgaggctcccagtccaatccccccttaacgtgacaggccacattccaagtgcctgtggcagagaagcccccagctggacactgctgcagtctcggcatcctttctcttcctctccaagtgaccccacccccatctaccgtgcctctttcactctcagtccagggactgggcagcccccaccagtctgacaatcagggtgttctactccttgggcaccaggattgattcggggaggaagtgattcagccccataccagcccagtgagctgaagtcctgggactcctgtgagactcttgttaaataatccccctcttccaggggcaagtggccagggggctgggctcattagacatcagcctgcaacaggcaggaggctgcccaggaaggaaaccacacaggagagagcagggacaaggggtgtggagacggaggcagagtcctgtggataccatttgggccttggatccagccatgcctgaagcgatgcagcctctggccttttctattacatggcctaataatgatccctgttttgcttaggcccaaatgagagtttctgacaccagcatgattattatgactcacatggagggtgatttcagacccacagcaggtttccctggaggtgatagtctcagatggtccgctttagcattctgacaaacacacacgtgggccacaacttccccacaggccatgagaggcagaaacccctatgtgccacagggtgcgaggcccggccaccttccccatggtcccagtggggacctcccagcatatctagacaggctcccccaggaagggactctctgggaagatgacccctggaccacctatcactggggtctcagtccaacagccggtgtgcactgtgagctctctgggacacacaagtgtgcatgcagtatgtgtgtgcaggtcctcgtgtgtacttgtcagaggtccagtcaggcagccactcaacaaacatttgctccacccctgcatgtgcctaggcctgtacaggcctgggagtcccaagatgaggagttcatggtgctggtgctcacagacttcaaaggtgcatgtagaagccagacaccaaagatacaatgaatggcatgacagcaatgaggcggccccggcccgggcagaggaagcagagcggccaggaaaggcctcctgaagagcgtacagaactgagactgggatgagacggggctctgcggcacagggtggatgggtggaggcaaccaggagagagcagactggatgccaggccagaggccagaccacgaggacttgaatgctgagcacaggtgtgaccctgcaggccagcagccacaggggcctggtgtcgggaagatgccctggggagctctgaggggcaaggctgagtgggggcccatctgctatgtgccagtgcctggactggcatgcaagagtcccagcacatccacgcacgtagcacgtccacgtgacagcgtcccagggcaaggccaaggcagagccacatgcatgcccctgctggctgcacctgacatccaggagctcccggaagcattcaccagtgccgatcagtgcgtactgagactcatcacagacctcgctgtcctgcctttaacaatgttaattttcttggcaggagctaagtagcctaaagcagtggatcccatcctggctgcactcatgcaggcttctcctaagaaagcttgagcatgtacaactacagagcttcaaagcccttctagcccctgctcaccaggaagggtccagctcctgcttcctcagaggcccgcgtggtggcagcagtggctgctggctatgtcctcacagacaggcaatggtcagcagctcctggagtgcggagggaggcactggtgggagctggtgggcaatacctccctgccaagctcacggctgtcaggctcactgccctagacctgcaacagctcctccccttcccggccagggaccctttcccctgccctggccagaaagaggcagtggccaggaccatgtcagccccatttcacccatggaggctgctgggggaagaggggctcctaagccaccagaaaattcccaggtgggagaagagaagagaaacccaagttctggtgcacaagcttataccgccagcacctggagcccgggtgagcttctatttcttctgcacgacttctccactcacccccaactaccctctcccgcccacacaggcacacctcaggcatacagaggcatggggcctccagaactttcccactccagccagtgagtgttggaaacatctccagcgtggttctcccctttgcacatggccttggaagccctcatataaatagccattaccagggagaggcagtgccatcagctctcatcttttcttgccagaaagatcttcagtgcagaagctgaccaggagggaagggctagcacaggcagacctacagggggcaggacagggctgctatacatgcagctgtgcgaccccaagtggtcctgagaaagaacaccggacaaggagcagcagcatgcagaggttgcagagagcagagttcccatgagtccctccatcctgttgcccatccaaggacttttactgaacacctccaaccagccacataccaggcttggctctggggacttggcagtaaacaagacagacacttctctgccctcacaaacctgatggccctcacaaataaattaataacatcattgccgacgaggacgcctacaaagaaggaaaagaacattttggtagagtaataggggccctacttggagccaaggggagcttctctgaggaggtaagatcagaggcatagccaaaggccaagaaggggcccagcatgcaaagagccttccagatagtaggaacagcatgtgcaaaggccccagggtagatgcatgcttgggttgttggagagatggggaaaaggccaatgtggccagagcagtgaggtcaagagaagtggcggctaagacacaggtaagttcagcttttgtcggggtccttggggacttgcagccctggcaaggggtctggatttgattcttagtgcaatggggagccattgaagggtttcagcaggagagggaggtggttaggttgatttttcagataactctggctgctacatggacaatggcctggagggaagggcagaggcagggggacacggggaagtgacctcaagtgtccaggctggggctggggagatggcactggaggtggagagaaccacacaaaagccaggtgcgtagtgggaggcccagcacatacaaggagagcaccggcttggctgccagtccttcacattccctaagcaatccctgcttcactttgctttctgtgtcattccctgtactgcccaggattgtcctgagatgatgcccagacagctctgggcagtttgtaatgtattggtagacacctctgccttttttaaaattgatgtttagtaattgtacatatttatggggtacagagtgatatttcaatacatgcgtacaatgtgtaatgatcacatcaggtaattagcatatccatcacctcaaacattcatcatttctttgtgttgagaacatccaaattcctctcttctagctgtttgaaaatatacaataaattgttgttaattatagtcaccctgcagtgctctggaccactagaacttatgccttctaaccagctgtaactttgtgtcccttaaccatcttctccctatcttccctccccctgccctccccagtctctagtaacctgtattccactctctacttctatgagttcaatgtgtttagctcccacatgagtgagaacatgcagatgcctctgcttttgaacaggcaatcaccaggagcctgcagtacagcagatgctgccaagctcactgcattcctttacccagtgagattcctgggccagctgcaagcgccactcaggtgactgtccatgaggcttctacaatgaaaggaggatcagctgaaatggctccaggaccccagccgactccggcatcctgtggctccgtgaaacatgcacaagacggtgtatgtggatagaaaaagtgcgcaggactgagtcaggtacagacacacacgggctaatgggatttctgggattcttgcagcacacataggagctggtctgtgacccagggtcaagccacagggcaggctggggaggtgggctgagggatcaatgggtccagcctgctggacatttctgaggtcggtgagggcagcacaggcccccctacaaggtggctggggctgggaaagacagccagccctctagaaagtaggcatgagattcgcagagctctgagcacacaggactaaaggagccagtgtacagaccgcatttggagtcaaatagccagctgcatgagcattggcaggggtgtctgatgcacccccttctcttgggagaagatcccagggcctgaggatcagaggctcacccacagccacagcaagcagtgatttgggaagccagtgtcctcttgggcttcatcaacatcagcagagcatccagaacaagcagtgaccatccccatccctctgcactggccaggtgacatcatgagaacaataactgtagctgttctttactgagcacctccttggtgccaggcacatgctaagtcctctgtaatcattacttcatttgttcccgaagtcagcccattaagtgggggcaccagtatcccaagtgtacaggaaggaacactgaggctctgtgaattacgtcccttgtttaggtacaccagggaccctgtgtgtaaagaggggcagtgacaaaaggggccaggcgtgatggctcacgcctgtaatcccagcactttaggaggccgaggcgagcggatcacaaggtcaggagttagagaccagcctgaccaacatggtgaaaccccgtctctactaaaaatacagctcagcataaagactggttcgagatgagagtcacccatcctcagaggtacatggatcttcagctcatgtggtccaaggctggatttgagaaatttgggcactgtagccctaagaaggcagggctggtccacgctccctcaggcagtcagtgcctggccaggtctagccccaggccagggtttgctcacagcccttcccctcctgtcttagtctgctctggctgctaaaacaaaacaccatagacaggtggattaaacaacagacgaatttattttctcaacagacagttctggaagctgaaagtccaagatcagggtgccagcatggttggttcctgatgagggctgtcttcctggcttgcagatggctgccttcttgctgcatcctcacacagcagagagacacagcaagctctccggtgtctcttcttataaggccactaatcccatcatgagggccccacccttatgaccccatctaaacctaattacctcccaaggccctgcctgcaatgccatcacattgggggttaagggctttgacatcatattagggaaaacaaacattcagtccataacacttctagaccttcccccagtctggccttggttttgcatggccccctcagctctggacacaagaactctggcatctgctgacctgtatagctgagaccccaagagggccactccctggggtgggcaggcagactggctccctctcatcccactagcatgatgctgagatgctacaggggacactgacaatgaaaaaacacctaaggtgctgtccacagcctcctcctgaccttggccaagttaagtgaccaccactgcaatgaccatcccattggatgatctctgagagccctgaggtcaggcctacacatctgaggccaggaacgtgccccaggagggaaaggaaaatgtgtttattgagtgtgcactacaaactgcccttagagctgaggataccacagggaacaaaagcgaccaagtccctccctccccacagcccacaacctccagaagacgtcaccgacaagtcaaaggaaacacaaggcaaggggagcacatgaccaggccagtctcctgtgggtgctgggatgcaccctgaggatgccacctcccaactgggacctcacgtgagtccaggaggagtctgagggggccagcggagctctgagcagcagctggaagtcttggctctttctgctaaacatgcccaggcagcatgggtgtctgcaacagtctccttgtgtatgtatgcatgtgtgtacatacacatctgctcagcactgcccaccacaccagagcccccagaagccctttggagggctgagccatcacactgctggactgtccagggcacctatggccatgttcctcccgttccagcagtgtgatggctcagccctccaaagcctttatcaggtgcacagtagatatgccctgagctgaggctcaggtcccttcacagagctgggccccagcagcaagccttgggccagctccagttggggttctgtgataaggagagacccaccctcagctctccaggcccaggctggcaaactgcaggacttggggacggcccacggggttgttttagttacgagagccctgtgggagaggtgagtgagggcaggtaccctgggagcctcctgggacacaggaggaccagcattggatgttacagccatggcagggaaggagttaggagccctagagcccagccaaatcaaggccacctcagcatctgacactggccactggagatggggcactgttgggaggggggctcggcccagagctcaggtcaggtctcagagctttgagcccagagcccagaccagaggccagagtggggccactccatggctcaccacacctctgggcactcagatgaaaaggcagaaggcccacggccccaggccaggagcggacccatggcaggacctcaagtctccaccttggactgagaaggaagagcgccatgggggacagacagcaagaagacagccttccaggccaggccaggacccagtttataggggcacaggccacagcagagccagaccatgggtgggctgggcccagagctccaggcagcaaggccggtgtctcagcccggacctgggggttgctagcacccagacaggacccagagaccaagaggtgtcgtgtaccttggcagggtcccaggaggatggaaaacatggtggccgggacacaacaagaacgaatgcctgctgagcatactatgtgccggcacccacgccctcaatgggagaatgagccccaaggcgctaagcacccctctctcgggcgccatggtggactgttgctcaccacagcctccctcctgctggccatacgtcctctctagatccaccaccacaaccccaaggcaggcccatttcacagatgttgagactgagggtcagagagggaatgcgatctgttcaagaccacacagataatcaatcagatttgggaactgaacccacacctttccacctgacccctttccaccaaatagagcaaggtaggcctgccctatggccaggtcccggggaggcaggggcaggccagtgggattctggccactctatgcactcagagcagacaaggccacagtaagatggaaataccgtgccgtgacaggccacaggttcccagagccccagcctatacagatggctccgagcagcctccatatgagccatgtcgtcaacactaacctccttccctgctctcttgagacacccagaatggctggggctcaactccaagctgcacatctcccccgccctaagtggggccaaggctgtgggaacctgctcacactgcccagcccagaacaggaagtgagaggaggacaagtctccaccacagaccactcaggctagtaagatcacagcgacctccacctcttcacccagccactgccctgtgctcaccctgggctgggctattctagtgcatttcctcaactgatcctctcagctgtcctctattccattttacagtcagggaaaccgaggttgcccacccagagtcagaaagcagagcaggggtgggagccccagtctgtgtgagacagccaccacactcccgcctcttcagctcctggacaccccacggatgctccagtggaggcatggggaagggccaggctgagcacagtgggggaccagggtgggccaggtggagatgcagtctcagagcccagctgcctcatctagggtctgttgagggatgagtgtgagggaaaactggaaagatggggccatcagggccacatgtcccacacctgggtggaggagaaggggcagcctgggctcaggaccaccctagtcccccagctaacaccccccacctcacccactggtaacctacactgcctacagcttggacctagaaacggaaggggcatctcataccctccagaccactctgcccacacctcaggcccagaaaggggaactctgggttctcctttcttcaaccgtggccatctgccaggaaactggctgtttacaggctgggaggaagggctcagagagtctagctgagttgttggacacagacccagctgtcttcctgggcccagtgcctgtcagagagggcagcaccccagagaaaggggctgtcacaggccagcaatggcagagagatgcgtggtctctgccccagcccactgccattagcaggagagggctgccacttcgtggggcagcaggggcaagacgtgggagtctatatgagggacagggccacagggctgaagccgtggaaagtgcagacttgccaaagtccagctacggggacagggggaggtcatgggtgctggtcctgtcggtggctgggcagagaacccaatctttacctcatgactagctcaatggtcctgagagctgggcttgtccaggcactagtttacagagcacaagattggcagacatggagaaaagcagaggtgcaaccccagcctaggctggggacccaggcttcctaacttcccagcacatggaagggctgcccagaggtctgcagaggagggacaagtcgctgagtacacagtggggtatcaatgggagccacagattctgcccaactagcatcccgtacccaaaactgttttttgctttttgtttgttgctgttattttaatgaaacgccaaggaaataggagggctgtttagccatgaatggtaaagaggcaattctgttgctcaccagttgtttccagttctctctgcttccaggcacatagtagggctgtgcttcctggatcccttgtgactggctgtggccacatggctggttgtggccaacgagtcataagcagaagtgatgtgagcacatccaggctgagccccccagagctctctttccctctggcacagcaactggcaacaaccaagtgaagtgaccatgagggaccaagctccccactgaccggcaatggacacacagcaggaggaggaaatactgtgtcatgaaagctgctgggagttttggattgtttgttactgcagcataacttagtctcccctgactcatacaacgggaaacacagaacaaaaccaaagggtggagacccacaggcacagccatgggtaaccaagtgtaaaaagaatcacatccagggatggaatgggttagaaattatctgggaagaggcagggcagaagggatgctctgagttgttaggcgacagcatttcctgggcagtagaaggctcagtgaagagggaagacagctgctatgaggacaaagctagaggatttcaacctcgcagctacaagaattgggaaagagagtctgtctgccattacaagaggtgactgtgagtgctgagggacagccttagctggcccccaagagaaacctggagaaatggctccaggaggaaaattgtcaaagtactcatgtcctagacctagaaacaaaaggggccacctcatcccctccagtccaccctgcccacacctcaggtccagaaggggaactctgggttcttctttctcaaccatggccattggccaggaaactggctgtttccaggctgggagggagggctcagagagcctagctgagatgttggacacagacccagctgccttcctgggcccaatgcctgtcagaaaggacagtatcccagaggaaggggctgtcacaggccagcccaggactaggaacagcagcagctcagaggcagtatgacccgtggcctctcccacacgcctggcataaggtatccatctgctcactgccagttaagtccaacctcccaatctagagggctaagccatggcaataaggaatgaagggagcctcttgaacccaaaatttgaggaagtgggtggtgctggagtgtagtctataaaatgagaaagtgtgtgtgccctcatgcatatgtgcacgtgtgtgtgctcttgagtacaggtggatgtgtgtgtgcctgagtatatgcatgcatgtgtgtgtgtgttgcacatgcctgtgtgtgcacctgcacaggagtgactccagaatgaaggagaaccctgacacctgtgagttcagcaccctgacaccgtgagttcagcacgggcttgtggggaatccagagaggggacccagggcctaactccagactatcaatgcctgcagcctcatccacagctgttatcactggcagtagcccttgaggggaccaggaacagcagctctctgtgggaccccgggcggcaaagcaagattgacttcaacgagggccgtcccttggggtgtaggtaggcatgggcctagacggtgaggttctgaagaacaacctgctcaggcagaaaagaggccctgggtccaagcggcagcaccaacttacagtctgactattcgaacagcagtttcctccaggaacttccttatgcacaagcagcagccaagcccaggaaaagaagctgacatgtcattggagaacacaggcaagtctgtggaggctccacaggcttacagtgtgatgcttccagggtgagctttgtagaaacagaaaggaaacatagccatccatcccaagtgactatagcaggcccagcgaacaaaagaggatgccccgcagtaagcaagagtgcagtcaagcatgcaaaagattatcagggtggaaggaaagtggaggtggacaatgcatattgggcacagacaggtgtgccaacatggtaggagaataatggccctcaaagatgtctacatcctaatccccagatctgtgaatatgttaggctacatggcacaggtagcagacagcattaagcttgcaaaccagctatccttaaaatagggagggccgggcacggtggctcacatctgtaatcccagcactttgggaggcaaaggcaggcggatcacgaggtcaggagattgagaccatcctggctaacacagtgaaatcccgtctctactaaaaatacaaaaaattagccgggcatggtggcgggcgcctgtagtcccagctactcgggaggctgaggcgggagaatagtgtgaatccgggaggcagagcttgcagtgagccaagatcataccactgcactccaacctgggtgacagagagagactctgtctcaaaaaagaataaataaataatagggagattatctgggattatccagatgggcccaatataaccacaaaggtccttgaaagagggagccaagcagaagagtcagagaaggagatgtgatgacagaagccaggtcagcatgagaggatgtgagaaggccttgacccgccattgctggccttgaaaatggaggaaagggccaggggctgaggaatccagcagtctttggaagctggagaaggccaggaaacaaatctttcctccagcctccagaaggacccagattttagcccagtgagacccatgttaggcttctgacctgcagaactgcaagagaataaatgtgtgttgatctaaccaactaaatttggggtaaaatttgtttccgcaccacaagaaaactaacacagctgagaggatgggaataaggggtctacaggcatctttaggaagacacggacatcacactcagagagcctctgatggtgtctggtgaggctgccaggaggactgcaagagcgtggcctcgatgggacctacaattctctataattctgaatggagccaacgaagatgccggaagccatcagagctagggatggggagcctctagcagaatgtctagataccagtgtggccagtgaggggcagggtgaccacctaggaggtaacggatataaactgagcaaggcctccagatgggcaccaacaagctctctgtgtttcatttttattttatttcattgtttcattctgtgaaccacaagctattcttggtaatttttatgtcttcctagaatccttttgtgcttatgataactaaaaggaatattgcctcacttgcatgcattccttttttctgcctctttcctaaactgttatccttccacactgcgacaggtatatctacagcatatctaataactctcgtcttttactcacagtaaaaagtaatgctgggaaatgagaagactcgtgctcagccagttcttttatataaattatatgcatttatataaactcctacttgagcaagcactttacaacaatctgaaatttttttatttaacaaattaggatctcttttagtacctagaagacaaattttcacactatttgttaatatggactttgccagctaaatctaagatgcaacattttagagatttaaatgtcctttctgtgttatttgctaactttcaatccttatcaaatggatattttattgtgtgatccattgttttccatacattgaccaaatgtcctaaaaggcagtgcttgtaaggagcttgttaaaagtcatcctgaagaaattgtaagtataaatcttaggaccaacatatccaggccgagtttcttgttttgttcaggaatacttgattctgcatatctcagcataaatagttcccttttataaaaaaaaaagttttgaatattgagaaatgtatgcagttactagaagtaatgtttacaaatagttcatagtgatttcagaaaaggccaatgatgttaaataggaaaaaataacaggatataaaactgaacagaatgggagctctcaaaatgtataaaatacagtggtggggggaagactggaaggaaataacactagtgcaattcagagtgattttgttctgcctcttgacactttcctgtaccttccacattttatataataagcacacattgccctttttcttttttatatttttatattaatacatgctcattgcagcaatgcatttcttttataatcagggaaaaaagtaagagctaaaaatgaaaaggtcagtttaggtcctctctcaaggaattcactagcttaaaaaaataatgtagctgaaaatatcaacggcctcaagagaagctgagatggattcacagttgggtcaaggaacggaaagggaattactgtttacagaacacccaccgcaggccttatgtagatgatttacacatgtctcatctcatttaatcctcacaatcccatgaggcaaatcctatgattattccctttgaacagatctggaaacagaagctcagagcagagctccagggtcacaccacgagtgaagacaagcaagatgggaactgaaactctttaagctccaccaggctcttatcactgcatggcactgcctctcagaccaaaacagcgacagcaccactccactgagaggtcactgtgggcttgtccagtcaatgatggagatcaagcccccatctgcctttgctctccatccctgaccactccgctactaaaagtctttttctttcctactcaacctgtatcgacaacccatgtcctgctgcaatggatgtccaggcccagcagtgagatataaggcattcatcaagcagggatcaagcccagtgatggaaaagcaccccacagagtacatccaaggaaggacatccagagagctgagcacctgcagcagagccccaggcaagggaaaaggaggctgctgagcactgctctgcccctcacagaggccttccagggcaggctcctcccatcccttgtaggcatccaagggctatgcaaggtcacaagataacaatggatttcagtccaccagactcataaaatgaaagtacatgccagctttcaccagcacaaactctctgggcagcaggcagcccaccaacaatacctggccagtgtctctctccctagacaactgtcaaccaagaatctaactccctagttccagacatgcagaaacactcactctcacaccccacagagactgtgtcagtctgccatccttggagcctgacacatttttccagctatacaaacagagaaaccaagacccagaaaaggcccctgggtggaacctttgtccccaggacaaagttgctttggggcgcttacaggttgaatcacccatagctatgttttgtttggcttgtactgtgttgtttacattattttattagttggcaatagctttaaatcaaaatttacattaaggtccagatttggggctcctcttaaaaaaataaatcagcacatctacaacagtaggattttcacgcccaatggcaaaatctgttaaagctgtgtgacagcttctccttttaatggagatgacctcttcagaccctgtactccaggtgccacaggaaccagctgcccggttcatccttgtgtgttacctgcatgaggtggcaaccttgtgcaagagcatcatgtttagtccctggggaactgctgatgggagcggacgggcatcattcagaggcaaaatgaatgagcttggatactcaacactgcagaggggagccaacagaggtgtgtcaccagacatggaacacaggcagggtccccaccacactgtgagctcctgggtccaggaaatatgtgcttccaaactgtggcttcagctcccaagcacaaagaatgaatgtcaacagagatggggtttgtggaaccagtgtcaagggaacaggtggcactgtgaaagttgtagcttgtcaccccaggtccccaccccatttagggttccttccgctaagaaggccctgccctcccctggctggagcccaccccaagcacctgcaaggagctgtgataagggcacactgaaaagaagtccagaggcagggggtgtctggagatagagactgctggtgggacacgaccagacaccaaagaagggcaggaattcctcttccctgtacctcaacagacatctgacaatggacatctgtcacagctggaagcagcagctcccataataggcagtgttagcctcaccccccctaaaagaaaacacttgggactcccggtttgtaaaaccacctcaagaaatccttggaccttcagtccccagaagtagtccccggtccctgcccccagagctggcccctttccttcctctgctgcacccaagaataggagacccccagaattcctccttccaacacaacgacctccccaacaccagctctgaccccccagacccaggccagagccatcatcgaggcatcctgtccttgcaggcaccggggagactagcaacccatgtgtaccaaagcagcaggaggactctcggctcaacgggcttgaggagaaaacaccagccaggagctcttagccagcccacctcccactacacccactgccccctctacacttctctaccagttcctccagcaaggaatccctgcatcctgcgccactaacttgccccagcactgaggggcgctggccccagagtccccatggttgcggggagcaaggcagagggaaggagaagggacttaagccgggtaagtgtcagaggcggagccttaggccttaaccaggaatctggaggcttggagaaggaaccagggttcccgagctgaaaggttgaaggggagggactagcagagaggagggaaagcagagggggttgctgtcgtgaacgccctcgcctcgcacctgtggcgcctgccgcggggcccgaccggaggcagtggctgtggacaagggcggccccggcgtaggccaggatttccccgcagccggaccggcccagctccgctcctttcctgggcgaacagcgcccacctccggcccaggcggcggcgcctccgcccgcggcgcggacagcgagagagaaaccggctcctccaaacctggtggaggagcgctgcagagaagcgccgggctgaggctctgggggccgcggggcgcgaaacgccgcgcctaccaggttatgcccgggagaaggagacaggtcgggctccagccgctgggcgctcctcacctcgaagcgaggaaaacaccgggccactgagatcaggggaggtgcgcccgatacaggtacccggcacgcagacacgcccacccccaaacaccgagaaacaaagactgccccgagccacgcacgcctgcgcggccagcgctgggcgcacacccgcgcccacacagcccgaagggcgccacgcaacccgcaagaacaccagctccccgcgctcgcaggctctccgtgccggcccgcagcgcagagcagtcccggcgccgctgcctaggtgggccggggaaggcgcgccaccgcgcatggcaccgcggctgccgaggaacagagggtgccctgcgcagcccagctcgtcccaacccctccggtgcccactgctgcgacgcctcgcaggccgtgtcccagtgggccctgggcacagcggtcactcaccttcctgcacagcctggaatgggttgttggcctcgatgaccttgatggagtaggtgatcttctcgctctgcaggatgtcatcgttgaggctcaggtcggataccgccaactggaacaccctgtcgtccttggccgcgttctcctcgaagatggcacctggaggagagaagggatcaagaccggacctggacaagaaccctctccccgcttcccttggcccgagggtcaaggcactcgcagaccgatgattgccgggtggtgggaagtctgaactgggatttcagcttggcggggtagattaaggctctccgatctccacctgcacaggaatatgttcccctccccccaccagccctcagcgcacacgtgcacacagttgacatgagttacacatgcacatcccacaggctgccaccaggtcacacacgtgtctcacaaccaaggcaccacatgtcctagccatgctccacacaagggactaagccaagctggggtggccccaggcagcgcccaaatgccttgacatggttccataaatcccatcccaggagccaggaagttccccgggagggtggtgtcccccacccaaatcccaggacagaatgatgggtccttctccatgcacgtcccctgctgagtggagctgagcgaagcaggtctacagttggctttcctgcgcagaggggtcttccttaggcaggggcttcggatggcctgcagcttggatgactgtgacgctgcccggcctggcgccctgagctcagcctcctactctccatccttccccactcccatttcctgtacgtctgtcgaggggagtgggggaaggggacttgtgtcctaggcgcctccacgttcagatctagcggagctgggggtcccagaaggagctgctcttgaagggctttctagaaccgcggacagctcctccagggcgccctccggctggcgctttgtgcgcctagcacagcttccacggaccctgcgcttccagccgagatcagtgcgaccagcccgagcctagtcctgcaacctggacagctctggagtcagccacccacatcccgcctcaccaagcctcgagggtccctgaggtcccggagctaggcccagtgatccctcgagctgggggctgggtaggaggagggaggcccggattcctcactacacccggagccggcgccgcaatgctgaccgcgagacccgcacccctccagggcgggaagcaggtttggtcacgggcccctgaggaggaatcgtagctctccgagcccaggcctagtcctcaccaccccactccaccacccaccctcccgccttgtcccgtcctcctcgccttcaacacctcccaacccccagtttccctgtgctcgctggtctttcccaacttccggaaagacgactgcggagggactcccccaaagcgaccgctgtcagccccccaactcggcccaacttcccgagattcctcccgtgttgctcccaactcccacccactccccctcggcgcgcccactccccctcggcgcgccccctcctcctctgcgctttcatcttctctcccggttctctctctctatccatctcttcccgctcagcatccccctaccccccgctgcccacgcttcttccctcggctcccaccacccagaccgtctgggcccccaagacttggaccacgcaaaactctaggactgtccaggatggggatgcagtcgccacaaccagatacacacgcactcacacatacaccaagggctacacagacacacaccggagaagcaggcagacactgtgtccactctaacaggctgacagacagtcgtgcacgcaccaacacacgctcagatggccccacacaccccaacaccctctcacagtaacaccgacaccgtgccaggcgcacacagcgacacacgctgacaacacgcacccacacacattcacacacggttccggtccggcctctttgatcttgccctgccaacttggcgagccccccgctgtacctccccctgccccccgctgctctgagctgcgcagaagggccctcccgacccgccgacggccccgctaagggcgcgggtctcgacgcgcgtccatcccggtgttccccgaagcgtcggccctaagtgtcggtagaggccgcggggccccgcgcggagatcggagccccggggagcggcaagcagccagcgggagcgcggcgcggccggtgcacagctcctccgccgggcggcgcggcgcggcccttcgggggagcaccgcccgccgagcccctcggcccagggaaacgccaagtttggacgccgcgcaccccctgccccgttggggcccccgcccagcctcggcccggcctccagccgcgcttaccgatgtggatgatggagtcggcccgcaccgacacgcactggcatatccaggggagaagccacagcgtcagcgcttccatgtcccccgggcgcgcggctcatccacccgggcccggggcgaggccgagggcagcgcgaagcggggaggcgctggtcccggtgcagtcccgggccgctccccgggagagccgagcccgcccgtgcgtcttcccccgcgcgcccgcccctgcgccctgcgcccgccccagcccagcccagcccagcccagcgcggtcgggctcccgctccggctccggtggcggctgcggcggtgctggcagcttgagcccaggccggcgcggcgggggcggcccgcggctgtggcagcggcgcttcccgcggctagagcggcttcgggggaggctgaggcggtggcggcggcggccgggccggcgtggcggctctgggctggctgtgtgtctgagccccggcgaggagcgaactgcggaggacgccccctcccctccccctccccctcagctccgctccccctcccctccctgcccgcctccctcccctccgcccgcctctctaccacgtgactgcggagcctcagcctcgccgcgcggctctcgcccgctcgcggctcggagggggcgccgggtgctccacgctcccggctcgggggacgctcggagaccggcacagcggcggggaccggcctgggctgcggcgcgccgagctctgacggttcgggcctccttctccggttcgccaggggcgggagaatggaggagggccggccgctaactgccctcgaggggctcccgaagcgccctggcgacctcagcagccgcgcgtctcgggtcatgtccccggccgaaacagaccgttcctcgtggagtgggacctggggagcaagaagagagaccggggcggggcgccgggccaggccccaggacagctggggagccagagggggccggccgccgcaagcatctcagagtagagcccgggccgtgggctcgaaccctggctggccgcgcggacctcggcgggcgcccatcccccgctccatgggcagcgcgctcagccgggagtcgggcaagaggctcggactctgaagcccaattcatggccggaaaccagcgcagccgtgaccgcggcgcctggacgtgaggagccttccaagcggccggcgggctcagactccgaccctgcacggagctttcatgtgcgagcccgggcgaagagcccgctcctcgcggccacagcggaacagggctccctccgcctccggtgcctgcctcgggccggccaccaccaaagagagcgttaagctgttgtgggctcgtgcctgaaagggactgggctccatgtggcacccccaagatttcgaggagacagctgagcttcctggggtctgggacctggcagagcctcgttcaaaagctgctcctccagcaagcctgggaacgtccccgggccctgttgtccgcggaggggccccaggactcccgccacgcaccagggggagaggctcccaccacagcccttgcccagagctcccagcgcagtgggcgaggcagacacccaaccaagtcatcttttaaatgttggggggggctatgaatgagctgtgtatgctcagatgcctgggctctgaaccagcctgggaagaagagcagggatgacttcctgg

SEQ ID NO: 239 - DNA, 674289 bp, Homo sapiens
  source 1..674289: mol_type = genomic DNA
aaatgaacaaacagaatggaataaatgagacagcaaatagaagacagaacgtgttgggctgtgtatgtgttttataagagatattttaaacatggactgaaggagtcgctagatacccttggttttagcactaggtgttccttttaaggtgctcgaacagtcgaattatttgattgaattgcctgctatactgcagaactagccattcatgatacttatttttgacactgcagttattgcctccatcttaaaaaaaatcaatgccacttaatgcctttgcaaaatgtagatttctctttaaattagcactttataatatcttaagaaaatttaaattaaaaaatcgctgtaaggaaatgaaaacattacagtgttttcttgctgtttggaggaaaaaatagcaagtcgaatattcatatcactcatatcactccttatttaaaaattagccttcagataggatatttttttgtgagatttaacctatgccctgttagttggttatgaaaaatagattaatgataagatataggtccaacagtttgccttttgtgatgtttaatcttttaaaaatgttgacaatatatatttattatacaagttagttttacttagtgtaaaatattaaaattgtatatttttaataaatagacagaatattacttattttaataataaaaatgtatttttatgttgaaagaaattctatttctgtactttatttcttgaataaactcctaacgaaagccaagagagtcactacctagtgactctaaatattcctaccagaaaactagcaaatgataagacagttttagaggaatctgtaacactcaatgtcgctcatgctatgatctcatattctgcctctttaggaaaaagaatgttcaaaaaaccaaaatacgaagaaatttgggcataaattattgaaggctttagagtttgctgcacccattcaaacatcattgtttttatatatgcacaattattttctttgagcttaaaaaatgggtggaaaatttaacttctccattttaatttgagatttctcccataaaagttcactgaagaaatttctcctacttctgggtagcaatcaaggaataccccagtcaagtttttaaagagtgggtttacctctccaattgcattccaatctatattcattcctggtcaaaataaaagtataaataagactctttcaatctaaccacaagttagatttgcagtaaattcctccgtcttagatcactttcttttttacagttcccagacaaactgactttgatttagctagtaatttaatgaaattcatcagttgattgtaagaagtccgcttacatacaccagtcattctctcagcaaatactcatggaaaataaaagcaatgttctccccataaataaatcctacttctttcttgcaactcaaggcgggctgtcagatcggttgcataatagatattggggagctcactggccgggagccttaagaggagagcagctatctcagtctttctcacttaatcttggcttcacgtcagaagctgtgcagcagtgcagtagaatagggcctggcaaaacctttgctagcaaagcgccttttgtgccgggctgtggctcgctatcgacatctcgtccgttaccaaggctgggtttcctactgatttccctcctcctctgctttcacaggctcgcgcggccggacattgtgggtgtgcgtgctggatttctcccggatgctctccgactaacatggatgtcccaccattccttgcagtggaaggttgttccttggcgcagtgagtgaagaacatgcagcgattgctaatgggtttgggaagcggagactccttcctctctctatgaccatgccgtgatcgtgtctgcggtcaccactcgacgcatcctcatttctacccgaacccaggagccgaacgctagatcggggaagtgggtgccgtgcgtgtgggcacagaaacaccatgaagattattttcccgattctaagtaatccagtcttcaggcgcaccgttaaactcctgctctgtttactgtggattggatattctcaaggaaccacacatgtattaagatttggtaagattccccatctctcttggttgcctggtatccgctcccaggcagccggatgtaaacaggcggttcgctctgcctggcggtgggctccgtggattctgatctgctcactgctctgtcgtctcctggggcttttaaagaactccttgtgctttcatttcttctcttctttatttttatttttagccgcgggagggtgaagggagggccaatgtgtggtagtggtctctgcattacctccccacagtagcttgccacggagatgatgatgacgatggaggcacggtcagccgccactcccgcctgtctcccccggcgccctgcgagcttggaggggtgcgcggtccgcgcaaaagtgcgcgccggggctgcacgcctctcagcttgcggggctggtgagttaacacctggtaactctttggcgagttgcgcctgtccgcttccgccagtgaccagggcagttctcacgtgcaaatgaaaggtactaacccttttgatttctttttccagagagccttttcgattgttttcaccgcttttccagtccctggtgcccttactgggatgcagagctttaaaaaatgttctaagattcgaggttctacttaacacagggaggctgctacttagctggaacgaaatagcgtcaaaattagaacggcattttgtttgtttttaacttgctgagtccccctctcacagctttctggacgttatggactaattaatgaaggatagtatctggggcggtggggaagagtagttgtttaaggagggttgactaagtctgcatctttcactttggcaagacgaaagacgttaggtagttacatttttttatggaaatgtattgcttttctaagaatcagggtttctttggagcttgaaggaaaatctaaacgtgggattccagtggaaaccctggtcagagggtcagagtgattgcttggagaaaatgaagcgtgggcgatgctcaggttctctggatggccaaaggagttttagtaggagcagaactagtcagggaaagttccctaaagcagataagaggaagaaaggagaaagccaacaggataaatgctcccattgtaggcacttcctctgacagttcaagtggattcagaccaaagagtgcaggacaccatgtaatcctgagcatctgtctttgagataaaagcagacacattaagtcactcggtcaaatttaaactgaagagtgattgcctgcatcttctatcatgccaacagcatctcctgtctttccattttaccatgtgtgtgttttatccccccaatgataaaattcaccatctctcctaggctttgtagaacaaaggtagggatgtttcacatacattcaaaaagggaacctcaccgaccacacatacacatagatgcccacagtcaaaaagcctgctgatgataaaagaggcactgggttatagctggattcccactgtagtagttttcatgcttttttcatgcctttagatggtacttaagcacgttgctcttagcaacaagcatccacaggaatgattgtttctgtggacaggattaaacaggtccgtataccattggaaatgtgtgtgtacgcacacgcgtgtgtgtgcatgtgtgttttttgtgtgtgtgttttcagcagttaggcttcaaatatggtaagtgctacagtatggtagtttgcccaatatttcgagtatttcatcctaattatgtggaatcctgaagaattctgaagtgtgtttgtgaatgagtgtgcgttactaagtgtgtttgccgactagatggaaaaaagaagacttggagccggaaaactgccaccaatactctaaggatttaattattgccgctctggtcttgcagcacaatatttgctgaatcactagattgttacactcgctgatcatttcatatcttcatattaaaaatcttggcgactgtagcagagtgcgtagcagctttccaaaagagctctctctctcacacacacgcacacacacgcacacacatacacacacacaaacaagctttcttagaccaatgcttactaaaaatgtctttaagaaatacggtagtaggcaaagatctccacactagtcccttgacaaccctaaaccaacagtccagcttctagataacctgctgttttctacgttaacttaaaacatcttccacgtggagatgcatttcttctgatttctgacctaagttgtggggaagaaggactgtgtacattgttactggaacatttccctgttggggctattttgatgtaatggtgggagttttattttcttctgggataaacacgttctgagtggattggatggttggttgagcacgtataagccactcttgagaatggttattttcaactttggctcaaaagtccagccagtgcctcatgccctggacccgtgccttggaagggaagagcttggagttgcacgtggcgcagctgccccagtggtggagagacccgccgcctctgctggggaggcagcatccagtgtcccttccatcccccacccttggcgtggctaggcgccggcagccgccaggcgcctccgccgcggcgctatggcaacggcggagcccgcccaggcggccaccccagccccccttccccgctagttaaggctctgtgttatccttccccttgctcccgctaggactgtgattcgacccagcgtcctcctgtcacctcctgcgaggtgaggggcagcccccgcttagagtgctgaacccttgccacgtccctcgcctcccccgcccgtcttcagcgtgcgcaaccctcttccccgcgcttccctctccctctctgtatggcacacacaataacacacacatacacacacacacattctctcacacacactcaaacatagacacgcgctcgcgcgcactaagacacatgcgccctccgggtgcatttggcacagtgacgtctctctagtgctcaagaaaactttgcagttacacccaggagcgtctctgtcctgtttcccccttaacctccagcctcagccgactcccacttggctgcacaggctggcctgctcctctgcagccgctcagcaaacatctctgagaaaaggtatccggagcaccgaccctagggtgctgccccgaggctctatggcagcgacctgagggtcaaccaagggtcacctccaggcaggcgggcgagcccctgacattgagtcttggttgtcaccccgcctttgatcctgtgttgggacaacttgggttttcctgggtgcccacccggcgggcaaggtgcattttagagagtcagttctcctgccctaggtcgagccagatgttctctggccggcttttctgggagcagagcctgcgactctcccaggcaggcgtctccagagcgctggcgcggcgggcacagggcatccagcgcgtcccagcgtatgtaaatgaggcatctttgtttcgccgcagctgcgtcccggccttgcccgccccaggatagggtgaaggcgggactcttccgtccgcgggggtgtgaccaattccacggcctctaagctgaactgcggcggcggaggtaattgaacctttcttttgttactttagccggtccttctcttccgggcatgcactgaccccagcctgtacggaagtgcgagggagctcagaagccagctccggctgtgtgcccggctggcctagggttcaccgttcgggagccctcacatgtttaagcatcctttttaagaaatcactccccaagctatcacttgtttccgatcttcaaggtcaggttttcattcaaaatctttatctgaactggaatttagagctccagtagcaaagacatcaacccaaacttaggctcctgggcaccatctccaaggtttccttgccgaattgctgagcatatggtaggccatgtcttcccttctgatgtttcgacctaacttttctcttaaagacaagccagtggaactgctctcttaaaggtttcccagcagaagtcttccctcccagacgcgctggggtctctttggcactgcacactgaccacctgtttgtgggacagcaatcacacagtcacctccttgcgtacacgaagaaggtgaacacagccagtttaagggaccacctatacgttgtgggataaaatcaacgtgagagagaacagaaagtgttcctatggaaatcccgttattttgctgggcatcccatttgctcacagatacaataattagtagcagatgtactgcaacatcgaatagtgagactgagcttacaagccgccactctacaaattctttgaaagagatttttcctcctttgagaggtgaggtgggcgggagggaggagtggccttacatctggaagcaggaaaactgactcttgggaggcggggatgggggagtaatagcggctactatctgcaacagataaagcctgaacacctgcttagctgagctgtggaatgcaagggagagaaatcattccaagaatcgccaacacaacgatcacactttaaaaaaatcagtttttctcataagttctcacttactcttaaagcttcaaagaataacttgatgtgatccatcaaaagaggcacaatcatttcagaaaatgactttgaaaaatgatctttttgtcttctagaaattgcacgctttctctacccagatacatgaaactcaacacattttctggctttgtgagattgtctttcagaagcgaacatggtttatacgtcagtagacatttcttcagactagctttgctttttggtttaatgcaagtgatcattacgatgtgttcattccttaaattctcagatgacactctttcaacatttactcagcacgggaaagttaatgtgaattcctctcacacgaagaaggaaaataccatagatcaaacgatgatgtatcattgattatcaaagccttttcaagttttctcaccattacataaagtgttgtctatgataacaatgacataatctttcatgccatttagttatcataatttctgataaagaaaatgccttgctcttttgtggtagaaattaaacgttcaggtgagagaaattacttcactttgtccttcagttattaagatttgactttgttatggtagccccaattacatttattgcctggaaattgtcagtgcacatttttgcacatcagattagaaactagtttactgtctttaaaatgtaacatacttaaattattaatctactgcatgcttaatacttagggcttgcaggagatccctgattttcctcagtaggatggtatgatatattgaaatttaagtgttgattgtttttcatttgggtagtgaaggtttagcttcaaagggctttcaatttgtagtccagttatcaaagtgttagaagtgcttcaattgaatcttctaccctaaatcttagcatgaaaagtgaggtcagaaacccctgaaagggaaggaagtaggtgcacatcatcattattgactagtctagattaaacactgaagaggaagatttcaatctgataacatcatagggcttcctgtttttctttgctgcttctgctgacaattttgtaaggtaattaaattggctgattgaagtcacagcggtcatggggcgataaagaccatttggatttaatggaatttaaaacaacagagcacagaacacaactcttaccgaacaagaattttaatggtccattcagggtgctgactaaatagaacgcccttaacaagtttaattgaaagggcaaggcagattagcactatatagtctttatggttgaagattggggaattaaaattatccctttaaaagactcattaatgcattatcaagatttaatgtaggttaaataagctttcttcaaacctttatcatatactgtgaacctaggtttaggaccaagtttcaataataaaacatttttaagagctgatttaataaatggaattatagatctttctcatttgaaaaaaaaaaggcatttaaaattgagcatatacagtgtgttgaagggtaagtgttgatgataaattctctatgttctataactgaaagaaaatttgacttttcttttaaaatttgattgttggtattttttcatataaagaaagcttgtcagtagtagagaaaccacagagacaataaaggaatattctttctgcagtttcaatagagtaataggtatttgatctattttaggttgtttttaaaatcctgaccttttttcttgctgaaacttctatattcagattattaaacttcaatgtagtaagtcccttctgcccctgaagaaagggtagatcactgcttaacattgggaacattgaagtacaatcagtcccaaggtgaaagtcaagcctcagtcacatatgagattattcactccacctgtttcttgccatgtggcattgccgactcagagttgtcagttccttagatatttctagaataacatgaaaccaaatttttgtataaaaatctcccaaattttaattgtatacaattttgaaaaaagcttttaaacttcagatttgtaaacagcaaaagcatacagcaggtgaggggggatgtggtctcatttttaccttctcgcccattcacatttcacagttcctctaaggcacacctgcttccctcacatctctttgatcaccaaataagtaaggtttatttgcctcttgcctcacacccttaaagcaaactatgttatattcttgtattttcaaagtgacagttacctaacctgataaaactaatttgtggtaaagtgagtggggagtttagaaaagactctaaaaacttttctgcaggattttttttttaatttttaattttacttttgcatttgggctttgagaatcctcttcaaagatagcagcattcagatatagtatttggtttttaggtttctgcctatagattaatttaaactctttattttcttagctaaaaactgaaaattcttttctggatttagtagaaaggtcactagacagcagggccatttgtgaagatctgaaagggtttggggagggtatgtcttttagttattttttctactgatacatatacttctatcagtctttctttttggttaagtattgccctgttccatggccttattttaagacaagtatattctggaagaggaacacatagtctcaagactgtagagttaggatgagtttattaggatcgatcgatactgtctgtgacagagatgctcagatacagaagaaaatactgggtgcctaagggagtgctgagtgattagcatgggtgtggaagggaggctgagaaaagagagaagttaaatgacatttgatacacagtctttttcaaatttaccgccagacatcccaatgctttgtaaattgatattttgcttgtattaatccaaatcttttagcataagtgattattttaaataagatgtaaattatattcttacattgacattttctccaatcaaaatgatttttaatgctttttacctccttttcaatcaattagctacttttctattattaaactaaagtaagaatttggaagatgttgcctctagctctcatttgtgtctccagctcagtctcagtctaagtccttgacctagcacaatgagaatattgtgctaacatgatcaaataaacaaaacaaatattaaagtaatgttctgcttctgaaatttcagtatattcatagctatttggtctattttatgttgtcatttaatccttcctttcttacctctccctttactttctgaagcttcctgcattcaattcatcatagattttagtacattcgggtccttccttccccagaagaaatgaaatgggaactctctcaaaatgaatgaaaactatagaatcctggattatctaagctaaaggggaactcaaaggtccccacgtttagagtcttaagtttagaggtgaattgccaaggacagttaaatagcttgttctaaattgcaattaatgtcagattttataccaaaacatgattaccctggctgccaaaattcaaaaaactgaattttgctgtttttttcagtgtagcctctgactccctgtgctttgaatccattttagaaagaaatctggtagctcccctagaaatgtgtctactttgtttcctttaccttttctttcctagtacattatctcatgggttattgctcttttctctttttttttccttaatgtgtagctctatcagcctcttgcatacctgcttacttgttcctttactcagtgtcaaagcttttgctgcatccattcattcaacaatattaaagtgagcacatattatgtggcaggcatttggaaaacagaattctaagacttagcttctgatattaaggattgtgtaatccagttaaagagaaaagatatgtacatattaaagtaccaattgtatggtacagaaaatatatacaatagttgtttaaatgagattattgcgggcttaagtttttccagaagagataggattctggctggtgcctgaaaacattgtgtggtagaaagaagggggaaatgtatcattggtggaagactcagcacaagaaaaggaatttaggcataaattaagaaaatgagtgttgggacagataatgggctagcactgaaggggcatagataaggccttgatttttcagagctttaatatttaggttacagggtttagactactgtgtgtagccactggaaagcaattgaaaatagaggatgggcttgacatggtgtgcaataagcagtcaaatgattttgcagtgtgttgcttacattttatgaagaataagtggatcttctttctcttactgaaatggaagcaaaagacacatcttggtccttgatcactgaaacctttaagaagttcttgagctcagatcaaagattatgttagtcaaaattctccagagaaatagaaaacacacatacacacatgcagcagggaggaagtgagagagagagagagagagagaagaggagggtgtgggtatttattataagtaattggcttacatgattatggtattatggatgctaagaagtcctaagatctgcagttggaaagctagagacccagtggtataattctagcctgaagaccagcagacttgaggtccaggaagattcagtgtttcattttgaacccaaaggcatgaagaaaaaaagaaaaagaaaacccaggcttgaaggcagtgaggcaggaggaattccctttttttctcaggagggtcagtcttttcactctattcaggcattcaactgagcggatgaaacccacccacattacggagggcaatcttctttgctccatctactattttactgattcagatgctaatttcataccagaacaccctcacagacacacccaaattgtttgaccaaatggctgggcaccccattaggcacccacggcctaatcaagttgacatataaaattaaacatcacccagataattccaaagcaaaattctgaaaggaaataaaggaatgtcttcttaagacatggccagatcaaatgattaagcaaggaaaagttaccaattaatcttaaggaaaatgcattagagaacaatttacaagtactatatacatctttgagggatacagtaaattgcccccaaggaattctcaatgttttatgtttagttccaagacatttctattacctgaaacattgtgtatgtgtgtgtgtgtgtgtgtgtgtgtgtgtgtgtgtgtgtgtgtgtacagttaagattataataccatatttttactgtatatattctgtgtagaaatgtttagatacacaaatatttaccattgtgttctgattgcctgccatatccagcagagtaacatactagacaggtttgcagcctaggagcaattggctgtaacatatagcctaggtatatagtaggctataccatttaggtttgggtaagtacactctgtgatgttcacacaatgatgaaatcacctaacgatgcatttctaagaatgtattcctgttgttaagcactcatgaatgtatatacataatatgtctatcaattatttaaaatcagaatttaaaataaatagaattaaaagttaagacaactttagtagaatagatttatttttagtaatattttctgattctacacaaactcaggatgttagaccgtgaatttagttgtttgggtcatgaattttactcttgattttgtcatctaatattcataaattaggaaaaataagtaaatctttctggcccttgactttcctgtctgaagaatgagtattatttgctacctgtttaacttccaaggataatagataatgttggatttaataggaaaatgtgtagagctctgagtttattagcagaaaaggccttttagagttgaaaaaaaattgtttatttactgtgtatgtgtggaataaaataatatttattatcactcatgaatattgtatctaacttcttaaactgtgtatatttaagaaaatcagcttttctaaattattcattaaaaatcttccttgaaatatacctcaattattacaaataggttggtaaggatttattaactaatagaacaaacttctgatttagttacttgatagaagagtaagtctgtagtttctttttcttccttaaacatcatgactttaattggtgttctcaaatatatacaacatcagaagaaacaaaccaaaactgaaaacaaataatgaacaaagaaatcatgccaagttctgtggtttaaatttttttcactttttcataagtatattgttctagtttacctacacaagtattttctgatttttatatatacatcattctttatgcatctgcctatgatgaacttttagttatttcaaggtttgcaaacatataaataactatctttgatccatttgtgttgattcaggaaagtttcataaacacttggatttgctacagttgtttgagatggatgtatgggactttccagttgttatattggctgcttaggcaatttttctggtgcttactttttaaggtagaacagattttggtaccacccctagaccactaacctcagcattcttccttaagtgtcctctaaactgacttaaaaaaaaagatctagcccagtgttgggggatcagcatagaagtgtctagggagagacaagagaggacaacctacacctccttgagcagtggtaccatgccagagaatccacaggaccatttgaaaaggtgtattgaacttaaatacaattttatatttgcaaaattaaaaaattttaaacttcaatgtataaatactctgtacacaaaatcccagcgacatgcaatttacctgtattacaagcctgcacatgtacccctgaacctaaagtcaaagttaaaaaaatgtaaagtttattgggaaaattgcctgactgttgaagatacttagtttttaatcagtaatttgcaactgtcaagggtaaggtggaggacaatcagtctcaagatttttacgtttatctgaagggcaactagactaagcacagtttgaaaaacaatctcctagcttaagctcaagtctagtttttgtgtttctggaaacagccttcccatgatgcagagcggatgttggaatatatgaagaatatttttgaatttttgcctctaatgggtgaagaaaggtgtcccattctttcatctttccctaaggattctgggttgatcactcaggaagacttcctggagattaggggtgatcttccaatgattcatcttcagcttgttcccttaaattcatttctctttcttttgctcttccatgtatcaactatctttcaaaatctaattcaagttttgcctcctgcaaagatatgttttagataggcattctgcagaataaattcaaacattgacaagataatttgatctaatcagtggttctcaaactttatatcagaggaaaggggctttacataatttaaatgtctggtccccaaacctagaaattctatagtttaatatgttactagatttagttagcatgttacaagtgcataactgcatagttctatgtggtggttcttagtccctttatttattttaccaaagtaactgtacttaaacaaaataaagatctcacacactgtgctagataatcctaagaagtttttgacctttaagtttatgattcttctatttataatgagcagcggcatcagctttcggaattagcagttgataatcatgtctagatgatgaaaaacaatgagtaaatgttgtagataacagttggggcttagatattttataattcttcacagaacacagagtgttggactctcagaacaccactcaagggcttattctttaaaacctaatcatttagaatatttatatccacacaaccaaccccatagcccaaagggatcttaaacaggtgttgttttataaataatgtctaatatgatgtatggttgtgagactttcctctctcaatctcccacactaaaggatcccctaatagattattttaaaactttgttttcccagacttagaaaaagaactccagcagacatttgctgtagttgagaggattccaacttttcagttgccatgaatacatcctaatggtccagaatctaggctgaaaataatgtccagcctagatggtatttattagaaaacatggaaatctcttggacaataccatggcacccccattcccatccctaatgctctgattatactctctggacctttgttacatcatggtgctgagacataaaatgtggacactacatttggaattaaaccagaatattcttatatatttgttttaggtagataaattgttaataattgcatatactgatttagtattgaaataaaaatggtttttatctgtctaaattattgatatctaagtgttttctgtattgattgcctcctcggtgaaacacatacgtttgttaaatatattcctataattaaacttgccatctagatacagacttctgtataggagacactttactgacagtatgatttaaaagtagcatgattataggttggatagagattccaaagtattaatatcatgataatcacatgctaatggaaattttaagataaatattgaagaaaaaactcaagttaacttcattatttctcagaagctttctttttggactcagctatgtttagcaatatgtgtctaaatattttcaattcttttaataataaattattcataggtgatttagcaattgagagcatgtaaatatgtaatttcaagaaaatgcatccagtggtgtgcagttctctggaagacaaactatgaaaaatccttctacatgatataaatttcacagtagcttacattcatatatattcatctaattatggttctaggattactatacctttgacctttctattggtacgggataaattgatatacgtaaatgtagaatgtgaaaaaaaattcacaacacagaataataattcatttattttctttaggtaagagtctgactttactaaacccgatagccacaagtaaatgttaatggaaaggttttcccaaggttctttgaatttcatacatgttttaattcctggcaggtagccagactatatcagcatttaaaatacaaaactaggatagaattttacctatttcaaggtagtatagtttgtgagtaaactgtggagagaattttaacctttaaatttgtttattgtttctctgtactatgtgtaagatgactaaacttggctacaaaaaatagctatatcttaataacaaacccctatttaaacccctatttagtataatttctctctctctcacccctccctcccttcctctctttgtgtgttgggggtgttattcttcaagaaagagagatgaagttaaatttatttaccagacaacaaacaaatgctttatgtgttgattgtgaaggaagatgctgaaagtttcctattaactctttcaatttcatttccattttctatttaaattgccattcatttcaccaaatatttattcagcattggtgtcttgtctggttttttaattatttgcataacaaagtaattgaaaaagcaagatataattaaaactttcagtaaatataaaaatttatctaaaacatgcttgattatttttagaaatacattacatgggggatcctaatgagatcctgattgtttttgttctgaatggcatcaagatgtatatgtttcagtttcattctataggttctgtttcagtatttcaattcaatttcttattataattgaaggattatcttagtaaccttaaagaaatccacaattaatgtaatttatcaatatgtatttatatttgaagatgattattgtctaacatttagagtttatactatgatatatacacaactattatattttcaagtctttatttatacaagcaaccagtcatacaatttgctatttgttcaagtctttatttatacaagcaaccagtcataaaatttgccatttgttcatttatttattctttcaatcattcatttaacaaatgtttaactgcttacccatgtgccagacacttgactgagcaataggacaccaataatttgaaaataaaaagaactggtctctgcatcaagaaggatatcatattctatagacataggtaaccacataaatacaaaacagtgtgacaagtgcacacaataatatgtaaatattctaacatgaagggaggcatctagcagttcttagaataaagtatttctaaacctgttgtttgcatcttgtgctaagacttggatccactgaggacctcattcagaagttttattcttgctatcagattagaatgaccatgcatttgtgctccttttctccactgcccccagcaccagaaaccctcaactagacctctagtatcaaatcatagtgatgccattaatttatttcttctgtatttttatatgattatatatatgaaattatttttaaaactagtccaaattattttaagtgtttagttactgtatttgtcaggatgtagattcggtgacatatcacagatcccccctggaagtccccaaagcaaaaacaaaaggtagttgttcacttctcatgtctctctgcagatttgggtatttcagggatggtatgctggatctgtaagtttctggggtctatgctgtttccagctctctagtctacatctttaaggaatgttgttttgcatgatctaaaaggatgctgtagtgatcgcagataccctcccagcagcaggatggacacgttttagatgttgcacacgtcattttacctcacatcccattagtcaaatagctattccctggtgcacagaaggctgggaattgagttcctcttatggaaaatgtacccagctgaaacatctcagggtcttttcttgtagaagatatgggatatgcacgttgaaagaccactggtagtctctgccacaagcatctgactaaatatttcagaaaaaagctctgtagagttttaaacttgtgtgtgtgtgtgtgtgtgtgtatgtgtgtgtggtgtgtggtgtgtatatgtgtgtggtgtgtggggtgtgtgtgtgtgttgttataaagtaatgcattgtagcttatttggaaaatatgaagtgtgaaagtgaaaataaaacctcccataattacaccatgcagctataatcactgttatcattttgtttctattaattcttgttaaaaattaaaacaaatattttggttgatttaaaacgtaatacatgtttattgtagaaaatagaaaatatatagaaaattataaataaatatcacccattatctcaccataagtaatattttatatttatccttgatcttactgtatatgttttgttaatttttttcatttaaccctttattgtggacatttttctgtcgtcaagtatttttccataactttttttttttttttttttttttgagacggcgtcttgctctgtcgcccaggctggagtgcagtggcgcgatctcggctcactgcaagctctgccccctgggttcacgccattctcctgcctcagcctcacaagtagctgtgaatacaggcgcccgccaccacacccggctaattttttgtatatttagtagagacggggtttcaccttgttagccaggatagtcttgatctcctgacctcgtgatccacccgcctcggcctcccaaagtgctgggattagagccttgagccaccgcgcccggccgtatttttccataacaatttttaagtgtctgaatttgtattacagaggtgcttataatttatttaccaatccctctattgcttgggttttagaatcatatatacctgaatttgaaactggctctccggcctttgagcaatatgattggaatatgctaatgaatcttcctaaattttagtttccttacctataaattgggaatgataatattatctaccctttaaaagtattccttggaattaaaatagataaaatagataaaatgcgcaaagtacttagtaaagtgtgtggcacctaagtccctaataagtgctagcataaccagtcaatcaatcaatcaatcatttaattaatttcaccacagaaagtacttgatttctgtaattgtttcagctaatttagatctgatgcttccaggtcttatcctgtctcttcaagggtggttggacccctgcagaagtcctgtgaagtgttttaggccagtgaggtggcctttaggaacacaaagggccagtttgtcaaccaggagccttgtgatctgtggagacaggaaacagacatttagatgggaacttacgggataacataagaatatctgtagttttctacaattgtaggctaggcgtgatccgtgttagaggggagaagaaggagctggtctgaggctggtctgaggctgaggagtgtggcctgcctctccctgcttgcttcctgggatgtctcctcagtgtcagtactggtgaggctggggcaggggaggagcagcagcagttttaaaatcagacttctctttgctttttgatttgttaagcaaattccaggtgtctcacttgctaatcacattgtcatctctgatgcttaattattttctttagggaaatgaagttgtttggggctttcaggaaattaaattgaacttcaaaaaccacttccacataacaattaacattttgaaatggataattcctcagggtttgttgctaggtgagtttacccagtttttcctttaagagatattctttataatagtggatttatttgttcttttaattatagatcatatttttaaaaattggacacattaaacatccattaagtccctagtaaaatgatataaaaatgtgtggccattgcctttgagacagactaatgttgtcatctatggagtaggaaattggtggtgattagctcttgggctctatatttgggagaagccttcatcattggaaggagttacatcttggcctgctcagaaaaaaggaagtagtttcaatgttagtgcagcaaaaatgcctaaaggtgactgtgctagtctgttctcatgctgctaataaagacatacctaagactgggtaatttataaaggaaagcggtttaattgactcacagttccacatggctagggaggcctcacaatcatggcggaagttgaaggaggagcaaagctactggcagcaggcacgagaatgtgtgcaggggaactgccctttatgaaatcatcagatctcatgagacttattcactatcatgagaattgcatgggaaaaacatgccaccatgattcaatcacctcccaccaggtccctcccacaacatgtggggattaggggagctacaattcaagatgagatttggttggggacacagccaaaccatatcagtgacttacatgtatgtaagaaggtgaagttccatgtggcttgtgggcatcattcccatcttctaatggagcctatacaacctcagcacaaatgttttcagtcccatttgaataagatagagattctagaaattctaggtgttgctgctctgtgccctcctaaacatgcctcctctagtcaatcagatttgtctttaacacatttaggctgcctttaagttctgcattttctactttgcctgcacacagatataatcacagtggaatcctaaatcttaatcactccacctccccctaaaaggatgtgggcgtagaattacttaaatattgccgtatgttagcctttgagaggcttttgcaagttatgagaacccaaccagttgctaataacctactattgcttctggcaatagtaggatctgatctagaaaaggcacggaaaatgtggtcagaaagattgggattctaggagaaattccaccacttacaaagtgtgtaaccttagtcaagttactcaacatttgaatgtcacttttcttatttgagaaataaagtccttgcatgtagaaaacatccaaaaacttccctttcttttttgttatcctgaaaatctgggtgtggaagaactgttgaacaataggttagctctatgttctacaacagactgtctctcaaatgcagagttctgtgtgtttattgactactagcgtcagcttctgtgcagctgagatacaaattcagccctaggcttttatccacagatctgagaggaggaaggcaggcaggcacctgtaattatagcagcagtgatgaattgcagctgaattgcatggtgtgttaaggcttttctgtgctggttggcttgggtattagtatagtgattctgggagtaacagacagtattttagcaagtgtttgtctttctattatccatttaaacataatcctagaatctccacagacatacaggagttcttttgttgctttctggcagtggataaaagtgtccatttttattaagtgctcagtgcagagtttaacagcccttttatggactggtactagattacgtatcgaggggtggggtgaagatagtttttctatcgacatttgtaaaaccttagatttgggtttccatgaaccagaatactgctctacagacgtcaaagactctaaatgttgcaaacgattgtcttttgtttcttcattttcctttttccaggttgcttggtcacaaaagacatctgtccacctgatctttccaagggagtatggtgggggtggttggggctttctgtgagggtgatagttaggcagggaaggaaggtgggagaggagaccactttgctttttctgcaaacccctgttatcgattaccctgtttgttcctttccccttaaactctcctaaaagaagggtcaattctctcaacatcagttgaatgaaaaatagcaatttgaacagcatctgcaaagtgacatgtataaaatccaaaataaaatgagtcctcaaactcatgtaattttcaattttctctcatttatttgaaagccccagtagcagggtcactatgacatggcgagaggatggaaaatctttatcagaatttattgagtaggctgttaataatatttttaatataatgtctacatgacttccctggcctttaagagtagaggtgtatcttaactctgccaaaataggaaagaagaaagactcttacacatccttcactaatcttcctcttacttactcttatctgactctttttctggggtagacagctatgatgactttttgtttttcttttttctcaactgaggcacgagcaggttttatttagttttcttacttttcctgtcacatgatctattctccccatggatgtaggacctattcctcacacctttcacctttccaggacccatttacagttctttctacctacaaccacccttatctcagtgtagctctttctttgtgtagccagtagcttcattcaataattaagagctcattcaggcctgtgcaaagaggctagggaggggtggaggtatttgggcctcttgggaacatacaaaggtggctgaggtcctgagagagagattctctacagctacagtggacatattttatagaccaaatattaacacacagttctgacatgtgagggtggatttagagggacggagcaatagtgtggctgaaactgagactgtctctctacacaagtagataataattgtatagtgctttgcattttatatgcatttacacacgcagtattcattagtccctatcataagcctagaaactgggtgccattaattccccttcacagaggaagaaacaggctgagagaggttaagtaatttgttccaaatgtcctaaatattgaggaatttgaagttgctttaggcttctgaccctgccttatgttcctttcacttcaacaacttgaatgtagttgaatttcactactgtttgattgggatgtgagattctccaatcacactgtcagaaccaaagcaggtgttgcatgctgtaacaaaaatgttttccttggcaggatgagacattgctcttctcagatgaccctcaagcagcctttcctaattccggttcacttcatccccaaataaaacacataaaagaatatgctgtattctaacctctagagtgcagcccaatgtgaagataataataacagtgaaattaataatgatgatggttactctttgttggatatctgacagatggcaggtacaatgcaagtgtttttcaaacattatattatccaatcctcagagcaagttgatcgccctcattttagaggtcagaaaactgaggatacagaaagataagttatttacctggggcttcccacccagtaaatttcagagtaagaattcaaatgtaggtcagtctggctcctgagcccatgctatctagttttccatgtacacttttgcttgcttttgaacaggagtaagctcaagaaagaatataaatacctacattatatttaacgatttgttcataaatattaactcataaacatatgaggttgaaccatatgaaattgctaatatttggacattgtggaccaagaaaaatggtcatttcatgtggcttaacacaaaagttcttaaaatgtggcctctggaccagcatcatcagtaccaccagggaagttgttagatatacagattctcagattccatcccagatttcataaaaaagaaactaggggtgggctcagcaatctgtgcccgaacaggacctttaggtgaatctcatacccaccaaagcttgagaacccctaattatcctaatgtatttgttaaacagcaactctgtgtcaggtgctgtgtgagccactgggttttcaggaagagcagaaatggacatgcttcttaccctcagagagcttactctttactggcaaagttccacgatgtgcaaatatgaaggtttttttagaggtatttatattgtattagagtttctaggtctctaccaaaagaatgaaatgtttagaggcacaattagaggggaaaaagggttaacatttcatcacagagatggataccaaccaagggagacaaactgatccagggactggcgtgcaggaaaagacatggggccagtgctctggactcagtgctcaggacacagcactgtcaaaccctatatcttggactccttttcttccccttctgtcatcttatctccaaggatggctctgttcactttgaggccatgtttggatgggaagagtacactaagtccacttctcagcatgggacaactcgggatgtctaaggtagggcttggtctgcctccactagctggccaagtagatactgatctgctgctaccttctgctctgaggagctccattttgtgggcaggtggcaaggtctcaggaaaggctttattccagaactttgcctttctctctcctgtaagctacgcagcatgacatggaggatggcactgcctttagcatcgtagaagttggcttagggtttactcgcacggaagaaagaggaggaagcaggggtcattgggaggtcagtgggaatgaaggcaatgtgggaccttccagttgtctgcgtctccccaagcctgagaaatggtgctccttaatatatgttcattaatcctttgtcattccaaagggagaaagggagacattcctaataatcttccatttactaagacagttttcagtcctgaagggttaaagaacattactttattgagtaatgtcttaaagtcagatcatcttgggttcatattttcttaattttttaaaaggaaagctgttttttttctccaaaataacacctaagtacaaataaggcaggttgaataaatccctgcttttttggaagcatcacaaggttatttgttccaccaagtttccaaagaaaagggaataaacatctgttgtatgatctcttagagaaacaacaataggatttttaagcaatctcaagtacgtgagcatcaaatctcacttgaatttcatcccttccattggtaacatgttagaaaataatttgatggaaaatttcatggtgagattggaatttgaaggtatttagggagaagaagaatgctttgtgacaatttaccttttaagttaccaatgacacttttgtatgacattaaaagtgttgctcctattattaatacttcatttgaattaaattcccaactcttattctggccttgttataggagaaataattcacatacacaaatagcagcagttgtgtacttaaaggcaagccaaatgcatatcatgcatcagaaatggaagtaccacctctgagaattcaggagtgttcacataatcggcacaggtttttacccaattgattaaattacattcctctgctttaactgagggggagtaattctaaaggttatgaaatcaatgcaagctgctcttggattgtattatttacttgaatttaggatccagattcttctcatcacctgaaagacaaatcatatttttctcctggagtccttcagaaattcccagagtaggctcaagtattacatgaataattcattttactcactacacattacagcacttaacaaaggctgcggccagagtctcctccttggggaagctaatttggagcatcattatggttctgattcccaatgtttaacagctttgtgacctacctgatgaagtcctttttgttcagatctgttaaagaaaaacttcaagtttaaaatttcattgagaatattattagaaggaaatactcccaggctttcacatttactccacccctgcctttgagtaaaaagattaaaaaaaaaaagaagaagaaacaaagagacacttttgaatataaattcaatctactgcccccaaatattttcttaacattgaaaaatcaaatgacatgatttaagtatcatacatatatttccccttgatttattcaacattggaactcaaccagaaaaaataattatgtgaatacatatgtggacatcacttagaactctgtgtggagttctgtatattttccttggtttacagtgcattttttcttatggctcttatgggaattcatctgaactttcatgttgtcataacacttcagtgttctctcagttataattcattaccacatgggatgcagatgggctgtgcactttagcacatgctgaaatataaaagtctgaaggcactgctgactattcagctgactctaacaatgaccaatatagagacaccggtctttgtatgttactctctttctctatccatccacccccattcagacaaacccttggataaattgaacactcttagataccaaaggttagaaatagtgagttcttcagtgactctaatgagctcacagctgagtatattttccagactaacttagttttgaatatcaagagagacccccattttattcatgtgagtagggaagagaaacttgttcttaggtatactttaaaaagctctatttttaaaatttggatagacttccctcgtgttttccatagcaacagcaccattttacagtcctgacaacagtatacgagtgttccaattttccacattctcgacagcacttgtttttttatgtatttatttttgaaagtagactaacagatatgaagtgatatcattcattgtagtctgatttgcaatttcctgatgagttgttttgttgagcatcttttcatttaccagttggccatttgtatatcttctttggtgaaatgtctattcatgtctttgccaactttaaaatcaggttatttgtttttgttatttttgctattgagttgtaggaacttcttatacagttttgatattaatcccttatagaactaccttataatcagtcaatccaacttccaagcatttattcaaaacttttgatactaatcccatattgaactaccttatgatcagtcaacccaacttctgggcatttattcagaagcattgaaatcagaatcatgaagagatagctgcactctcatgttcattgcagcattattcacaatagccaagatatggaaacaacctaaatgttcatggatagatgaaaaaagaaattatatggaatgtaaggtagctgtgggagtggtaaatgtctacagccagagtaaagattataatgattactcatgaggatttgatttctcctatggaaaatatatgtatttgggggttgttactattttctgtaaagaaacaggagattcaacttgcaataaaattcataacaagtgctatgaatcttgctctatccaaattttttttcttcagaattttttttatttttttttattatactttaagttttagggtacatgtacacaacatgcaggtttgttacatatgtatacatgtgccatgttggtgtgctgcacccagtaactcttcatttaacattaggtatatctcctaatgctatccctcccccatccccccaccccacaacaggccctgatgtgtgatgttcccattcctctgtccatgtgttctcattgttcaattcccacctatgagtgagaacatgtggtgtttggttttttgtccttgcgatagtttgctaagaatgatggtttccagcttcatccatgtccctacaaaggacatgaacccatcattttttatggctgcatagtattccatggtgtatgtgtgccacattttctttttttttcattttttaaaaattattattattctttaagttttaggttacatgtgcacaatgtgcaggtttgttacatatgtatacatgtgccatgttggtgtgctgcacccattaactcgtcatttagcattagttatatctcctaatgctatccctcccctctccccccacccacaacagtccccggagtgtgatgttccccttcctgtgtccatgtgttctcattgttcaattcccacctatgagtgagaacatgtggtgtttggttttttgtccttgcgatagtttgctgagaatgatggtttccagcttcatccatgtccctacaaaggacacgaactcttcattttttatggctgcatagtattccatggtgtatatgtgctacattttcttaatccagtctatcattgttggacatttgggttggttccaagtctttgctattgtgaatagtgccacaataaacatacatgtgcagtgccacattttcttcatccagtctatcattgttggacatgtgggttggttccaagtctttgctattgtgaatagtgccgcagtaaacatacatgtgcatgtgtctttatagcagcatgttttataatcctcttggtatatacccagtaatgggatggctgggtcaaatggtatttctggttctagatccctgaggaatcaccacactgacttccacaatggttgaactagtttatccaaatttttatagataagcataaaaactagtagagacattagatttaataaatactgtagaacaattagtcatactactgttgactagcactctgttgtaccagtttaattatattttaacaagtatattttattatataatttctataattatattgcataaaacatggaaaattgagagagtaagacatcactcacaagagcaacttcacacaactgctgatagtatttcagcgtattccatttcgtgtttttccaaaatgcatcttttttcccaaatttttactgtaactgtatacaatgttatcctacatttttcactttgtattaaagttttaaagacagcaaggcatatttatttttgaacaattgaattttcttgcaatcaactcatgtatcacaggccaattcaaatttatgatagactgatttttactggctttgtttgctcttttcctagacctttaaaatctaaatttctctgagaattgtcaactctgctctctgcatgcccagcattcccctggcttctactaacactccttttgcgttattcctgaggagagttctgtcctgtcttctgagcatcagttttcctctccaggatttgaagggcatactgattggcaagtctcactagcactgaggccatctattattcacaagttagtttttcctcgtgaatttcctttttgttgttgttgatggacttttcattctttcagacttgaaagcttggaggcatctttgatttctctttttcttctttacccacatctattgagaggtggccatattgtgatcattacatcttttcgctaagcattcaaattcctaattccagtctttattaataatcttccactttgtgtattgagacacagtacaacactgtgcttaaggtgatgggctctggagccagacctctgggagtaaaacctcagctttgttatgtatgcattagctgtgtgacctgtggcaggattcttaatgtctctccttgtctctgttgtgtaagatgagtaatactatagtacttaaccaacatggttatggggaagattacagagtgtcttctagctattttgaaacatactataaattcttaattatagtcaccctgccacgctattgaacactagaacttatttcttctatctaactgtatttttgtatcaattaaccaacctctctttatcccccctcctccctacacttcccagcctttggtagccaccattctatttgttactcccaaaatatcacatgtacgccataaacatatacaactattatgtatcaatacaaaaatattagtagtatcaggaaaaataaaagtatcaaatattaaaaagtttacagaggatctactgtctacaggcactcaaatggtgtagcccctgtcatatttgtgcctgcctctctctttctaatctatcctatgcactactgccagattgattttcctaaaatatggttttgctcctactgattccttcccttttcttccctttcacccttcagcttcaataatactgcttgctaaatgaaattcaaactgcttggcctggcatttaaagtcctacataatcagatttttaagacccctttccagcggtcctctgtgctctagacaatccaaacaatatgctatgttttctttaaaggcctagtttaagggtgatatataatatgcttaatatcctgtaaagcacagacacatatcccaatctggagtcaggtcttagggagccagccatgccttaaaatgttagttgtttaattgtgagaggccccatgagaggggcctgtggagcttggatggcaggaaggccttggggaaggttggggcagaagccaattaccacatggtatggaagtatctcaatatattaacaacttctacagctgaaccaaggcatgacaactaaatgtcagcattggccaggtgcctacttcttgacaccgctcctcccactcattgaactttttgttgaaatttcttccacattcaataaaacctttataaagtgccatccccattctcattgctctgcttttctgaaattctgtggttcatctaaataatcctgttttggaagttacatatttgtcttcccttttcatagttaactttatccacgaatatatttagttacatatggttacctaagtagctggaaaatgtgcatgaaggcagggactatatacttttcatctctgcatccataccctggtgctgttatcgtaaagtgcagccagtcaatatttgctgaatgaacaactaagctggcacaattcagtactttattatttttctagcaaagaatgtacctgtgctccctggtaattttgaatatggattacaaattaccagatttgaattatggcaatactttgtatcggtaaattttgtgtgcatgaaaatataaaattttgggtagaattaaatgattcatttaggtgaattggtcattcagtcagccagtggggtcattctgtgtttagtcagtctgttagtcagtcactttgtctgccatttatccattcatttattcattcactgaataaatgctagcaattcacagctaaaagatgttggtggtctctgtgatgtaaaatttctgggatgcttcgatggatcacagaggcaatgggtaatatttttgagaatgttaaatgctttgctaatttctaaccttcagatgtatgtactcggaaagtagttctggagtcatcttttgcttaacacatcctgctattagattttctttaattagctcattaggaattaatatctgtgtttgaattacaaatccacattttatcacctatgaacaaaaatgtcagcgattttgtttcatgtgaaccagaccaacacacagtaattatttctgaatatgaaacacgttaaaaataaaacaaaaatctggagttcccttgagcttgacaattaccttgttgtctactctgtttgctagttaggcactgaaaattctttaatacagctttgatttgttaacatgcagtttttaaaaatgctgccttccttattgaagtgagggaaatgcatttctactggttacagatatttttacagaattaaatgagaggaacaaaaatgaatggattttgtcagtcagttgccaacacagaagataaggcctaaggctttggtcatttaacatttgtgatataattttaaaaatcttagtaggattaaagaatatcacattctattatttctaatttgatttttagaagacctatggaaatgttgatttaaaaaactatattgaaataaaaaatggttcttgcagttacgtaaggaaattattaacattattaaacaatatagaatccttaactttgacaaagaaccaagtttgaatgaaaatacatatattagtttaaaaatatgtaatgagaatctataaaatcatagagtttaaaagcaaaggacatcttaaggctttgttcagtagccttgtttcctctcctaaggaacgttaagtgttgaagtaattagtgttagtctgcaggtgggtgacagggggttagacttctgctcacatccctgtcttcctgctcttccactgcatcacactgtcattcttttaaatatgttttatcattgttctttctcctttcaaattcttaggtttcttatcagacttgctgcattagaattctaagacaaagactttgaaaaattcaatgactttttaattaactacaactttaaaatgctgacatttgcacctcaacctgagtccaacttactaaacattgtgtgttttgcaatctaattatatgttctcttgggaatagcaaagtcatagtgaccttggtgtccccataatacctactgagaatgacacatatgaactgaaccggatcttcagtcaaaatactttacaagcagctatttacttgttattcctaattcaggaaccacaaggtcctcaattttgtaaatggcacgttcagaggggaatcaaattgcagatgaatgagagaatttacataggactaggagacatgatacccttgttgctcgtaatgtttcattaacacttaactagagagagatgtagtgcacaccctaactacatatgcactgtccttcttcccttatattttcagcagggtaattcacagctgtgagtcagaatgatagcataagggcttcagagctctgatcacagaccaagaattatcttggcagagaaatgaggagcagttagtaccaagagcctaaaaagaaagtgctaagtagataattaacatcttttctctcagtggcaacctggaaaagttcttggtaaggagccataaagaggtctctggcctataagaaggaagaaaaatgtaacagacttcctgaaaaaaatggagagggtttttttctttttttctgttttctttttttccaattatagcagcactttatttttccttacacaatgacgtgttgctggggcctaatgttctcacataacagtagaaagccaaaatttgttgtcatttcttaaagaattgagaatagtgtgcaaaaatatcttacataaattaaaaggatgaataaatttacaggtattaatgcagacaactttcaactcctggcaagtaacagcccacggtgttctggcaggaaaacaccaggtaagaaaggaaactgggtcctaacgcttggacttctctaacctttgtagaccagcaagacagaaacaactggttcaggagctcttgccagcctttagagaaatcctggaacactgagctctgacacattaatacctgcacagatcgacagactgctgggcacacagactcaccaaaccacggacttttcttccacaatcatgttctcacctcagccactgagtgaccgagttacatgtactaagggtttaaatccaagatacatacagggtattaaacaaataccaagggaacagttaagttcaatacaaagtcaaaatcagcagcaagttttataatccagtgctggtaatcagatacaagcttctgggacaaatttcttttcaaaggcttactctagtttcatgagactagcatgaagtgttctgaattaacccatgcagcaaatgctacacatctgctcacagcctattctgctgggtgatccacatctgctggaaggtggaaagggaggccagcatggagcttctgatccacaccgagtatttgagctcagtgggggtgatgatcttgatcttcgtggtgttgggtgtccgggcagtgatctccttctatatcctgtcagtgatgcccaggtatgtgattgtgcctccagatagcactgtgtcagcatataggtccttgtgaatgtgcacaccacacttcatgacagagttgaaggtggtcccaaggatgcctcaagattccattctcaggaaaaaggaaaagcgcctctggacaccagaacctctcactgctgatggtgatgacctagccgtaaatcagcaactagctcctttccagggaggaagaggatgccatggtggccatcacctgctcaaagtctagggcagcatagcacagcttctccttgatgtcgcgcactatctcccactaggcagtggtggtgaagctgtagccacactatgtgaggatcttcatgaggtccaggtgcaggatggcctagggaaaggcatagccctcaaagatggcactgtgtaagtgaccccatctccagagtccatgacaatactagtagtactaccggaggtgtacagggacagcatggccctgggtgccacatacatggcagggggtatccaaggtctcaaacatgatctgagtcaacttctctctgttggccttggggttcagaggagcctcgggcagcagcactgggtgctcctcaggaaccacatgcagctcattgcagagggtatgatgccagatcttctccatgttgtaccagttggaaataatgctgtgcttgaaggagtacttcaatgtcaggatgccatgcttgctctgggcctcttcacccatgtgggagtccttctggctcagttccagtaatatttattggaaccttatgctatctctgatgctgtcctgtgtgcttactagaaagacaagtctttactctgacagagtttatattctggtgctgggggcgcccaacaatggaggggaacatggcttgggggcgtcatccccagcaaagccggcttggcacatgtggcgccattgtcaaggacaagtgctgtgaggctcttctttcactgtgatccatggagagtgggttggcagtggcaagtgaaaaaaaaggaaggtgttacctgatgtgtgtgtgtttggtgtatttctgtatgtatagaagagaatgtgtgaccaaaacaaagttaacttatggtattacatattacttgtttttagcatcagtttgaccatttgaaaaatggaatattggttatcactttgttacttggcctgcatggatactttataactactgatttaatagtattattaaaggggagacatttccaacactgaagtggttcaaggggcataaagcttcctgcccatgataacatcacccatttagtgtagacccacgtgcactttttttcaggcatggatagctggcatggggaatcatctaacactccatgagatgtgttcccaacaaaacattatgcctcattagaaagcggactctgtattgttttttactgtccacatacaagaagctaataatacactttgagcaatttttaaagaaattaatactcttgcgcataattaagaaccctgtggctatttaattgttgctcttctcattagaccctgccctgctccctgcagataccccatgctctcatatttgttccctcttgccaggaccttctcctggggctgcctgcctataatttaatcaagtccctcgtccatattttatattttatatatttttctgccacccctaggaagagttgcttcctgaatcattcattgaactaatatttactgtaaccttatgctgtctctgactctgtcctatgtgcttactagaaagatgagtctttgctcttacggaattctagtgtcttaatcctttggagtattcttaagttattttggtaaactaatttatactataatatcagttgcaaacattggagtaaatgatatttaccccccagataatacccaatgacaatccactaagtaaacatttattgaacgcctaacaggttgtaggaatacaaagatgaatggggttctgtcccatattctcataatctacaggaggagattgatacctacatattgaaagtgatatttaaatacaaatgtgcacttctattttgtctttttgggaagaaaaattcattttaatctatctaggcattcatctgcttagggtgagaggagggtatgatgaatttgttatgaaaaagataatgataatattgtttctgtcacacaagaataggattaaagagcacaatagtgaccatataagctaggctattttcttgagaagggatcatctaaatatttttttcttcttctttggcaaaccaacaaagaacaaataagtgtggaagagtgaacattctccactattaaaacattatacatataaaacagaggaagaaagatctaccccctttccagactctgtaatttcaaggaggaggaggaagagaagggaatgaaactgacataaggtggtcaggccaaaagagactcagaggtcgagtgtttgagacacaaacgctgagttgagatctattggcctctcatggcacctcaccctgaggctttagaactgaaaaatcccaagagaaaatcccagaaaatcccaagagattttttttctgtaaaatgaaggtaataataactactcttgttgccgttgtgagaatcatagacacgaaaaagtatgtaaagtatccaataaagtgctcggcatctagaaaacacttgagaaatgcaagttacctccatttcttttcaatttaccttctggcaggactgaatcaactaacttcttcaaggctgaaaagcccagaatgcagactggcctgacttgctgcttttatacctgcgtgacgtgcagcaaattgcttaaccttaatttcttcatctataaaaatgaggataatattagcaactacttcttaggatggttatgagtattaaaagagataacagatgtaatggcctcagctcagtgcattgcaagtggtaggagtgcaataaatatttattattgcttatgtttttgttccttttatgttgtctgatctgatgtgtctaaaaattatctttattttttttcttcattgaaaatctcctacctcaggtactattctttttttttcttacttattgttttaactgtattttctttatgctgaagagcaagatatattgctttgcatttaacattccaaaacagagcaatggcccatagagatgagaacatttttagtctgaatctagaagtgaacggtttgattaaaagagaaaactctacatttatttatcccctgtttgcctatatttgcagtcacccaattaatgatcaccagttgcttatgtaaattactctcaagagtagcttaaggaacattttatgagtcgtacaggccaggaatagatcttaaaatagcgactagagagttgaagtccgcctgtactatgctagaattaatagtgcatgacctgtcactgcaacgaggtggccccaaattttactgtagcccgctgacacgggtatagatgtgacttaaaggtcacccttaaatatagaaaagcatgtggccatggggtgttttagacactaacgtgcaaataacacaaaagtgggcttcctgcttgctacttattcctgtgtgtgagttgggactaacagcagcagagttctagaggccttcagcccatgctccaattggaggtgaggaagagaggatgcaatgggatacatatcctaggaccatttgtgaggaaagtctctgtaatcaaccctaaagagtgacgtggcctgagagatgagttctcatacaagtctctctcttctcaggcaaactcgaaatagtggaatttcagagctagaagggatcttcaatggcaaagtcttggtccaaactttcacatactttgtaggtgtctgattcagtgaacagaatttctgacatgcagactttcctcactaatttgaatatttttttttttgttagaagaagaagaaaaatatgtcatttatacatttttccatcagaggagtttgtgaatcttgggtaaaattttatagctctatcgagtttaacagtttgaatattaaccttctggatgtgaagatttaaaatattttattttcctactactttctggaatgagaccaatccttttacacattagggggattttcctggcctttctgtgtttatctaacatgtcacacacccggtccctcatggtgggctgccctttgttcttgaggtgagacatgtcagtggtggtaccactgtaaatggggcacttctctccccagctgttcaccataattcctgaaagggaaacataaaccaaaggaaataaataatgttttgcttatttctctgcagctgccccgtgaggaccctgggtacttggcaaatctgtttttgctcctgaggaagagcctaaggagaaaagaaaattctatccagagagatttaggttgcacaaactgagcctgcactttcaaagaaaataatagatcacatagtcccaactcttagagttattatttttttcttttccattgactccatttttccttgctgtacaacagtttctaaagcagagtttttgagtgctttcatccagaaccaatgagtgtacttttctattcttctttttttaatatagtgtgactcagcagtgtgacaatgtcttgcacttaattccccagaagttattgtgaaccatggaataatccttacctttgtctgatgtggcactttctgctattcagaactgacatcactcccttcaggactcaatctctgtcctgcttaaaccatgccaagatttagacaattctcccaattaactacattgtgaaggcacacggtgatttttttttttttttttggcaataaaagaaagttgaaaacagacttttaaaattggggaatagcaacccccttcccctcaatcccctcctccaaataagccacttttccagttttttcattgtggtccagaagttgtttttctcccagtttgttggtgacatctccaggcgtctcccttttccatgatctccatgccagtggcttagtaaatttcctttgcacacatgatttctaaatctctatctctagttgtgtcttctttccatgctattaaaatttcctttgatatctcaagatccatgtgcccaaagatcattgttttgttcttttcagaacccactttctcttctgattaatgccattgacattctccatctgacacttggactcagaatcttagatttgtctttgacttttttcttcccttacttctcaagtttaatcattttttcaggacttggagacttttcaatatcaaagcttcctggatctagcttgtctttacatacttagacaggtactcattacttttacacatgaataattgcagtggcctcctaatttgtttctttattcttcccttcttttatttcatatggaaatattcaaatgtgcgcatatatatttttaaaaagttatattctttatccttttcaaaattcaagctaagattctctgttagcgtaatcttgcctatagcatttgaaacaagatttggttaataaacttcctatctattcagagtacagtttttcaggattaaaatatttgaataagttgatgtacatgtgtatatacttaaatattaatatagctacattttactaattattcatttttatgagataaataggcagtaagttcaagttattttttcaaactctgttttcagaggttcatgtatattttattcctacaatatgttttttgagtgattcaggatagtgcacaaaacagaaagcttgactgaaaagataatgattttttttttatactgaactcttagtgacattgttaaaaaaatttttttagctgcaaggctgtgtactgagacatttagcatttgccttgtaagaaaaatgttctgtagcaaaacttgaatagagtgggggtgtggtagataattaggtttcttccatatttagatcctatgatttatgttacccccactcttactggagcaagatttttatgtgggagcaagaactagtctggatagagaatatataatttggggaattggtatcttcagcaaattttcagattcttctcagttcattttatgtataaatcttttgtagaactaaatcaccagatttaagatcttttagttttcctttcttattttatagagttttggggaggatttggtaaaagtcaataatgatttaaagtttattattattattattttttattattatactttaagttctagggtacatgtgcacaacatgcaggtttgttaaatatgtatacttaaaagtcctatataatttaaaattatattgtaaatttcgtctaaattaagattaaaatggctcaaatcatcatatttaaagtagagatcttgatctagtttacagttatgtattgcatgaattttaaaaataattttagagttcaatacctatatggatatatatatatatatttatactattttgtaaacaaattaaaatattaaaactcacagtgtccttactacagccaatggttggcaaagaaaatgcctaaatttactaaagactgaggagagatattctatcacttgatgcaagcaagcaacaatagaccacatggctgacttatttctatactgagaaaaatcctctgtttccattttcacaaacagaatgaaaggcattagcaaaaatgtcctgctgcattccttcatgagacctatttaggtaatggaaatcttagcaaatatattccttttccctttattgataatggtctagctacataatagaaacatcatgtggggagcatctaatgtacctcacaactgccaacaacggtgtgaattaggacaaaaaggattggtctatttccatttacttcaaagatccttttaatattctttgttgctgtagactaaatattgtgattaaaatttccttctctatttcttcattattatgcttttaacaacttgtaatttcacaagacatttcttaggaataagaaagtgttgtaaataaatgtggatacattcttaataccttagggagtgggggcaatagtagcatattgattcacttacagtacatacagtataatactacttattttcccaaagtgaccatctgtccagcttgccagcttgtcagctatcatcattcctctgagcttcagatcctcgcccgtaaaatagggagagatacagggttattgtaacaagtagaataaatgacacacaaatcattctaatagagtgcctggtacttcccttatatacccttccaagatcactcctcactccacccttgttccctcgatgatcttatgctttaattgtgagaggcaaaaacaaatacaaaaggaaataaaggatgaagcagtgggcggagaatgtagactagtggaaataaacttgacaggaagcctcctaaattctagtagtcctagttttgctaccaaacagctatgataccttgcttggatcacaaagtctttctatatctacatattgtccatcaaatgaaggtttaatgggggtatttattaagtgccacatttgttatatagacattaagtctcattgtaattctagcatgttagtagtccttgtgggttaaagtaagtgattagggaagatatggaagaagtgggacatgaaatgggctttagaagttcattaggatttggttagctcaagggaagacatttatttgttgttgttttttttgtcttgatcttagccaactgaaatgttttaatttttcatagaatgacataattgaccagaatgatacgttctgaagtgacactggccattaacttaattgctttaattctttagatgaattttatttgagagatttataattctaaaagataatgcctcctgtaaatagctccactatcgtacttatcaatatgtgtggaactcgtaaatggaatatatattggaaactctttccaatacagagtcctttagaaagaccaaaataatgtagccacattgtgagattgccatcaagaaatgtgctcaacatcgttctggcacactcttttaatgagtccatatttgtgattaataaatgcgtgaaatcattactttccagtaaatatatataaggtaagatttcaaagtgacatgtcaagtatgattagtatttcttcgcattaaattgataaggaacaatgtgctttaaaatcatagtcacagactgggggatttaagagccattgccacacagatgacaattgaattcctgagaacagattagattgcctagaaaggacaaatttgttataaggcaacatgcacttttgtaaactgcattgatttttgtgctaataataacaatggttattgaggttgttgataagtgtatagaactaatgaggtttgttatattttaggtcaacttggtgtccgttactttcagtcccaattttatctcagaacttctaaacctgagatgtaaaataggctacatagatatcttaaacaattgctcagctgctttcaatgtacagctgaagctcagtgaccatctgtctggtgcgctgagtattctaaatcctaaaagtgtatctcattgggtctatatatgtttatatcatatggattattcttactgttcattgttccatgggactgtagtttgggcactaatcccttacccagtttattttgtcctgggaagcagagatggtttcattggatgcccatggttcaaagtaacagctttatgcataaagagcatcttgaggcctttaccctcagaaagcaggcatagttgcaacagccatgtagtgtgtaatgaagcttcaaagtcttcattacacaagtattatctcaattatctcatccaatcctcacaacaaccctatgagaaaattatctatccccagtcttatcttttagatgaactacattttacagctaactaggttacccaaattcacaaaattagggacttaaagccatgattttctgattctaaagacatgggacttttccattatgcaatattgacttcaataaatatccctctccttttcaatttccttaatgaaagccatcattatacatgtaaatatgtatattgataattacttcaaaaatggaaatgcattgtagttgaaataacaaaaacaagaaaatatctatataagatataggtattataagtagctatcttacctatgatgtaattatttttaaatggacttctggtttagaattttgggctatataggcatacctagttatcttgaacttaaatgcaatttatgaaaaataaataatttttatctttgagagagtcttgtgaaaagaagactcctgaaaagattcctgagaaaatattcatttgttattgttagtgagaatctgggtttaaaaactgcaactatggcaataatgttctcattggaagatgaccacttcggtgaggttatgaccaaattgttatggaattttttaaaaaagttagtaagtgccaatggaagacataacacaatttccaagaaatatatgtaagatcataatatgcagttgtagaaaaaatgatggggtatcaaagaaaaatatttccctggaaaagtgcttgaaaaagaatctactaaaacaataaaacaacaggaaataaggtgaaattggacggagaaaaaattcaacagaattaggtataagacacagcatgggccaatcttatttgacaaggttcaattgacattaacaaaaactggacagaaaaaacagattttatgaagaaatgaacaaagtcataatttagctcagtgcattaagttaatcagttattaagataatcctgctgaggcacttgaatctttatttccttacccaatggttcagagccacaagaaccctagttcaaatgcttgtgcagttgatctggttaatcaactaattctaagactgatcaactttgaaggaaaatcatttgaggaagattattatgcccagttggaagtaactggactaaggaactgaaagctgtacatctttctgtctgtgtgatagaacctgcacccatgcagttgtccaaaaactatactttctagttcttttcagttaaaaaataataataaaattgatgaatggattccaacagagggcccttctctgccctaaaacatattgacacatttactcatatttctgtttgagggtttaaagcagctcaaagtttgtaacttcctgtgtttgtctgcgcccttcctcctaaatacgcaagggcctttaggaccaaaaactcctcagcctccttgtcagattctacgagaaagaaatgcttttttgttttttttttttgttttttgtttactgaagattacagaaaggagagtgttagatggtctatcttctaccttgcaggcctgaattttttttttttttttttaagacaggatcttattctgtcttgctgctcaggacagattgcagtgttgcaatcatagctcactgcagccttggtcttctgggctcaagtgatcttcctgcctcaagcttcctagagcactgggattacaggcgtgagccactacacccagcccaggccttcagacttttgtgttctcttccagctcagctctttccaaaagccagtaaccccatgcaggttggtcctcgctgtgagattctttctgagtagtctactctctgtcccttgtcatcacagtattcttgcttttgagggaataggccctaccagaccagtctgaatctcctgaaatgttggtgaataaaattttgttctgataccacagtgtaagtaaacaaacaaacaaacaaaaagcagtcatcatttccaatttttctagaagatctcaagttgtttttcatgcatatggtgagagaacaagttttttgtttttcttttatcttaaaactgtatatgcttgtgctacccagaacacggtattatgcagtttaagagattctttacatgcttggcgcggtcaaacatcaatagttccaccttgatagactttcaagtctggaaaaagcttaatgaagttaggagtctttatggcctcatttttttcttttcaactgttagtttaggttccaggggtatgtgtgcagggtttgttacatgagtaaacatgtatggggtttggtgtacagataattttgtcatccaggaatcagcataacacccgataggtagtttttcagttctccccttccttcaaacttttaccctcaaataggccctaatgtctgttgttcccttctttgtgtccatgtgtgctcaatgtttagcttccactttattttattttactttgccaaagctacagaacataagaaagtagtctgggaaacttcttatagtgaaaggatatgtatacttgtcttttgggagatacaaaaaaaaaaaaaggggtgaacagggcagaatttttccaattcttgggagagggaaaactccaagagataagagtgggtggaggtaattttaaaaagagaagaaacgttgattgagatttgaaggtttgctggatggcagaaaaggatagcatgaaaccccggctttggccacagatgtgtctgaaaatgttgtaggactgtctccttagttcagccaaaaaccaggttcttgtcacaggaccaggaaaagattaggctcacagacactttgaagggtggggaggatggagtttgttgggagaaaaggaaaaaggaaaaataacacagcaaagtgagatggggtcctgctaacaggctcttcacctcacctgttgaatcccaggttaccacccaggaacaggagaggccaggctcctttccccctgcaaacagcaggaacttcccaaggtttcaccccatcctgccagtcagtgcgccggctggttggagattctctggggagcccttttttacttggctgtctccgaaccttaatacttgcctgacatgctgccagatttcttgaaagacacgctgcaaacttaagttttttatttgttgacatagggtttagaaggaagtataaaacacaaagagtgatggaggggacagaacaatggagaaccactttgaacctagacatggagttggcaaactttttctgtgaaggaccagctagtaaatatttacatgatttctgtagcaactactcaaccctacctttatagcatgaaagtagccgtagccaatacataaatgattggtccctgctgggattcaatgtaactattcacaaaagtagggagtaggcagatttgttctgagggtggcggtttttgctccgtctggactgttttcccagatttctttgcattagcgtatttactacttctcctgttagcaagtcttgactgaatccgcaaataaataacataagattcttttccagttttactctttcttttcctataatgtttacaatagaatagtgcatgaataattttgattccaccactacctccatttgcatcacactatttcatttttcttattattctcagtgtaatagaatgcatcacagaatgatcaccttgagattgtcaaggtgtcactatttctaaaaattcaaagtacgaaaggggtctttaaggaaaggcacctgggataagaggcacatagttacttaaggaacaaggggagctaataaacatcctatgtataggtaaataaagtgagtaaagtacaatattacttttacttttcaagaatcaaacagcttacttgaaataaaataaagggcaaaatgtctctaaatgtggaaaataagtatctggaaactaaataatttaattctaatttacaaaaagaaatactgtgatacagaaaagcactaaaaatacctagtgattgatagaaaaagcagaatacattaaacatcaaaataaattatgtggcagtattgtgatgattcatcagggcaaacaagtggatacaggtttctgagttttaatcaaggaattcaattttgttcaaccatatcttttgagacaacaataaagctaaagtggggcaggttcatttcagatgagaaaatatttaaatgaatcatttaagaaatgattaatattattatatatcagtgaaaattatttctgaaacttttagtaggatacatcttttgaatatgtgcatatatttgggagattctgaactgaatcaaggtaatagttttcccttttccttgattacttactctagaaataagaatactaccggaaaacatttgccctatatctaatgtaatttgccatacctcaattttagattgtatttattcttttaaaatttttactttattcttattttaaaatttattttattttattttttatttttttcaagatgggctctcactctgtcttctcggctggagtgtaatggcccaattatgactcactgtagcctctacctcctgggctcaaggggtgttaccatctcagcctcccaattggctcagactacaggtatgcactaccgtgcccagcccagctgattttccgggtttttttgtttgtttgtttgtttgtttgtttgtttttgagacggggtcttgctctgttgcctaggttggtcttgaactcctgcactcaactgatcctcctacctcagcctcccaaagtgctgagattacaggcatgtgccaccacatccgactcatcttaaattgtatttattcttaaattattttctttttttctcaaggtagaatttttcctatatgctgagataaagtctgagtggaagttgctcttgtatttattcatatagctattactttaatactttaaaaatattttagatttatattaagtaatatattcaatttggtcaacatgttttatctctaagccttggcaatgtagcaatatgtttttaaaaatactatttgtaaaatgtattaaagtttccaaattaagaatgaaaacatggttttataatagcctttggtggctgttggcttctagttttcttttaaaggtataatgattcaagttcatagaattccttcaatttatatgcaaagttctccttaattgcattttcttataggagtatactatttgtttattaagtaaaaattttcaattcaggaattgcaatcctttcttattgaaaatctgtactttttcagattaagaaaaaagactcacatggttgatggtactaaatgcttcttcattaactactctctgtctgctcactactccttgcctcattactgaatcatgatcatttctcccccttagataaaagcttctctgttttatcagcatatacctctgttttcttatctttgccagttcttttctacaggcccctggggccagtccaccgcatctgctatatattaatttcccctaatttgctgctgcatgtctcattctattgggaccaatctaatcttagatttaatttttttctcagacatttcttcttccttcttatatacccagtatgtaacagcatccttggcattcctttcctgttcaggctgcttctctatcaattccctgagaatcttggaactgagaggcaggctcagaatactccttgatctgcactatcctactctccttttcctcaataacttaaggacttggtttagtcttcctcaatggctttctcttgccattgtatttagagacttagtactcatattgatgaccattgatgaccctgctctctcatggtttccacctcctaaaagctgatggtggttgtctctattaagcttcagccaatctgagcttcctatcattgtgattacactctcattacttgaacatattccatatccgagaactataactcagcatactttctgtgaaccacaacatcttactccaacttccataatgaacttctcatttatctcctcccccgagtccttctgtccttctcatatgccctcttacatcttattcattctggtttgcctgcttaaatgttcagcttgtactccagggacagccatttcaaaagtacatttgtaaccactttagaatctattgtccctttgatcttctaccaattttctttcatctttccattgccctagttattctcctgtgtcttttgtaatgggcaaacaaattctgttaacgtgggctatggacccaaatgagtgctgcctgactaactctatagcaaattcttgcagttttacagcacttgggatctagccacttttcccatctgtagttgactcattcactaatgtggtccaggatttttcctttcatggcacacatagaaactatttttatgcgactttttacctatgaatgaggccaaaatacttgccttgtttacactaatggacattgcaaatacttagtgagataatgtgtgttaaaatacagttttacatctataaggccctaatattataatcattccataggcacatctcatgctttaccacctctgtgtcttattcattctgatctctgcctgtgatatccctcctcaacttttaagacttagcttaaatactactttcttctgtgttacctctatccactcagcacctggcctgttcctgttggccttggtaaccagaaatctttatttttaataatcctgactatataagattctatgatcctggtatcccaggtagtacttagtccactgctctgtatctagttaggcagaataaatttatgaggcaccaaattaaattgaatgataaattttgcaaatttagaagtatactcctgatagcaaaggtttgagtgagtttatgggttattcacaggacttttatgaatttttcatcctttttatctatgcagctcatcagttcattattacacttcattataaagaatacactccttattacgacgataataaaatgattttttttgttacaatgaatagatttaaagtgtcattgattcctctcctcttcagtgatagtttttttatacactaagttttatacactaagaaccttatggttttagtagcataaaattgtcatcttgtaaaagagcttgattacatcagatagtcaagctcttgctagtaagacatgtttctgaacaagccctcagaaaggaaaatatattgatagatcactttaccatcacctgtttgaaagaataacttcaaactattcttgaatattgaaaaatatattttcaatattgcctttaaaaatcctgtactttgaaggataactggattaaatgccaaaacaattttcaaaacactctatacacatggctttgtcgtatttttttttgtgagagaatttatggaaatactacccatggcttactagagccacctcaatcaccgtttctttttgctttgactatgacatattgagtgtggaaaatactttgtacgtgtatatataatatatattttatgtgtgtatatatgcttatatatttatatattatatgtttatatatatgtatacatttttacatatttatatattatatatattttatatgtgtgtatatattatgtttgtgtatatatatattacagtagccctttactttttttcttttctcaacacagctgaaggatataaacatttactttaataataatagctttctaaagcattaatatctcattgcagtgggaaaaggccaagaatcttagaagcagaatcttagagacttggaggggaattgttggaaaaaggtacctaaggtttataaatatgtcctcctaggaagttttgcctctttccacaaatttccatggggaaccttaagttataaatttgatttcttctcaggcatttgatagaatctgacccagtaattctaagtctacatatttgccctttggataacatcggtttcaaaaatagagagctctatatttgctttcttcatatatttagaacaacagttctctcaggaattttgattataaatagtataaatagataaatgggaagctgtaatcagccagttattggttacctaacatattaggatatttatgacatatgtagaaatgtaagttttactgatttctggaaatatatagatttctatgtatgtcagggaacattagaaggagtgtagctcccatgtagttcagttctgacatctttacaatatctctcacagattgatttttatttatgaccatcttgaactattgatgagacattatgtacttcaaagtccattattttttggggcaattcatattgttagaaaatccttccctaaatccgtaaattgacatttggccaaatagaactaatgtcaatttcatgtgaatagctgtacttaagatttgtaacttaagccattctatagtgtagttaccagaccttttgtcatcccgtctccttccctgattctcttgtcattgtcccaattacaaatgtacttcttagaagtgaactcaatcatgtagcacagagtatgagcatgaccataatgtgagcattactttatatgctataattcaggcttgaattaacatgtaggcagccagatcaagcattggcttgttgaatttttgattaattagaggcatcaatctttcataatatgtactgttttagagttagtctacctaacacaggatattttgttgtttttatgttttacataggttttcctcaaatttcttaacaagagtttggacagtgatatctttatttccaaaatccatgtattatacatatgttaggatatttgtcaaatatacttttgatttcaaacattaaactgtccatatatctgagcaccaaaataagttgataaatatattttgcaagtacatttaagtctgagatctgaaacaaagtgtaagaagttatttatgggggaaaaatctaaatatcacacatatttagtcaatcaaattgtgcaaattattttcccaaatttgaactaaccataagttagtgggcagtaaagcgattatagggaaatcagttcatttctctgggcctcagtttctttatttatataatcatatgattggacacaaaatttatatattaatgaaatacttgcaacatatatttagtcatatatatggaattctaacaaaaatgatgtttctggttgatgagccattttgaagcatgagaatgaaaggaaagaagtgggttttattgacagcaacaaaaagattggcaagaagtcacagatatagcctgagagaaaggaacagacacactgtgtttcttccaaacacagaaacacacatcaatttaaaatacaagcattagaactaaagtccatagcttggactttgggtagaagcatatggctagaaagtcctttataatctcaaggagctctaagttttagaaaaacaattatcatacaagaaagattacatcatccatttagtaatgaaaagaagactagttcattacattattgttcatgggatatttgaacactattaaaagataaaaagaaagcagagaatatactggaaagaaatacatccattaccattatgtttagttttcttatgagtttatgaggaaaatctttaaatattagtaaagaaaattgacaaaagacatgaagagaaataattcacatatcaagaaatacaaattctcttaaggaataaaaatggtattgatttaccaaaattttaacctcatttgtaatcaaataaatgtcaataacaaaagtaaaatatttaactgccaaaatattaacaagtatctctctcatttgtaagaatataaagtgatttttatctcttatttcatattattctgaatttttaatttttaaaaacaactgcattactttatagctgaaatcgacaccaaacataatttagctccaggcttcctgaaagccaggccaatgtgaagcactcagcagtatgtataatgtaggctgaggcacctgtaacaaaagacagattaagaagggaaaaacatgctaatttatttaatataaattttacacaacaagggaggctttggaaatgaaaacacaaggaaacaagtaaacttgtgtactttcatgcttaggtttgatgaagaagtggatagttgtgaattatgattggacaaagagagtatgatctaatgataataaactggtggaatttagcaaattctgttgattcagattctcctttgtgtctctgtgtctccagagtattctgcatagtattctttgacactgtatttaaaaatctatatagcttggtgttgatggtagaatactttcaatttgtttgttaatcaaataatactttccagatatttcagatgcctttaatattttgacacacaaagggagaaatgtctgatgggggactttgtacgtgattttcttggagtgtagagacgattaattcaaagataaagcattgggaaaaagctggaaaatgggaaaattctccgatttggaaaaagctaaagaaaattagagaacatcatgacttgttcactctttgttcattttttgttctttataaattattctagtaagtttattaatcaatacattgactacttgactccaaaatattacggagtctgttgaaagtcattctgcaactcagggaaattatgtaactgccctcaaggttactagttcttagacttctatcatagatagcaagagaaatctaggaaatcattcacaaatcacatatcacatccagatggcttgaaattttgtagctctagtaataatagatttaattagtaataatagatttaataatagacagtgactataaacaagacaagagccatcataggtttttttaaatgaatccacagtaagttgaggagtgaaccttattacaatattgtactatgttattgtagcattgatctctttgttactaagttattgaatctttggagtttaagaaatatggcagattgaaagtcactgaacattccagaaatttggaagtctcaagacctcctcaaggatgtgattctgtaccagggacaattttaatatcagctttagaacttctggtccagaccccagctggcttaatagctgatgtacaccagagaacatgtattttgcaagtaactggttcccttgagtgtggcagtaactactcggtgtttcctgttgcctacataatagagttcatcctttttatcctgctatttaatgtactttgatatggtgtaacaaaaatacccttccaatcccccaaagaaagaaaatgacatgaaggaaaaagaaaaaaggaataaaatagagaagtaaagaaaagaaggaaaaaggtaggagagaggaagaaatggtaggggaagaaactgagggagtagagtaagagatttattttttgtgtgtgtttagctctggcagttattactggtgtgatatttggtgaaacattaaatatccctgggcttcagtttcctcagagtaaaactggaggattctatttgataaactttaacatagctttcaggtcttttgattttgatcccatgacaatgtttgaatctcctttcccgctctattttttcatgtgttctatacttcagccagatccctttacttaacagtctctaaatcattcttcatcctgtttagattaatcgttgcacagtcttctcaaactccttatcctgcggaaattctacttaatctttatgtttgagctcagtcgtcattccatagcctccttgatttctgatgtggacttaatctttatgtttgagctcaattgtcattccgtagcctccttgatttctgatgtggaaattagtttctcttccctatgagatgctatatagtactccttgctttatatctctcttatagctcttaacattctattatcaattattatttgtatttaatatctttgaagacaggggccgtatggttatcattcttatgcctttcatagctactagcagtcatttattatattaggcagtcaataaattggttgaataaaactagactaattatgtggaatttattttgagatatttgtttctgttgtcttatggaaaattaaccatacaaaagccaccattcatgaagacagcatggaatggtagaaaaaaagtaaaaggtaaaatctggatttgcaccccatttttaaatttaattattttgtgaacctgaacaaattactaacttttctgagagcccattatttatctctgaggggggggggggtgccaaatacctcccacttttgttttttaagaaaggtgaaataatatatttaatgtgactggccagaagatgtgcctgccaaagtcagtttccttttcatcactcttttagtgaaagttagagactttattttgtgctacttattttatattatttcactttcctatggagacactttggatatccaacgttaaggtatattcacacctattcgagggtaaaacagtattcactagtactaaaactaatagccaatactttctcccaataaatggctttcttttcattatggctttaaatatttgtattaacttaaaatcatgctatgtatatatttaatacctttctattaatcaattcacaaaacatggaggacatgtttcttatgaaagtgacacaaaggctaaaatagtattttcaataacatacatagaagcagagcatatgggtatctaagagaagcatacggatctccatatgttaaacactttcttcaagaaacatggctatagtattgataatcagcatagtatggttccttgatttaattaaagattagagtcctttatgtagcaatagtaaaaaccctaataacactttaagaataacttacccagtggttctcaagcttggctgcatatgaaaatcatgggggaactttaaaagataataatgcctgaggtttcacccaaatacatcgctgtttaattgctctgtgcttgcagtgtatgaaatttttgtgttttttttttcattttttaaaaagttctccagcatgtagccaggcttgagaaatattgctctcaaaataccaaataaggcactgctttcaagttcctccagaactgcttgacactatgacattttattttcctaaaaaggtggcaatgatacatacaaagatatgtttgctcaatgcttaagtcagtcttaggcatcaaaaattgaagtgccttcaagcaaaaactaaataatgcaaagtctgtttttattggagagcaagttagggggattctatctcaatgtgtttattgctttcttgtgttttaaaaaaaacccaacaacgacagtattacatttctaaagtacaccaaaatgggttaagggagtagtgaagcattgagaatactatctgaatgttgtccatagaaatattccaccatttaatagtctcagtctctacaagtaatcaaaattcaaaccatgtgattaatggcaatacaataaaatggcagttttattttttcagtaactttgcatctttcagttactataaaaatgcagttttctgtagcatgatagttctaaaaaaaatcctttcttctaaggatattgcttgtgaaaatgatgtattgactctctacatattaaagttttcaaaatggaattccctccctacatttcagtgatctccaatagataatgttattattcaactgtatcctgctattaagatcagaataagaaatagcagcttcagatttcccatcctttttttttgtttctgttccgttcccagtagtttctttttttcattcatcttcagatttatccatccctggcaatttcaagctagaggaaacaaattaagaaaaaaattaattgactttatttgctttaatgctgccagcctatattatctgctttcttaaatgagtttggaattgccagctttgagggtattacactacattttgggttgctgccagcatatcctgaacaaatatatttatatcaaagctaagctgcttaaatattcatgttatgctcttattacggtttagagaaatgtgaaaccatttaagatttgcagacgtgttacatggccaaaaaatgtgcttgaactgtcagaaatatactttaaattgatagcgctaacctagtttaataaggaaaagtttccaccgtcttattagtagtgatacatttaaattcttaacttttttgtgatttttcagtcactagggcaatatgaatgtaaccttttcttgaaatgtcaattggaaatgaccccaggatgtaacgttatgaagtatgtagactatcagatttcatgtgctttatgtctgtaccgtgattttgtaagcacccttttatcacatatacaatatattttgttatattatttttaacgcctacttcattggcatgtttcttcaaaatgtagaattgctaaattctatataaaacatgctcttaatttccagtgacagactttgaggattcccaattgtttgaacaaagcataagatataaaaaagggaataacccagaaaagcccaacaccaataaccgttacacgaaacaaaggaagtaaagaaggagaagctgaattcacaccctttgaagaagggggacaattgagttattcctaccgtagactgaaggaagaaggccgattttcctgttgcctcctctctttcctgttttctttttcttcctccttagttttctttgattggtatcatcatcaactgaccatttggagcatctgattttgtataaaacaagtttgttctttttactttccgtcaagacaaataaactattcagaatgtttaaattccagaattccaaaagctctttgtttataatcatagattctagtgatactagaatgatctatgatttatggcatggagcattttcaaagcagtctgagcaattcaatataaatttatgagataccagtgagaattgccactgtttcactcctgcccctcccatgagtatagacaaacatgctagaccttcccgtcaggggaagaacccattaagccagttcagcggtctcaagtcacaggtgctgttttatgcccttcagttaaatgctcagatttcaacataggagattaactggttatagcaataggtccagccatgagactgcttgtcctatactgagattttttttatttctaaaactaaacctttggtcagtccaaaccattagcttttactgaattctgctctatatgttgtagtgtttgagaaaagttccaatagctttctctgtgggaaaccataaagttgttttttgcttcagtgaggcataaatcttactggggagagcctgcgaggattacatgagcattggtttcagtgctctgctaagagaaggaacttaagcttattggtataagcctggtagattttcaagattttcagacattttccatgaacatttacaaaattcacatacccaagtattcacaaattttgtatgcagcaatgtattacctttaacagtgttgtttctttaatgttttaaaaaacataatcctgaattttaccagcagtttgaaataatttttaagactcaataatttataaaatcttctacattttacctactggatttggttataacaggacgaaaactattattttggggagtctgtatgtataagggtagtgggtcatggggattagtgggcatggcaggctgaggcagggaaaggaaactgactttctggctaagtggactaatttgtttttgctacagcattttgtgcatataaaagagaagaaattaaaagtgggtaatgtgttttgaaatgttggttctatttttttcttatgagtttagcaatatgttgtatattgagtctcctctctccaagcaaaatgccataattcaaaacaatgcttcttaagtgactagagtgggaagagggaaaaattcttctaaggatattggggttgggagtgggatgataacctttttaaacttattttctagtttcctcaattctttgctgaattgttcctatcaccctgcttctagaatgccatggagcaggctacattattaatagtgttataggagccatgccttaaaatcattagacctaggttagaaatatacttcccaagttaatttaaaaaaaaaagtgactatttcggggagtccttataaattgagtgtccagtaatttttctgtatttttatttagtggtacatttacttgggtaatataggtagataacggtttgatttgggaaacatcatatgaacatgacataaaaccagattaatgttgagtctctatttaaatatgttacagatttagtaatcaggtttagtaggagagaaaataacggtatttatgactcaatgagataacttgttttatggctgaatgggatctgattgtactatagtatctccgatggtagatgtcatcagaaccagaattacatttccataagcacaagttctgcttattatataattgaattaaacagctagtagtttttccagaattgagaggtaaaaactcaaaaagctaacatggcatgtttgattcatgaacttgatctggaacacaaaaagcttctaataatgggcaggtcttgggggtcctggttacctttaagttgttggacattagcaggaattgggacagatttttttttttttttaaaaaaagagaaggatgctgaaaggcatatgtgcatgtaagaaaactctaatggaaaacttcactaacattataattttggtgacatatggccttgaaataataagaaaaaatattatgaagtcctaggacccagaaattaggtctgaaatgcttaagtgaaatgcagaattaggtactcacacattttcaatttgaggaggaatattttccttgggatgatttacattcaatgttgcttggctgaatattgtttatctaggaagctacttggaggtagggagtgaggagaggagggccatggtgtccactagtgagagttgtcctgaaaatcaaattctgaaaaggagagtagtaatttagtaaaacaaccagtaattatctgaaataaacattttctatatccattgtacctacaaaataatacatggcacataagtaaatgctcaaaaagttttgttgaaagaattaaaataacattattcaactgaacttcaaatgtgtatttggtatatgtgcaggtatgcttttgtgtgtgaatacaagcttaatttggaaaaaaaaaccatagagtttaaaaaagaatgtaagctatgttctttagttcctattttatacatcttggattattgcattaagacttttcatttgtagctgtgtgcatttttatctaaatattaagagttttaaatattttcagacttattttagttaggcaagaaaaagtatgattttcctagatagagtcatatcaagacaagcaatactagaggacaaatctagagtacagataattatttctggattctttgggaggctgcctaaacagagtgaagttagttgctcaacttaagtatgccatagcaaaaagtcttattttgtttagttgaatcattggattgattcctaaacaattctaaaaggaacaccatggccttttgcatatatgcttatgcttaggcaaagctatgactataagtaaaaatgacatgcttgttaagctgcagatatgtaactgtcagtaatcaagccattgcataggaatttatgaacaaattcagtgtgtctgtttttccctgtgtacataattttaatatcaacatcaatattataaactaggtaattgtaagagggtatggtaaacttggtgaggaataagcatatgttgataaatttgcacctctcttgaggtcacttattgattacaaagcttgttatctttcatgtgcatttagtggtgtaattgcttttgaaaattatgacaggatgataccaaatgcaaattaatagtatggcacttgacatacctgagatttcagcaattttttttcacatccgtatgtaatctttattggccaagatagtctatccacattttgttctgatggaatatttaatttttttcatggctaaacctgctttaattatcattttgactttttcacttctaaaaataaatgttcatttttgctctctaaatataatctatagcctattgaaattatacttatttgctaaaagctgtagtgggtcctttcatcttcttttattgaatttaggattttaactacattaaaatttacagttttggtgcttcacagtttacttctttgaattttctttcaaacaaggttgacctggaattagaaattacaagtagccatgcttgattaaacagtcactccctagatgccacagaatcctgtggctactactctgaaagcaaaggtaaggatcattcaatgtgtcaggaaaatattttacagtagatttaaaaccattaaatctttccataataattttatttaaaatgataaaatattatatttagacttggaaagtaaattactttaaaaagcagaaagcaaaagcacttaagccatcatttttaaagacttgttgaaaaataagtattctcatgaaaacacactgtgcatatttgaaaaatattatgagatagatttgtgttctgtaagtagtagatagtttattattgctatgatgctggattaaaatatttttgttgcatattatatatattttttccttctgagaagggatcttttttttttaaaggacatttccagaaaaatcctcacattaaaaaagtattatccatattattattttaagaattttatgcaactgacttatttcatcacaatatgtttgtgaaaagccatgaaccaatctctttttgaccagtttgttagatatttctttgatgggaatacacattcttttaatttagtgctccaaatatttttcaaattttggtatacagaaattaatcagattcccatggcctgcttagataaactgaaggagtctggctgctggcccagggctggggctgtcccagcctcctgcagtgcagcctccaatggtgcactgattgagaggctttgatgtaactgacattcactgactcagtctgtgttctaggcactgcagatacaaaactccatctggggtcaggatcttttccatattatctgcctggcacaaaagagtgctggcaaacccagtccacctctgctagacaatcgtatctggtactaggacggcagcctcttcagcaagaagggggtacattggccaattcctatgaattgggctcctcgtgaagaactcatttatccacatggagtaggtattaccatgtcaaatttttctcaaaacataggacctctcatttcatgaggccaaagatttcttgattttaaactgacttttaatccatgagaatatggcttgtattaatttaaaaagtaaaagtgttcaaactgtgattgaatcttttttgtgattatgaccgcaaatttctgtgacttcaatattttcagaaaccacaaaaatttgatgcatccaaatttttgttttgaaaaaagttggagtaataatgggggaaaaattctctgctgctttctgcttctgtgttatttaggcgctaaagctaaggtccccagaacaccattttttttttttaatgtggttttcttgaccagaagcagaaagtgtcagctcacatgtaatgaaaactatccatgcatgatttctagcctaatttggcagattccaaaggtcctttgaaagacagctgacatttctgatgattacctaaattgaattgaacctttgaatgttgtcattttaaaacatgttagactcagtccaaagacaaaaaagagtaatagccatatattacaatttctgatgtgaagaaaccatttagtcttccatttataaggcacaaatatatttgccatgcatcttaaggaaatccatcataatatactcttactgagattgctttcccagtctttgttagcatattcacagtatagttctagtcatagacagaagctacgcatttttttagaaggtacagcttacttggaaatggtagtggtgattcttcctagaggttgaccttaactatgcaaacaaactaacaaataaatgaacaaagaaaaaaaaccctcaactttataggaagttctaggttaacattttttcaacaatattggaccattcatggtggctaacgaatgagtaccgaaatataaaggctcactctagagtgtcctcatgcatacctcattttattgtactctgctctggaccatagaaattacacatctcttgctttttttttttttagacagagttcgactcttgttgcccaggctggagtgcaatggcactctgcctcccgggttcaagcgattctcctgcctcagcttctcaagtagctgggattacaggcgcccaccaccacgcccagctaattttttgtatttgcagtagagacagggtttcaccactttggtcaggctggtctcgaacttccaatcttaggtggtctgcccacctcggcctctcgatgtgctgggattataggcatgagccaccgtgcccggccgcacatctgttgctcttatccacaacttccaaattctgcctctgcttctcctgttactcccttttttctctccccagtgtctagttgtgccacgacagtgtcaaagccacagttgagtatcacctcccttgtgaaaacttttctggcttttccccagcttttcactcctcaaatctctcaagcagtgtgtcattgtattttctctggggccatttaggtctgtttacacaaggacaaatgttcaaaggagaaaaagtatccctctagagtaacttttataaatctaagagtcagtgtaccacattctgataaaattatatagatactaggtgttatttctgaattgggaagtttgtttcttcttaaatagatgagtagaccttaaaataaacttgtattggtaatgtaacacaagttgaaaatctaatttgtggcaacatgcattcttatcattaacaggaactgttgcaaattggctagaatagtcctttgcagtttggattacttttctattatagtaagagtgatacagcacattaacactttggcttattttgaatagatagatatttgcaacctcatcctggagaaatttgcattcaatctttgaacagtagggggttatctccatatagagaatcttcaattttcactatgcatttccttaattttctctggaaggacacctgcaagaattaaacatgggctctctaacatcaaattttgtgtccttagaagcctgagggaaagcagaggacattcacaatcagtcattttttttctttgatgaaaagtcatctgtcttttaaattttggtttaataacaaattgactccttataatgaaatttatgtaggtggtcattttgtgatgaaagttagaggtaaaatataagtattttaacagcatacttttagtatcaatgtgtctgttattatcgtagacatcaccaattagaaaggaagataacaggatgatacactgtggagataaagtgataattcttttaatattctttaattaaaacagaagagtcaactaatttcctagttgctaaatactggagatgaaaccatgtggacatttacaaatgttgcttctgggtgcacatgttagttttcttttgctgatataacaattactgcaacttaatggtttaaaacaacacaaatttatcttgctgttctgtaggtcagaagttgggtacaggtctcacaggggtaaaattaaggtataatcaggactgcattcctttgagagactcttggggagataatgttttctgcttattctagttgttagtggcattctgttcatcgtggttgtagtattgatatcctagttacttgttgtttgcagctaaaggttgttccaaggttctagatgccaccacattccttaccttatggcccacttcctctatcttcaaaaccaatagtggccagtctagttctcgcattgcatttctctgattcagccaggaaaagttcttcactcttaaggattcatttgattagatggaactgtccagataatccatgatggtttccacattttcaggcttaactcttgatcacatctgcaatattccttttattatgtaaggtaacatattcacaggttccagggattaagacgtgaacatatttgggaggccatttttctgcctaccccaggctgaaaaaactgagtttaacataagctctccattaccagcactcattagggattttcaggaaaatatcagttgggttaaattgggataaagaaaagaactgagaaaaactttgttttatacgtcctaaagcccaattcttgccacttctaatagttattctacaaaaccagcatgttggagtgttatattccctgacattcctagctattcttaagacatacgaagctgagaattgattcacaaggctgcctggttttcaatctcagttctgatttacctagtttcgtatactttaatgtgatcttggggaatttatgtaacctatctgtgcttaattttgctcaagtgaaatagagacactaatatacctctttcagggtgttaaatgttaatatgttaatgtgttgtttggttagaattattagggcctaacactgtataagagttatatatgattatggtagaactatacattgctactgactgcgccggtgtccctcaatacatatttttctgatatagcaatgtgctccatctgaacatagacccaagcagtttttaaaaattgatgactgaccatggggagtgttataagaaatggttattttaaagttgacagcatattttctgtttctcaggagaaggttgaattcacttaatagggcagaatgtccctttggttttggagaaaatgtcactgagctttttctttcagcaaaaatagagtcaagatactactctaaaaaagaccaggaagatttgggggacacaatttctctgttttatagtataaaatgttatttttcttaaaaaaattataggtacaaggacatcttaaaaattagatttcctattagtatcattacacacactgatctgcttttatctgtgctcctgggagttaaagtcaggcctgtgcctgtgtttgtagcaaatttttagagaatgtagcccaagtaaactgcgaatgaagaaatgagagatggtgtgcagaaaagcagggctgctgtccaagggaactggtaacattcagccctgattgctcatcccacatgagataaacagataaacatcccacatggaatcctgaaactgggtcgagggtggggtttagtgaaaggagggaatggatttagatgactgctgagtaggtctgctaggaaagaatacttccatcaaattggaacatctgagttatgctgagaaaaatctttcttatgtaaggaagagatataatgttgaagattcttgtgtttaaaaagcctatatatatttttattgatgcattaaaacaccataaatcaatggttagccatcttaaagatttcagacacttatctttttgacaaatcatctatcaaagtgttttgcttgaaatttgaattaagtggagcaatatgacaaattattttaaacaatattctgctaacattatataatagcatagagacattttacaggcagtgttttagagacagtatccatagtctgcaagacacacaaaaagtatgagttaaaaaaagaaactgtagtctatacctaaatatctttgaataatatttgtttagcacaatattacttaataaatgccttatgattgcaatggttgttattatttctttagagaaatctatggtgaaaaaagtaattttggttttctaatcaagagagttattgactgtcttgatgctagacataatggttggaatgaaaggaactgaaataggaagaatataaattgtatttttattccaatgtgtattttattaacacattgcttgtctttacatcaaactagataactcagttggattgtggcaacatactgcctggtcttttggggaagttcttaaaatcaattttaataaaacgatttaaaatgccataattctttctcagtaaaccactttatgtacacctgtttcctggcagacacctccaagacgttgcctctatccaaggatgactccagggctctaatatctatcacacaggtagaatcagatcattgacacaaggcaaagagactccaacatgcatggaaagtagtatttcccaagatcaattttgaggagcactagtgaacatcgtattggtaattaaaaaaaaaaaaatttcactttgtgtgatggttaatactgagtgtcaactttattggattaaaggatgcaaagtattgttcctgggtatgtctgcgagggtggattataatatattatagatttttccttactgcaagaattccctggtccttcaatgcatagtgtgactagtaaatctccaaaagaaaaaatatataagatacataacctttcctcgaattacttgattacaataccctctatttttgctgcatattgtttttattacttgaaactcacttacatgaagtgtgtatgaataagaataaccaaagagcacatgtggaacagagcagcagcacaggtttcgaagctagcaatcaaggcaactagcaaaacgcagaatatctggaagattagatatcctacacaagctcagcctaaggagagggtccatggctttggcaatgatagcattcagttagtgatgtacagcagaggtgcatgaagcaggttgaagaaagtatgattaataaaactactttctacttcatattttaggcattttttatagtccctcctgagcaggagccaattgcagtggtggaggcataaactttgcctgtcattataagtcactgcattgtgcttcattataatttttaccttttctttttctttcttttttttttttttttttttttttttttttttttttttgagacagagtctcactctgtcgccaggctggagtgcagtggcaccatctcggctcgctgcaagctccgcctctcgggttcacgccattctcccgcctcagcctcccgaatagctgggactacaggcactcgccaccatgcctggctaattttgtttttgtatttttagtagagacagggtttcaccgtgttagccaggatggcctcaatctcctgacctcgtgatctgcccgcctcagcctcccaaagtgctgggaatacaggcgtgagccaccgtgcccggccccaaacattcttataaaaaagactttgtggtggatttttcgaggaagaacagcataggccttttaaagggcttatacctggcagagactaagtatatgggggaattgaattagattaatattctttctaagtcaatcttgataacaggactcctgagctcttccttcactattttatcatctgcaccactccctttaatagttccaaaaaatgcaatatggctaacaggataatatctgaaagcgaaggatcttgactttccttggataattttttttgcctgctgactcttaatttttatttatttttaatttatacacataacgggtacaagtatagttgtattacatgaatatatcgtgtaggagtgaagtctgagcttttagtctaaccatcacccaaataatatacattgtacccattaagtaatttctcatctcttccccctcaaaccttcccatccttccaagtctccaatttctattattccacacttgatgtccatgtatatatatcatttagctcccagttacaagtgagaacgtggtatttcaccttctgtttctgagttttttcactggagataatggcctccagtcccatccatgttgctgcaaaaaacatgttttcatttttttaaatggctgaatagtattctgttgtatgtatgttccactttcttaatccaatcacccatgatagacatttaggttaattccatatctttgttattgtggagaacttattatagaagtatgtttttagacctcagatttagagagtctcacccagtagatctgcggtgaaatccagggctctccattcttgttgagctgcctagatgatctgaagttaaaaggcccaggtaccacactgacaagactctcctaaaacctttgcagttgcaaaaatattactcttctagctgagacacatcaagcgggacaccgatgttatttatttaaatcaaggcaatccacatataatgagattccagtcaggtcaagtacttagcagcatttctgagaaagaaaattatctttaatttggagaataagattaagttaattcaagtcttatgggggttgagtgctgttttgactagagggaggcaatgtctaaaagcatgaggtaagattgtcttcccacatgagctgaaaaacaagaacaagaacaacaatcaatcaaagacagttttatttaagtcttggcctccagtcaatgttgttgtcattgacactctaggctgatatggttcacacttattcagttgtttccaaaatatttccttctgtcattgccagtgttgtggcaacgtcaaagtgtttctttctgggtcatggtctcttcaccttgaaactccttaaacttcattcttccactgaaactaaaattatgtgttaatttaattttattcacctccaagaagcacagttatagtttatgaatgcatgagatttgatataatattcattaatataattctattttattttttattatatataaataaaaagctaatatgtaatttgtgacattttcataacttgattaatattgttatattactattgtcaggaacatttcaatgagctgaacagccttacgaatgaccaacactcaataggagattccttgtagcatatatttacttcacaattagtagtcagttgctgtgtaaataaaactatttttgcattagtgaaaacatatttgttagctacttcgaaatattaacaacaaagctggcactctttaaaaggctgcttttttctaaaaaaaaaaaaaagctttttctgtgttcacatttgtcatgtagcatatatcgtctttcattcattcttttttcaggatataaataactttctccagatgtcaacctttatggagaggaaaagaggcatcagcaatttcaggcaaccacaaaagctctgatgtattttgaaggagtttgtgtgctttcaagagttttagcaggaaactcctgcagatgatgaaggttgaaatctagaaatgtttgttgttgtctatataaagtatggaattataaacatttactttgtgactgatgagacttaaaggatggatgaattttaaaggtgttcatttattgcttttaaataacttgtaaaaataattttctttcttctgagatttgatctaagcacccgctaatatacatgatagtagctgtcttagatgacacaagaaaatgaaatgtctattcattcatttttggtttggccaatctcataccacaagacatattttatacccttttccagcaacagaagtatgtttttattgtataatttaaagccattttctttgtaaaattttaaaccagttggaaatttgttgaaattgaataatttctggaccagagaaagcactatgaatggggactacatataaataatttaaaagtgaataagagaaaaagccaagaattcatttgcatttttgaataaagccaaactttcatttaattatacagtagtaggctttaaaacatatatttttagtcaagtctgtaaaactgccagatgctaaagtaacatagataagccaattaggaatagtttcattaatataatcagagattttataaaagatacaaagctttcaaggtttggatctgagacaaagtttccagagcctctatgtagcctggtaaaaatgcacaatgattcaaatgcaagcttaaggtaagctaaagtctttcattcttatttttaatagcaaacccagagctcgaccttccattattcaatattgctgttactgctatagtgggaagaaaagagggcaaaaatttgtgttagaacacttacagggaaatattttttacactccgagtgattatattttaagatgtctatctactctattcccaccttcttgtattattcaagttcagcaatacagtgaaacatctacatacaaacttatgctacacttcagttcacatgatgaatacacatatagaacctctataatgaaaagcaatctagattttatttcatttataaatacccagtgtgggctgctttcatagtccttccttatttttttttttttgaggtttcattttttgcatgcccacgatatatttttttttttaatctggcaaggatgtaggagtgtctctcagggcacgagaagagagccacttcaagtctgccagcactctacccaacagacctatccatcattaaggagatcccagaaagtaggagctatggaactgcctcaggcagagctaatgtgagatagaggaagaaatcacatccagccagatgtcttttgccaagggactgcccagtgggaaggacccacagagcctcttaggaacttgcatgtgtcccacaccagctacacagaggggatcaggtcccaggtagtggtagccaaaaaatcattaaccacccacagaaagaactataacagcaatgaggtaagtggagagggctcatcagttcagttttacttttcattctttcactaatgcttatcttcacatgaaaacattcagttttttaaagagtttatactaggggactagagcagatagaaatctaagtttcaattccagttagctggcatgtctttttatagtatgttttcactttggcatggaccaaaagctttagcagttatccataggaattacaatggaaattccaggcagattttagttaggttaaaaaaaaaaagttgaaaatgttgttctaggccaaggacttgtaaaatgtggatggttgcctcttgtagtttttagtttgcttttgaagtgcttttgaaatagttacaagaaccattcctctttgaaacgggtacgatataggtcacattttcctgtacaactggccttactggatcctagtataacttaacaagatataggagtttttcttaagccatgataatccagtaaaccacagaatgaagtaatagtttacttaaaatctaatcaagagagaaaacttcaatatatgttataaggttcctcatgataataacaccatgtcttcctatgtactccttccttctacctgccctctcccacttgtcgtaccaacacatatcacttatattcattttgttggacaacagtgaatgcagacccaaaggttgaaaaatgagtatcccagaatactgcttcagttctagtgaagacattgggacagcatccaccagaaatattaaaaaagagtttgggtggtcatctttcagaaaggttgaagggaagattctcagcctgaatgaggagttcactatgtattctttaatatccaccaactagaaaattgtgtggttacaaacccacaatagagaaaacaaggtggtttgttcaaaaatatcagagctaatatttttagagtaactgatctggatcaatgatctaaactattttcacacgtaagatactatttattgtaaaattaaaacatgcaaatgaaaaaaaggaaaaactgttactggcatgcaagagaagacagctacctttcccacactccttaatacaagacccatgctagtgaaaggaaattatttaaaatagacaatatgatttcttttcttctttcttctagaaaatgttaacccactgggcccgtttaaattaatatactgtccaaatagaatttctgttattcctgatgatgaaatgatatcattgatatctaatatttacttgttttctaatgtttaaaatcaatgagttaaacatttgtaaaggcagtttaatttacctgtataaatttagtacatggtgggatataaaactctaactggcctcattcttctccagtcaatgttttaacccttgctgtattgagtattcccttttcttcgtttaataatatcctgaacagattctataactttacagtcactttaattcctaaaagccatccagtttaatatctcacttctattttatcctgtgccatccctgaattgcaggcctgagggaagtggggcgtgatttcatgaagtgatacagatgttggggatttaatcttcatctaaatagtcctctttctttctcttcaagacttgggtcctctctgttgtggaaaagcaagaggtgagggcaggagccctctccacttatgtcatagcttttttagttctttctgttgttggtcaatgattttttggcttctactacctgggagctgattccctctatgtatctggtgtggggcacatacaagttcttaagtggctctgtggggccttcctattggacagtcccttgacaaaagacaactggctggatgtgaaacttccttcaacctttctgaaagatgaccacccaaactcttttcaaatatttccagtgaattttgtcccagtggcttcaccggaactgaagcagtactctggactacccacgttagcagctccacaacccctagtttctgggatctccttaatggtggatagcttttggtagagttctagctgacttgagttggctttctttcactttccctgagagacactcttatattcttgccatggcaattggtgagagggcaagcttctttattgtggcctctgttgcttcagtatgacatctctttccaatttctttgctcagttatgtagtgggagaatcagtaagtttgttgccaaagcagatctccaaatgagaagcgaaatgcctgtctcctcttctgagcgaatccttcaatgtgataatttttctttcttttttcagaagccttctcactaggctgattctgaaaactctctctcttccttcctagctctctccttttatatcctggggatgggggaagagtagggtgatggttcaagccctgcaggaggatcattatactcagactttgtgagtctttgtcctcagtctgtaagctgccaccaatttcttagaaacaggaaatgccctattcactaccctctgacacattgatattataatcaatgctagaaatcatcaatgcaagaaaaatgtagagaaaacaatccatcaaatttttagctaacttttcacaacgaaatagcaaatattctacatggaatgtatacatttgaaaacatttagtggactgcatgatctatagtacaaccatgatgttataaataccagtatgcatttgaggacaagtattaagttgaatataataactcaaatataaatattcttaccttttgatattctttttgtgtcattatgcaaaataataactatggttttatcagttccacattttcacttttttctcttaatgtgtaactaacattttttatttgcatacacatcagaaagagtcctggacttgacatcagaaaatccacattcaaatctaggctcttttcagtgactgcactaataggtgactttggacaattcctttatattctctgaggtttatttagtagccctatctataacgctttggtagattaaacgatctctcatattatacctaatactaatactaatcctaaattttaagaaaatgctattgggtcaataatttagtgtgtttgatcaatgttcgtcacgtgccacctaatttcactatggccccaatagcctattacttcactatgattggtgtctataactttcatgcagctctgttaaaggagacctttacatgtttttgagttaattattttgactactggaatctaattatttacaggaacaatgataaacatatcttacagctaaacaccagagccatgaaaatgactttaaacatttttataaatactagttaacatgaaactgagatgctttgatttctgttacaatatttatctctttaaaattaaggttgacattgatgtttcactttcatagttatcatttgagaagtccttaaaatatgatacatttatttaaaatctttagtttcttcatctattaactggatgacttaaaaatcattaaacctttaagcatgtatatgttaacaaagcataaacatgtctgtaagttggcaataatttgagagaaatcttcccctttagtatgattctttcattaatagctcaagtttagtttattatgtatatagatgaacagaaaagaggtcaatatattaagcattcaagatgagctatatgttcaataaaagtcatggtgtccataaatttttttcttcattaaagaatgatttttttttgccataccacatttgaaatcttgtatttctcaaaagaacttgggtgtttcattgtattgctaaacatttttatggttatttaacctggattattcagttatagcatttatttgccatagagcaataatttatctaaaaaacgtgtcattacagtttatcttttatttttttcagatggcatgcttgtgattgaaggtatctgcattttttgtaaagcttctcttttgggatagctttctttttggaaatttccatgccaaaaatattgcattttcaaagatgtcctttcctttatgccttattttttgtttgaatttgttttccctgtagagatataataccgtttgggaaaaggtgctacagattaccttttgttctggtatttttcaaaatatccagagttatttattttgacctcagtatttaatgtggagtcctaagagacacatcatagatttcccatactgaatatatgcatttaaaataaatatattcaaaacatatttacagaaatacaaatgtactgtgtggttgtcttttttctttaaaatcaggaaagcctcccctcccatggcttgaaagatattacatacagcctacatactattcaaaattcatgaagtttgtgaagaccaaagtttatttttaagtgtgtgaataaacaatttccatttcaggttctttttgagtaggcacaatacataattacaattagctgatatgcagccattccttcttgtgatttaaaatcattatgcagtttgttacactgtccgctttcaaagttctttgattgctaattttaaagactgatactcatttcagaataagaaatggtatatattcagaatttggaaagcaacaaattgtatttattttcaatttttttgatttaatagaaacttcagaataatatgaagaggaaaggaaaagaggtttgaaaactaaggtcgagactatttctatatgttcatgtcttgtgtctacttggcccatttgaaggaaattctctcatttctgtatgatttcttatgttgtaagaaataatatatatattattacacctctaatagaggttcaggcagaaaaacaatgaatcctaggttttccttccttccttccttccttccttccttccttccttccttccttccttccttctttccttccttctttcctttcttccttccctccctcgctccttccttccttccttgtttatttttttaaagctccttgttttcaatttagaatatggtacactactttaaaaatgtggattaaatgatttattttagctttgaggtagtatttactcattgcttcttttaagaattttagtaatttttagatttttagaacaaatggtacccgagtttttcttatatgtttccctatttaccacatggattttgtaaacaattagagtgtcattctttattattgaacaatataaataatagtcatgtaaaaaattctgttggacttaatttaccaagctagtcttatatgctttctttggtttgacactgtgtattaggaaacacatattttttccaacaactaaaaataaattttaaattgaactaactattccaatgactaattcttatatattatttttcccacttctgagatagcttgtactttttgttccaggaccaaataataactgaatcagttggttttgctgccagttatgggactgtttttgcccatattttcaacgtactgggtgcccttaggtttgtaacacattttatttatctgctctgtcataaagtaaaacacattcatagctttgaggagtagatgtggtgatcgatcactaaatagaaggcacaaaaaatgaacagcagatgttgcttttttgtattttgtgctattttacacattgcaaattaaactcatgtaaaattttgtgggaatattggacagtgcatactctcactgttatatgatttttaaaaaacctgctgcctagttttttctaactcatcagccacatgtctcattacctagttctttttaagcctcctctcccatacactgacctaccaatgaatcccatattaatgctctcagaggaggtggttgtaaactgatttggagtgaagagacagaaaagcagtagcaaaactctcttctgttaggtcaatgtcttcacccaccccaaagaactttgataatttagtgctaaatcaggtgttactattattctatcatttaaaataattgaactgactgagtaaattataataaaatattattgagatgtatatatttaaaatttctttacagttagaaatgtcatattcatttggaactgaagattaaaacagccagggcattatttcttaaactgcacagagtatttaattgtagcttctttgaggaggatcaagatggccaaaatatagggaaaagctttaacacatatttcttacttagtattgtgttgttcattttaattataataaatgttctgaatatttatctgaccaattaaaatatttgacttatgagaagttcaggcttgaatattatactttgcatttttgctttagctttttctagtaatatacaataaaggcactattcctgtaaaatcttatttctatgataatcataatccaaggcccttatcctttatttagtattcatactaagcttatcactgttatatctaagtcagtgaaatgagattccacaggagaaaaatgggagagtggcaggctttttttttgttttttactttgttagctacgcaagtcatagcgtacaaattagatattagatatcttttaaaagtaatgtaattaatttgattacataccatagttcctttttaaaagaagctcacataataatactgttaatcacaatatctagaattatacacttgtagtaaaatttaaaatgtaaatctttacatcagtgattttttttcactcatgcaactgacagatttttcttcttcccatagtcccatccaaccaaacacttgagtgcttcattacatggatcatttgtgcttctgagataaccagaaggtgtaactcttgtgttgatcaattataggagacttcccttgaggccttagaaagagttcttgaaagaaattcttatctgctttccctgactctctctgatgactaataacatatttaaaggctaatatgtgttagaaactgacacacgtttagagaaggtgtattgtgccctagagatctgacacttttcttcactgactgaattctatcatcctcttgtgtctagtaaatttaaaaaagtcaacttggtgagcaagcacatcactgaatttatttttgacattgcaaatattgtatttgtcagagtccaccgaaatgatggataaaaatatatattaacattgtacatgaaatgtattggagaggatgtagtttaaaaggaattaggctaataaaaagttgtttagtacactctaattttcagccagtttaaaagttggatcaaatttaagaaatgtatcaattataaagagctattttttcactttaatgtctttctctttattgaaaacttgtttctgtttttttgtgtgtgtctgttttgtttctgtatctgctagacttcagtgttgcactttttgaagagctcagtgtaaactgcaactcttttttcataatcaaaaggaagaaaaataagttattcaataatcttatgtttatatatagtactattgggtagcatacgaaatgtcttaatgacataaagtttatacagcctcagaatttaaatctaaaaaaggcgatatttgtgtggctgagtggaatgtaagaagatatatcactgatacctactaaaacatacaaaaattttataggttgtacagctcaacagtagaagagtagttgaatattagaggagcattataaaggataaatacttttagatgctaggtaaatatatacaaaagagccaaggtaataccccatttgatatgcttaatctgggaaaattttgtggaaggacaaaatggatatgagtatgtcaaaaactgaaacatttcaaattttgttttgttttagtgaggcattgacaaattttaattaagaatgttgtcccatctttttcttttatttatcaaatgcacaactaatctcaggaataccatatgatgaatttagtatataactgtaaatggattcagctactgtgtgttctctagtacaatcagattgaactatttggagaacaagcagttatctatgtggctgtattgtcttcacacatcttccctatgaaatgtttcactactagagaaatatttctttctccaccaatctattatttttacttttatttttattcatttttggaggaaaagatgtgaaaaatgcacatattctcaagataagaagccagctctttaaggagagttcattggtgggaacttttcaaacggacagctagctgagaacaagttgatagagagtgtattggagtaattaaagcaaaaggctttggagtttatgagcatcataagtgtatgattttaggtttttttcccatttataaaatgtgaataattatagtacctactgtataggattgttgggaaaaactcattaaaaagcttggcacgtagaaagatttcactgaattttacctatatgataattatatttttgtagggtaaagaaggaaagaaaatgtttaacttttgaggttcattttgatggcctattaaaaatcatatgttctgcctcactggttaacccactgagatgaccacatgttaggcatgtactattccatgcacactatgttcaaccaagtgatgtcaagctaagcactatgaattaatttcttgcaatagttcaggaagagaaagcagtgggatcttgggttagcatccaaggcgcagtagcatggccaacctaaaagaacctatactattaaaatattcgagtcttaagcaatggtttaccataccagagtagcaaacaatggttaatttaaatattaattgtagagattttaaagttttgtgcatttttaaactctctatcgcctaaagtaccctaagattctacctagtttatgtttttatatatttaagaaactgtataaaataaagtaaaactagagggtctgtgaaattgtatttctttaagtgggttgcatacagtccttaagttttaaaagatacctcaagacatggaacatacacttacaggggcagttttgggtagtatgcccagaacaatgtttaagtatcactcatacctgggctctgagttaaggaaaaggggttagtatgttggtgttagggagaagagcagcaagacatcatcagaacggtaagggatattgacaggtcaatgttttatttttcagaatttgcccacaatggcccttcttgagagcttagcccaccaaacaatttgtcaaattatgtttcttatccattttgatctcccttcctctgtagctgttctttgattgggtggctacgatgaaacatgggagtcagggcagaattcaagcaagttggctacttttcagtccattctgttggcaagatgtggatcttaaccatatggtgaggcagggtacttacgttcattctagaggtttattcatatctgcctgctgcaggaaattagcactgttcacacttgtttagccttaataaaaatctttttagctgaagcacagggataaggtcaccatctgccacatagaaatgccaatatcaaatgagcaacagaagggaggtatgtttcattcttagagacttttagaaagaacttcaaatagattaagcactaattgattcccctctttactagtttagactgtaatttacatttatattgtgaattgcatcataatagcagtgaaatctgtcagtatgtcctgcttgccattcttagaaatagcactagaggtagcttttaaaaatatgaatgcctttaagctgaaacatatactgtctgtgccagacactacatgaaacttaagtttagatggctcagtgagtatctttgagtttttatgaaaaggctgatagattatggactaccaattacctttaccaaaaagtacatttttgaataagagtatataatgttaatggaatttatgattaattaatttattaacaattaggaaaagttaatgaatacaatgtttaatcctgaattttagcatgattaggtttttttgagtccttgaaaattattaggtacttcaaaaatctggttctaccaacagaattttagtttcgaaaagacaaacaaaatcttaaaataacactttattgttagatcttcgggtcctgtgtattatagtgaaggtttactttcctttgttttctatgttctacaaacaaatcataattaatgacaactagattaagaaattaaaagaatttaaaatggttataaatataaccagatgtggaaactttttataagttacattatatacaaaggaacaaacttgttcttttacttctgttttggtttttttttttttttttttttaattgagatggagtctcactcggttgcccaagctggcgtgcagtggcgcgatctcagctcactgcaacctctgcctcccgggttcatgccattctcctgactcagcctcccgagtagctgggactacaggcgcctgccaccacacctggctaatattttttttttcttttgtatttttagtaaagacggggtttcaccgtgttagccaggatggtctcgatctcctgacctcgtgatccgctcaccttggcctcccaaagtgcagtagtgttaaaaattgaggcctgagactaattttaatgaatttaacatccattttgcctcattccaccatctttacattctttggtcatatttagccttttgtatgttatttgtggcagcatacccttaattttcagacatgtattggcatttttattgaaatagattttcatgctgatggtagctacaaaaccagcagatctttttcattgagaaaatgagacacaactggcatgtggaaaacaaaccaaaaaaatgtgtagtcatgaaccagaaagttgacagcttgttctcattttattttggttttaaaaacttggttttacacaattatacaaatcagagaggaaatgtctagacatgtccaagctctcatttctgttgctacagtcactaatctcatttctttgacgtaatttttctctataacctttactttttagcagtctgtaccatttagtctaactttattagcattgatcatgagaatatcttattttaacagggctgtaagtgatatttgttagatggttatatcatttaaatattcccttctcagtgagggagaatttttttacttatattttaagattaatatgagtatggcatgttgaaaaaccagcctaatcatttattatcatggcgatttactatatatgtttataaatagtcctacataccaattaggtgataaaactttaatttgaagtctataaaacagtaatttaatttttaaaactaatattggtatttttgagttttctaaaagcttttactgattaagttattatttgtaatttcggcatggtttttcatgggctaagttcaactcttttcttgcttactggaacaataagtagattatcaatatgaatgtgcaacttatctatttaatgaattaggttttgttattggggatttgtgcataccatttgttaaaggttagtgcttacatgtctttttaacctttacctgtaaaaactgacaaatacttcactcttgcgaattaaatgtaaacatttgtcattttcaatgtttctttatcctttgaattattttattaagacaatattttaatttcctgttttaaggttttttatttgaaaagactacaaatttgataggcaaaaatcacagtatatttaatagggagaagagtgggacttgtcaactcccataaatctataaagcaactcatatatcagcagaaaattcaaataacattgttttagcctcccctaacatactgcatggtagtccaattccttccctaagatttctgcaaatttacaaaggaacatggtgagtggggaaaggttatatgctcaagttcattctatcaaagcatttctgcttattctggagaggtttctgttatggatcacttcaactcagagaggaaatcatgtctcttcatcaatgctcacaaatcgaccatttacaccagttattctcaagagcagtaaactttcctgatgatggtaggagagacaagagaggagggttatatcacatcaattcaaatgactgaaattggaagtcagtcaatcctgctattaaaatatctgtcaggatttcagttggcctaaacttcatagcattccattggcttctctccctttttcctctcttagcatcctatctttctcttttgtcaggattaaaaaaaaaatctcatttttctactacaaaggaaattttgtttttctacttcctacaaagcctcactgttgctttgttgctttggctttcacctctgccaaaatattgctttctataggttggtaaggcaatctcccagacaaagaaaatttcctccctaatggaaatccttgtgccagctgttaagtattaagatagaacttttattttagtgtgttaccaagatttttctttgtagattgccaactcaagattgtactagatgctaaaaaaagaaaaaaaactgggataaatgcaaagtgccttattcagtggctttgcctcttcttcagtcttctttttgttggtcctggaaatattaacccattaaaaaaggcagatctgttttataatgacaaatattggtaaagaaacatgggatcaattgttgagaaattgaaagcagtaaaaaaacctgatcatagagtaaccatgtaagtaagcaaaatggggagtcatgaatagagtgttgacaaatgagagtgatattggcaaacatgaaattaaaatgtactttggacaagcctatcgctaaacctgaggatacttttgatgtaaaaacaactgtggtcctgactgattttactctaaagttcatgtaaaaaaacatccttggtgacacactgacattgatttcctttagtgtaactgaggccatatactgttctgatatttttcagaaactctttttagttgggattagaagctaatagtattatttttgaaacctgtttttttgttttaaatggaatatataggctgtttttggtatatgaaattaatgcagaaggctattctacttcagccagtgcactctaagcaaatccaaaaggagccctcatattttgctataattagagtgaccattatcaattaataattaaatagttcccactctacatgtggaagtgtggagtgtatccatggaaatatagaagtaatgctctagctattgataataccatatttagaagacattacttctaagacagcattaacaaaactatgctttactatgatttattttttaaaatttcctgttcagttaaagtttgtatttatttttaccaactgaaatggtaatttcagattattttgagtattaatttcagattattttgggtattaaatacttaatactttctgataaatacaatttaattttttgaactacagtaaccaagattaacctaagaagtattttaaatatattttgccatgtagaagtgcttggtgttttatctaatcagtgagtgatatggtttggctgtgtcctcacctgaaatctcttctccaattgcaatccccgtaatccccacgtgtcaaggggaggccaggtggaggtcattgaatcatagaggcagtttcccccatgctattctgatgatagtgagtgagttctcacgagatctgatgattttctacgtgtttgatagttccttctgcgttcattctccttcctgctgccctgtgaggaagattccttgttttcccttcaccttgcaccatgaatgtaagtttcctgaggtgtccccagctatgtagaactgtgagtcaattaaacctctttcctttttaaattagccggtttctttatagcggtgtgaaaatggactaatacagtgaatgacagcagaaatacgtcattggttattatacacactagtgaagtcaaagtctaataattgtattcctctcagttaagtaactttctcacttagattcattccggcaacaaatatttatggagcacctactattgtcaggtttatgcttagcactggaaacgtaaaatgagtcatgttccctcttcttaattgatttacctgctttatcgacaggcaaaacagggattatcagtgatacatctttgatagtagtatgctgccttgagtgaaatgggttgcaaaagatggggatccacactgggcagtttggctttcccagagaaggttataccagctcggtgttaaataatacgttcttgtgggtgagacaaaaagcgacaagcatttttatgcagcgaaaacactgtgagcagaggattggagataggatgcagccctgtgttatcagagcaaatctagtgggaaaattactctggaagttatggaaatgtaaaatgtgtgtgtagagtaggaaagtttaagtagatttgaggcacagagaaaaaaagacagacatgttaagagactattagactaatatagataagaaataggaggcctgaattgaggtagtggaagtaggaaggaggaagaagtaacgaatgagatcattgactcagtatgacttaggatgtagtggaagcaacaccctcccacgcacattgaaaaacagctggtataaccttctctgggaaagccaaactgcccagtgtggatccccatcttttgcaacccatttcacagtgttaaagttcttattttaacaaattgtacaatgtgaaactaaattttattttttatttggtagtattaataaacaattatttacatccaacgtgtaattatttgtattcaatgtgtacttttatatattagctgtgcaatttaaagatgttgaaaaactttacaaatacatagcaacaactttacaaatgcattgtggcagtcttacttttttttaaatcagatatctttctaaagcagtggtcgcaatttctaaattttattttgtttcttcatagatttgaaccaatacagagcttatagtggggtattcaataacttatggaattctactctctgaaacctatcttcagaattttcactgtgacagaggaagtgcaaggcaagggacaatgccatctctcatagtgatttttactagcaaagaacattgattaaataagcaataagtttggattatttgtagtatgattagtagtgggttcaaatatgccacttctgaagctcttgagttgccaccctagatgttttctgaaccatattcttgcttatttatgtcttttaaacagaatgtgtattgttaattataatccccgttaaaacttatctaactgaaaaatttttttaactgtttcttctatttccttttgttagtttttatttcattttatttatttatgtatttatttgggatagagtcttgctctgttgcctaggctggagtgcagtggcacgatctgggctcactgcaacctctgcctccccagttcaagcaattctccctgcctcagcctcctgagtagctgggattacaggtgcccaccaccatgctcagctaattttttgtatttttagtagagatgggtttcgccatgttggccaggctggtctcctgacctcctgacctcagtccgcctcagcctcccaaagtgctgggattatgggcgtgagccaccatgcccggaccctgtgttagtttttattgattcactttccctttctcctcaacagaagagttatataaagtagggcattaatatgaatattttgccaacataagattatattgaaagatattgggcagccagttagagtgttgtatagacttttctaagcatatggaaatatgtcagcattggtttataacctgaatcttttttctctttataactttgtagtcaaccttgtcttcatttacaacagatagttttatgagtctactgattgcaaaagacaacaaagaataaaatgagaattttagtagagtagataatagtcccagttgcttggctcttttgatagcacatatgaataattcaccatccatatttaatagcatatgttatgctccttaatacatttataaccatctccttccaaagggaaaactatcctgctatttgtggtttgtttagtttttcaatgaaagctgaagagaatgttgaatatttgccccaagacctactacagcctgaatattactactttagcatattatcctccattgtattttctgaaaagatttccttggggatgctatcagagtttgtaaaaatgatttttaaaacattttaaatattgctaattgattcttacactgtatttttataacatttaaaatgtatatatgtaactacacacacacacacacacacacacacacacatatatatgggatatgctaagttggtatttatgtctgatatgaggaaatgtctaggtaggtaatgttaagataatattgaagcaaccatctcaaaggcagtgaaagcttcatgatttatcattattgtgagttattgggattttcttcaggtgtcagagaaatttgaggtaaagtacattttttaacatagaaagcctactagatttttttcaatgattcctgttttatttcaatgcttaggtagattatatattttagacaagtatgaaattataggtacagaatttataagttcaaaatgcttctattattgacaaataacttaatcactggaaacatttatcacttttattggcgtacctgacagacagcagactgctccggtcttgaaggaataaggctgcagaggcatatcataattcaattgaaacacatttctcctatcaggaaaactaaatagcatcaaatacctttgactttacaaagtacaatgacaacaaccttgactaaacacagatcatttgcttcagcaaacggaataggtctaagtattagtatactaaatcctatatcttactccaaatgatgtaaactagttatatatttagaataatatattgtgcagggaattcagcaaagaggtaactcagtttcttcactttatagatgagaatatttaagtatcatagaggttaaattattttcctcacatgaagcagctggctagtggctaagtggggctatatcacaagactgtgattccagtccagtccagcatttcttttgcattgcattataattatttttaggcataataaattaactttaatactttttctttaaccttccaagcataaatatttttctttataggaactttgtttcacttttaagaactactaaatcactaagtacaaaacatatttgtgacaattttggggaactttgtgatatttatataaaatatgttgataagcttgtatgttagtcatttgtttaagtcattaattctgaaaagtaactcttacagaatttagaaaaggatttgcaccataaatattagtagagttgattacaacggtccgggaagttttatagggataagagcaattatattgaaatatacttggatgataaaagatgaatataaaatgaaagtctttaatatgaatatttcttttacaaaaatacaattatagcaacatttctgcataataggcaaagaaaagtgatagttcttctgaactatgatacatgatccaaaggagctttatattttcaatttatgctgcagtttttctggttggtataaaacgtaattagcaggcacagttgcaccattgcgcttttttttttttttagtaaaacagctttacttttttaagggacagctggtggtatgtctataaagcattatattaaacctatgggtttctagttatgctgttttataattacatgaaattcaatcaatcaaccttttagtgatggaattggtgagtattggtgagccttagtctcatgtcaagattttcgctgggagaagaattgactgaggaataccatgccttggtgtgttcagtctcctctccctagaatatttaacaagaacaacttaagtaaaataaaagccttcaagtggtgggagaagtgatatctccaagggaaataggcagtttgagaggatttgaagggaagaagtctgtgaatcagtagtaaccgagcatttgtgaggccagctttccatgggattattgtcagatcagcatgtctgtagccgaacttgaaaagcagcaggtaaggttgcatgagggggtggggcgggggggggaagctaagtagattatagaaagtctgccaaattaaggggttttccttctgagctctttatgagaagaagccactaagacatttgagcaaggaactattgtaatgtagagcacctagaagatatatttgtgtttactttaagcattaggaccaccttaaccaattctttggtggatgaagggagaccaaattggagggggagagcccttaatgatcttttgtttattgaaactaaaagtggcttcaaaaatcaattttatcaaatctgtttccacttttcaacatcaataaatcagtggagctctctgttagatatataataatcaagaatagtttaggcttaggtaatcaacttgtaatacttgcacgtgtaagattctctgcagcaactgtgaggtattttgatttacaagtgtctctctcagtaacgaagtatatgaaatagcaccaagtcctgacaagaatgtagttatgtggaacaagattaagtctctaaataccctgtacaaatatttggttatagcatactaggctttgaaatcgggaactatggacagcactattatcaggcaatatttgtctttaactcatgcctttaccccttttcaggcagtttcatacattggggagaatttaagggaaataaaggctggtactttccctcaattcataccacacagatgactacttactgtgcctttgagtagagtcagtcttatattctgacggggtgatattttgtcccaaatgtttagtaataagtaatgctttagtatattaatcataatcatgtaacatttattgtttaataatgtttttgctagtatgagattacaatatcccaggctatttttcttatgaaccatgagttttatttccatgaaacactggtctaaaagttcaaagacactgaccattctaggacggctgcttctcaccagccttacaaatgtgtgcaaatttcttcacctcctgagcctcagtactacattttaaaactggaggtaatattagtcccatctccaccacagtgttattgtaaagataaaatgagatcatatgcatgaatggaagtcattatttttcacttttatgaggatacttgttttctattcttttgacaaagaaccttcagggccatcttttaagatatgaaaatcaccaatatgtataaaacaaactactggaaaaacacagtgcgacttgcatatacagtagtacacaaaatataatatgacttacacatagtaacacacataatgtgacttacacatggtagcccctcttgtttttatatcaattttttcactcaacaaatatttatcaatactatgtagtaattatagcttttttgttctagtgttatggatacagcattaaatttaaaaagatcaaactattggtcttcatggagcttgtctttttgtaggggaaaagcagacttagaatatatatttttaagaatcacatagaaaatcacacattaaccctgagtaaatgttattttattttattagcagaaaaaatactatccactacgggaaaaaaaatctgtatttttaccttcttttgatttttggctaaaaattatgttcagatggatgtcaactataaagttacaagtcttcatctttttacttctatttagattgtatttgaaaattgaatataaaaaagctctaagtagacatgatcaagtcttaaaatattttaggcatcattagtgcttctaataataattttatagtaacttctagtctccttataatcatcctgcctttatttaaccaaattattctgtcttgtttaactgttattaaagaatataaagaatgcttaagaaaagctttaaaagtcctctctagtagtagaagtataacttccatagtttatgactcccaaagtcaatgcaatgtcttcataggttacataggcagagaatgtgaaagaggtcatgagttgtggttttttaaaacctcttttgtttcattgtgtaggaaaatatctttatcagaagaagaaaacagtgtttataattataatgtaaacttgttaaagattttcatgtaaaaggtgaagacgaattttgtgtgaggtttatcagagagatcatcaagagaattattttcacttttgggaattgttccagttaatatattgatcgatagatggatgtcttcattggttttgcaggaacctgatttccaattttgcttttgccataaatgacttaggccacttttcctctctgggcttgtgtttcctcatctacaacaaattgctcagcccaaattgtatctaaattattttatttaggttctcatattcacaaataaacactttttttaatgcttctatttaattttcaaagttttttttgttattgcatttctgatatggatgactttgtaaaaacatagtaggtgaggttgaaaaaagaccacaggggatgaatgtacaaaaaacatgtaaataaaactattggagttttctttataattctgagggtctaaggatctcacaagttatatgcaagagaagcggcatagtgttttcagagatgattaatatttagaaaaattcaattctggttaaaatagatttagctaaagtaatgatagttgactatattttaatgggaaattttaaaatgttactcttttgaataaatgaccaccagatttaattttttaatataaacctacttctagaataccccccattctgctgtttttcaaatgtcaagtgccaaaatgtcataaatatttagggaagagggtttactctttgaacaaggagatgatacacagctttattctgtgagtaaaaattgtgatgacaatcatcccagacagatactattttccaagtgaccatggctagagaaacttgaaaagtggaaacagggcacttgatattccatgggaactctctaataagatttgaagaagtgtctgtagatcagttaattattctattgtggaaatccattcatttaaaacacagagagcacccatataggcacttttatcctccccccgcccgcccacactgattcattcatttttattcttgagaatatgctagtattttgaaacacttccatagaagctggatccatgaaagtatcattttgccaactatgataacatagtgttagaattttcttggtgaacttactgatttactgtgttttgtaatctagttgttgaagagtcaaagaaatttttttaggggctgttgaaatgactatccaggtttatccaggcaagtagtgttcctctgtaaaactctcattttctaagtatgtggtatgattttaaggactccagataagctgaaatatccagcaatacttctctgacaagcattgtggattatgaaatcccagcattagacaacatattttctaaggttaggcaaatattttcttagcagcctgaaataaaataaaggtactatatagatgtatattttatcaagtttgaaaatatgacattccttgcttctgaaagagaagcatccaggtccaacattttagtataattatcagagaaagaaaaaatgttaaagtgctagtgatatttttaaatgactatagctgttatctgaatattaataagaattaatctaattaagagtatgttcagcaatatgatagtctcataaaaagacacagaggatacagcatggtctttatttacaacaattttttactctttacagaagaatgaaacatagacatacagagatatgtaataaaaataagcactaaataattaagtatttagaacttactacatattatgcaacatactgtgctatgctaaacagctttcttgggccatctcatttagttatcaacagggtcctataagtgggaatactaatacctccagtttgcatataagaaaacaaagatatagaaaatttaagaaacttctccaaagatatggagcctacatatattagtgaaagagtcaaaccctaggcagtttgcctaccctgtgctcttaacctctttatgagtctgaacccatgaaggggtatagtgcaggcatgaattgccacaggtgttcaaaggaggcagaggtggttaagaaaggcagagtagaaggaaagggactttagcttcactcagaaatgtgtgtacaatagataagtgaagaagtacgttgggggtgttaataggaaagtattgtcttgaagagaggcattaacgtaagataaatgttgataaaaggtatcgttgtcttgttgattttaatagtttttaaattaggttactagaagtacttctccctattgatatttggcctgccctgggtttaactcttgtaacaaagaaaccaatagcacaactccagcacagtagccttaggaaagtgatgacaatgacaacaacaaaacaaaatcctcagattaatataggtattgtactaagtccttcacatgaaattctttttgaatctttattttcatttctggtaataaggcaaactggatgatggagggaataacagacatgcatgcgtgcacatacacacacaccttttccaaaacataactgatcttgtgagaaagtaagaaaagtcttcagggattagaaacggtgagaaagttggcattcagacaggtgtctaccactccttgatgacctgtagacatccatgagtcatacatgtgaaagtcaggaacagatcttgggccttagcaaggcaaaagttgaatggaatgcatcatccataaagctgtaacctcaagtggctaatatgaatgaatgaggaaaagaagaagtaaaacgcctgtctgtacaaacaagaaatcagtttgtttgtcattctagaccttgtttctggattaggagaaaaaaagaaaaaaaaaaaaaacccaaccaaacaaacaaaagaaacctcacattcatttgggattgaaatttataccgtcaatgtggatggcctgaaaaacctcaagtcagaaatatagttaggtcctcttggattgagccctagaaatttggccgaagcaaacacaaaccttcactggaaaaatgccctttaactttttcaatgtttctaatatgttttaattatcaaaaactcacacatataaatataaaaagaatattataatgaatgcctgcatacttaccacttaaattcaatgaattgtcagcactttgccaaatttgctttatatttgtctcccgtctctgtctctattttctatctcattattgaagcatttgaatgtaagttgttgacatcatgatggtttacccaaaaatatttcagcattcatctccaaaaagtactttcttacatactatactattatctttatcacaactaccataattaataataatcctttaatattatctcatgctaatctacattcagatttccctgggtgatgctaaatcatatagtcattgttttcactagctggggttctatcatagtttgcatatatatatatgtgtgtttgaatgtatatatgtgtgtatacatatatatatattacatgtatgtatgtattaggtatagcttaaactttttgtgcaaaaattgtttctgttatatacttcatattgcatctcatcgagaggtacaagaagttaggatgtagcagtattagtaaggctaaggttaatcacttagttaaggtggtaattactagatttccttgtaaataaatgtacttattattgcttttggcattatcaagtttctattagggtgatactttgtctccagttgaaagtcttatatctagattaccttttacttattagtttaaacatcctataatgatactaactgaatcaattattttattgagacttcatattcattagctgatagttaacatttattagctgatattaatctgtaatcatcaattgggaataaaccacagttcctcctaaaatgtaaatgcttattgttttccctctaattaccaacttcagagaaagttattggcataccagtcatctctagtaaggacaaatgaatgaacctctttcctcaaacccatttctctctctcaaaaatgactatggactcatttttttaaaaaaaaattctatgagttataataaattaatgttattattcttttgaaggccacattgtcctaagttgtctcctgtatctttttgatatggcttcttttgatctggaggattttctttctatatagcacaagatgttctgggataaacttgtacttttccttccccagacctggaattagacatttctccaggaagccattgagtactatactttaaagacaaataaattttatataactttactggtgacatgagttcacaataaaaacaaacaaaatcacaaaatatgtgatgtaataagtatcaccagagacagcacagaaaacaaattctggaatcagaccttcgcagactgtgactattacaattatatttagaaaaacaaatatgtttatcatattcctgagaataaaagaggatattggtggtttagcaaaggaacaagaaaaaaagactatcagaaataaaccggcaggtttgaaaaagaattaagtagaatttttgaaataaaaatatatataattttgaggttaagagcacaatagatgacttcaaaagtagatttgacacagctaacagaattagtgaacttaaagatctaaggaattatccagaatataatacagacaagaaagagaagagtttagatatacaaatagaataagaagacataatatacaattaatcaagttgtccagtgagaataaagagaagagaagagaagcaataggcaaaggagtaacagggaagatgtttctggaaatatcaaaaggcgcaaattctcaaattcagtaaatctaacaaaaaagaaattccctaaacacattacaatgaaactgcacggtatcaagaagtgacaaaaaaattttaggagcaaccagatagaaaatacagaatgcctacaaagaagcaaaatctgactgacagctaacttctggatagaaacaatggaagccagaagttagtaaaatgatatcttcagatttcttagagacaatgactgttaacatagaatcaaataataatcaaaattatttttcaaaaacttggaaaatagaaacattctcagaccacaaattttgggaaatatttactaatcaataaatcatcactaaataagcttttaataaatgtaatttaggaggaaaaaagagccttcaaacaaggtcaggaatagaggagaaagtagagtgagtctgcagggaaaagcagaagtccaatcaggtagcttcagcagtttgcagtctttgcctctataaaaacattatatattattggaatttgtgtatattttactttaattatttttcagcctacttagccccttttaccaaatataaaatgggtggtcatcaagcaacaacattatttctcaaaccatgataaaaactatttcaaagttttatttgatcagtctctaaatccttaggttattatatatattttatatataatatgtatttatatataatatatatattttatatataatttatatattatataaaaattataaaaatgtatatattatatataaaaattatatatataatttattatataaaatatatatgatatttttatacaagcaatttataaatgttatttatatacacagcagaaacagttttattagtatattacatcctaaggcaacaattttaaagggagtaacactcatttatatatgaatcttgaatttataaaaattcagttcatttcagtcacagtacataaatttacctgtcactgtcaccttaagtcttcaataaacgtgaactttgaggtctactactgctcgaactgttaaatgcccattttgaaaaattctactcaaagacccattctgaatcagtccagagtgattgtaggttacagtttcaaataaattaaatttaaaagagttataattttggctaaactactcagttatttctttactgtattacattacattattttaaaaaacatacttttaaaaagtatattagaacacttgaagtttaaaaactttaacaattattacttttactgattatattatttataaaattaataagaattagtattcattgtagacgacttggaatatattatttagctcaggataaatattatacatcttaatacatttaaaaacacaatacttcatattatgtaataccagggccaggcatggtggctcatgcctgtaatcccagcactttgggaggccaaggtgagcagatcgcctgagctcgggagttcgagaccagcctgggcaacatggtgaaaccctgtcgctactaaaaatacaaaaaaattagctaggtatggtgacatgcatctgtggttccagatactcaggagactgaggtggtaggatcctcttgagactgggaggtggaggttgtagtgagctgagattgagccaatgtctgggagacagagtgagactctatcacaaataaataaataaatgaaataaaaagtaatacctatatatgcatttatatatatatatatatatatatatatatgaaggaaaattataatctcttgattagagattgtcaatattttggtatatgctgttcagactttttccattatatcaattatgttctctatagtatataaactatttgcatatattctatattgtgtatgtatctatcatctacccacttacctatctacaaatctatttatctaaattcctaggtattaattctctcatttagcctttaagttgcagataaaggccaggcacagtggctcatgcctgtaatcccagcactttgggaggccgaggcgggtggatcacgaggttaggagatcgagaccatcctggctaacatggtgaaatcccgtctctactaaaaatacaaaacaattagccaggcgtggtggcgggcacctgtagtcccagctactcgggaggctgaggcaggagaatggcgtgaaccagggaggcagagctggcagtgagccaagatcttgccactgcactctagcctgggagatagagcaagactccgtctcaaaataagtaaataaataaataaataaataagatgcagataaaattggattggtttccatacattatgcaaagtttgttgacttccccaagatggttcttaattcttggtcacatgaatttctgattatcttcttatgacaaatatcttaatgtggaattactgaataaatgttataaatgtttttaaggcttctgattcatgtcaagttataaagtttgttatcagttcagacctcaaacagggtatattggagatgtgcattttacttaccaatgttgggttccattatacaaacacacctttttttttttaacataagatttttctaactaaatattaaactgattttattttctttcctaaatcatatactgactacaaaagcacataagaggagaaaggaaggatgtgtgctggtattttacatatctgaatttttcttttcttttttatttttagatggagtctcactctgtcgcccagtctggagtgcagtggcgctatgttggctcactacaacctctgcctcctgggttcaaacgattctcatgcctcagcttcccaagtagctgggattacaggcgcacatcaccacacctggctaattttttatatttttagtagagatggggtttcaccatgttggccaggctgatctcgaactcccgacctcaggtaatccgcttgtctcagcctcccaaagtgctggggttacaggcgtgagccaccatgcctggccctggacttttcctaaagaaaaaaaataaaataacactatgcctacatgaccaaaaattttcaacctgataataaaacattgttaggagcagtgatgtgacataatggctgtgatttactttggaagtatgcctgtaactgccattagtaataatgaaagttaatgacatgccttatgggatcagacaatggtcttcaatatttgtaactacttgctgggatagaaactattctgaactgtcagtgggtgtcagtttgtaattatagattgcacaaacactatgcatgatatatattttgtcaacaatgattaaattggcatttagaaaaatgcttcattttcagtgaccaagataaacacaatctgtacctttttaaagtaataaggttggagagtaagcacccatgaaatataacttataactttcaaacaaatcatggacaaacatgtatttttgggttttgtaatgtttaagtgattatttactaactagagttcgctttcaaattttaaaaagatctgtagttatcctgagcttgaaagtcacttatgtttcagacccaaatataactcactcaattttgctgaaaacctaaggatttaaaggctgatcaaataaacctttggaatagtttttatcatggtttgagaaataacgttgttgcttgatgacccatggttttatatttggtaaaaggggctaagtaggctgaaaaataattaaagtaaaagatatacaactttcaagagctaaatagatctaattcaccctgtctcctctaatgttctgctcactcactctgctccagtcactctggtctttccaagcatgctaaattcctttccacaccccaaggtactgtctttttcattttccaataatctgcttcattaagcaagccaatttaaggacactaccccatctagtttttttttctcctcccacctttcattttgcttccttcatagattttaccacagcattggaattctgtactcacccttccatttgcttcttcaatttgaacctcctgcattggatgatgaactccataatgtcagggataatgtctaactttccaactttctgtgtttaatacgtgccatagtactgggcacatagcatgtgctcaataaatattttgttgatttaatgcaataatgaatgaccaaatgaatgagtcagaaatatatacaagtgtagatctttagtttgatctattcactcttattgagttttgtggaaatatgacattttgcagttttgattgtcacattttaaataaggtgataacatttttgttccaccagatgggaggataaagctgaaaaaaaatgctgaacctactatacatcttgttattgcttattgtttttgtttatatacctaacatattaaagtttcatacttagtactagagagatatttcttattttaaaagcatcatatgcttaccttcataggtaatttaaagttaacttttaagttctgaattttaaagtgttatgaaatttcactttaaaataagaaatataaatttatggctaaaatgttttaaataggcttattgaatattccaaattaatgttaagcattcactgttttacaaccttatttattattattattattattatactttaagttttagggaacatatgcacaatgtgcaggttagttacatatgtacacatgtgccatgctggtgtgctgcacccattaactcatcatttagcattaggtatatctcctaatactatccctcccccctccccccaccccacaacagtccccagagtgtgatgttccccttcctgtgcccatgtgttctcattgttcaatttccacctatgagtgagaacatgtggtgtttggttttttgtccttgtgatagtttactgagaatgatgatttccaatttcatccatgtccctacaaaggacatgaactcatcattttttatggctgcatagtattccatggtgtatatgtgccacattttcttaatccagtctatcattgttggacatttgggttggttccaagtctttgctcttgtgaatagtgacgcaataaacatacgtgtgcatgtgtctttatagcagcatgatttatagtcctttgggtatattcccagtaatgagatggctgggtcaaatggtatttctagttctaggtccctgaggaatcgccacactgacttccacaatggttgaactagtttacagtcccaccaacagtgtaaaagtgttcctatttctccacatcctctccagcacctgttgtttcctgacttttgaatgcttgccattctaactggtgtgagatggtatctcattgtggttttgatttgcatttctctgatggccagtgatgatgagcattttttcatgtgtcttttggctgcataaatgtcttcttttgagaagtgtctgttcatatcctttgcccactttttgatggggttgtttgtttttttcttgtaaatttgtttgagttcattgtagattctggatattagccctttatcagatgagtagattgcaaaaattgtctcccattttgtaggttgcctgttcactctgatggtagtttcttttgctgtgcagaagctctttagtttaattagatctcatttgtcaattttggcttttgttgccattgcttttggtgttttagacctgaagtccttgcccatgcctatgtcctgaatggtaatgcctaggttttcttctagggtttttatggttttaggtctaatgtttcaagcaatggggaaaggattccctatttaataaatggtgctgggaaaactggctagccatatgtagaaagctgaaactggatcccttccttacaccttatacaaaaattaattcaagatggattaaagacttaaacgttagacaaccttattttttattaatactgttataaatactgtaagataggtgtgttcacaaaagactttgatatgtgatgatgaagtctgatttaggaaaagttgataatatttaaaatagcattgctattttcttacgcttaccgaataaaaatgctttggtgaatctaaaatatgctattgaaagaaaaagtactcttttctccagggaactttatatttttttattgatatgttagtacattttatagctgtcataacataaggctttatttgttttagaacattgaattacttctgcagcaaataaagcttaggactatattggtttataaaagtggcaatgatatttaagtactttttaatgtgctttgattttatgattcttaaatttcctaccttatctttttattttatcctattttgtttccttttggagaaagttaagtttccagaaatcattgctaatttgtaatagttaacatttaactttttttctgatttctgccattaaatttgttgttttcaaattggagtatattatttgtgttagatttaagtcatagtatatactatgcctaatatagtataacttatatactatgttaggtttattagcttagtgtaagcatatacgcgttgtaagatccattagggtggggaccatgctggaaagcttacaacagtgcttggcaatcagttggtttccagtgaatatttgtttactttcttaatcagttaatgggtgatagggcaaaagtgaactgatattttaagcagcagaaagggccagattggctatccttgtttttttatgatattataggtgtcatttatgttataggtagtataacatttatataatgtgtactttctggctcttggatttgctgtaattttaacatcacatatggatataagaacttgaaacactgtaaagtgaaatgctttgacacaggagttaatttacataatggtaaattctggattaaaggccttaaagtaagttctatcttatatcaaaatgtcagtattgattatgtatacatagaaaggttgtgtttttttcccaaagaaaaccaattgttgtggttaaatttttaaaaaccaaatgagtttagggattcaagattctcagctaagtataggtctataatcataatgataagttagaatttatgattcacagatatgtgggatttatgtgaataagatatttttttaaatattgctgagacttagagtaatctataggttttctagataactatgctgttcttttatagaactaaatttaatggagcagagagttaactaacttttaagttaacgtgactttgcagataactacttttggtgaatgattttcaacatgatcatgatgaattttaatatactcaaagttttcggtctctaattattaataaacttaaaataggtcaactagagcttagaagaaaaagcgtgaacttgttttttcttggtagtacccttgtcttctataattgacggaaggaaagtacatactataaaagcaactatataagactaaaattattgtttggaaattattatccttcaaagacttgtatttatgtttattgacttcatgttattaatatttcacaaccagggtttagattccaactcagctctatgacctgatcagattgaatatatttgtaaattcagtttaccaatatttaccttgcaaggttttagtataaatgaatataagttattccaaatgtttagttcactgactgtgcttgatgctatttattattataattagtcttattaatattaacagtacttcaaaaattctgataactttcttcaaattgttcttttctcaaaaatggggattaccacatatcttgagataattataatgctgaattacttttgaatattaatgacagtgatttttttctcagcttgagaaccaaatcccttgacaagcatataagaaccatctacaacaaaataagtatctgaggaaacctgtcagctacttcaatctgtatttcagcattaatgtgtgattctatgcaaacaaatttgggagaggattttaaaaattccactaaatagggagaacttttctaaacatctcattttagacaattttcaaaactaccaagggatcttgaggactgaaaccagtttcatttttctatactatgttattaataaaaattcaaagatcagttaatataatgcatattgtatgaactttgaaatcattatagtaaacatttttttgtcaaattacttataccagttatcttgcttgtgactgcagattgcataattgctgcacagatacttaaatggcaacatatgtcacatttatccactcaatggccacacttcattgtgtatagatgtattctgatgggctttacattcaaattgacaagtgaggcaattaccagtcaacatgtcctacaggttctgcatctggcttatccatttgtacttttttgttttgttttaaagtaacaggatctgtagaaagaactatagtaacctgatttgaaacctggctctaatgctgattagctatgtgaccatgggaaagttccttagcatgtttttgttttgttttgttttgttttccaagacagggtctcactttatcacttaggctggagtgccctggcttgatctctgctcactgcaacctccgtctcctgggttcaagcgatcctcccacctcagcctcctgagtagctgggactacagatgtgtgccaccatgccctgctaattttgtgtttttagtagagatgaggtttcagaatattggtttcacctcaagtgatctgctcaccttggcctcccaaagtgctgggattacaggcaagagccactgtgctggccagttccttagcatctttgaattttagttttctcatctgtaatattgtgataataactgatacaataaggaaatattacacgcttgtaattttgcaaaattaatgaaattgatatagggaagcaggtactctcctacactgttggtaaaaatattcattattaaaacatatctatgaagcaatttggtaccacctaatacatattgaaaggtacattcccattgagtcagcaatatcatttctgggaacatatgctacagaaatgcattggtacaaaaagatatatatatacacacatacacaaagatgttcatttgagcattatttataatagttaactttagacacatttaaatatccatcattagcgagaagttaaatgaatcttggtgtatgtagtcatgcaatgtgaatgtgaatgcactgaaataaaaagatttccgagacatagaaaataaaaaatgaaaataaatgatttagacaagatattgaaagtattacattatgtaaaagtataagaatatatatgtaattgcattatatattcattaatgcattttataattcctgtgtgttatcataattactttgaagaacagtaaagtgatactcaattattaaaagtgattccttttgggaagagattgataggatatctagctgtcaggtattggtgaatgggttccaattcagtgtgcgaattgaaacactaaagaccaaataaacaattacagtttttcaatggcaaaaaacttactttctactattattaatccccttgccatcattctagttcagggttttcattatctcactcaaagtggaagattgcaggatactctagagtataaataaattctatggaggacttcaggactttttcaagctgcatttgccatctccctccccagctcctattctcattctcttccccgacacaggatggctgctctattgaggaataacagatggaggtgggggttatgtgctgtaggtgatgagaagcaaggagttaaccaaataggggaaaaccaggagactactgtggcattattggtgcctgggaaagacaaagtttaagaagaaagggagtggtcagtcatgtcaaactctgcagagaagtcaaataccttaagtgttttttttgttttgtttttaatgagcatttgttttgtttagcatagagataaatacttactgatcttgctgataacagttacaatggagttgtgaggaaaaggtataaataaattgatgagcaggaggtgagagcacagatagtgtagactactccttttcaagacatttggctatgaatagaaaggaggaagaaggggggaaagaggcactgtcctacaatttgttgcatcttattgatttttaaagacaattttaaataatatgtcatcctatccaaagtcatcatttttggtagacatcccagcttcaagtgattaaccgaaaaaagcaaatcaattccattccttaggcatacattttatatttagtttttcctgacaggcttccaaaaaagctatgttgctctagttttgacattcttctggatgttttgctgagatttatgatggtcaaaaggggtaactttgtaaattttgcagtttacatttattacattcatgatttatgtaaattttagagtgtttctgtcttctctttctatggcttgaacaaaattcctcatgttcttttaacacttttccctgtttcttaattagtaataagtttgaccttgcttaggacctttttgccaaccaaactctatgccttcttccatgctagaacactaggatagattgtagaagcaaacaagatggtgcagcaggaggttgtgggaagacaaggtaggcttatctagaaatactatgtagagactatctggaaggttcaaactatggagaaagtgacttgtagcatcattgtttaattcagagacttatcctataatttatacaaaatcgacaaccagatatttctaaatactacatttattttatagatgagtaaactaacactacatatcaatataatatgtataaagtggaaaatgggtcatattctaaattgcatatttatctttggtcctacttaagttattgcactgatccatgaaacaactgaaatattgcactgtgtttagcatactttcctgagacatacacaacacatatttaaaatcgtatgtttaaacagggatactaagtctggcataaattattacactcaagtatcaggatatgaatcatgttgccaggttggtgaactacatttctatatttttttctgatttattatatgactatagcaaaatttgccacaataggaaagtcagaaaaatgcattatatcataatttagattttaacaccataggattttttggtaatttttttcagattgtattttttaatctgaaataccttttaaactgaaaagaaaatttcctattcaatgtttgtcatgtatttaagaaaaagaacaacaatataaattatactagggtggctactatatataaaatatgtaatacattatatatattacatatatagagagatataaactgaatcagtagttgacacactggatttagtaatggaacctttagttaaacatattacataaaatactctgtttattatatgttgccttcattaacaaagcctttgtggaggttatgagataacatataaaaaaataaggtaactttttttctctagcaagaagttgcccagaatttatgtagcctaggatcctcctggtgtaaactgtgcatttcatacataccatcagaaatatgtatgaaaatgatgtgtccctagacacaatcctggtgagttgcagagaggaataagaagtgattattttttgtaagtcagatataaaacttgttgttaagtcagtactttttgaaataggtagactaagcatcattttatatttgttttcagggaacaagttcatttgataaagtgcatttgagctacttgtcattaagttttttttgtttttttttttgtcgtttttttacttgtcattaagtttaaaaattactatgtttagtatttggtcaatttgatatcttaaattgttgaggattgcattttttaaatcactcacattgttcaattatcatacatttctgtttcattttctttaccagttttcagttattctgctttcatgtcttctagtacctggcacgttttgtgccaagagaaattcgtttgttgctgcctttgaaaatgttgctcaaacttatgtcagttgcaaatgacttgccgaagctttcctcagttaagcagctggcagtctaatattttcttagggaagcctgaagagtgttttcacatattgactcagcttgccaactctttctccttcaatgtttcaggtgtcagtggctcctgtagttattagcaatggcactaaactaaaaatatgattggtcctattataccagacatggaaaactgaaataacgagccagagcaatactatccataattgcatagacatttccttactgaatacacactagttctctcaaattattggtctagtttgacaaagtcccaaaggtgtaagtagctaatgtacccagttaaagtgaagagaaattggggacgagagaatgattgtcaaaacacttctctgatagaaccttgaagaatataagacttagagtcacttgtatagacagaaactgcttgaagaaattagaaaaaaaaaaaaaaaactagaaatcagaagacattttgtttttcatctgaaaaatggagcaaaagtagtggcgatctctaatcattcccataagaaacgtttttttaaaaagctaaatacattaaaagtcaatcttaaaacatgcaaaaaggctttaaatttggatcgaatatattgttaataggcatagattaacaaattgcaagtaagtaatcaaaatataaatctttttgagtactcattatgagctgacattgttatacgtactttgaaataaattaaccaatttaatccttgctttcattcaatgaaatatgtagaataattattctcattttacagatgaggtctaagctcatttgcaaagctggggtctaagcccagggagtctggctttaacatccactagctgaactccttcactggctgctcttaagttaaaaacactgttcatgtgttttaggactaggttcaactagtgggactttttttcttccaagtaaaagaagttggactaaatattttctttttgaaaaatcttaatctcatattaaaattcaaaaatccatatcctcctcattgccttaatcctttaatataatattgaaccctatagaatatttgttcttgcctaaatggtgccaaacatatttaatttaaatggtttttaaaatggtaaaagtatggatatttctaaatatatgatttcaggacagaatttttaaacttctactcatggatttgactttatgtatagcagatgaatatacgtgttgtccatgatcagagttccatgaaaatgaaattaaaatggtcacttataggtgtttttactttcatttcttaactgcgtagactaatgacatatacatcagtcgaactttgctttctaattttaaaggcagatgttaatactgttagctcatgaagtattttaaataatagttttatgtattcagctatgcataaacctatatgcatattttgtgggatctgtgaattgggtaaagatttgagggaaagtttgcagaaatgagtatgatacaaagtgaattttagggttttatatcaacttaaccattgtgcaaatttgagttttatctaaatcaagctagaatgattcactgaaaactctgtttttagtatcattaaagcaatgttcacttgcgttattcagaccactctctggagaaagtagaaaggagagcctatgacatcccatgaagtttggaggcagttaagaccactatgtttacctgaactctttcctatgtttaattaaacatagagtcagatgtttccttttccatggactttggaaaaatttataactgatttgactattttaggaatcttgaaatcatacactcctcatagaacctccttcagaaaattacatatatcattgctattagtttggaaaatctgttagttaaaaatgtttttatattaaccaaaaatatagctactttaatttagagcacttgattttaatagatgtgctaatcaatggagcagaagagttaactgagttcagagacatagtttgggtattgccttagagatatatctatttgttgtatgtatgcttaaaaatacccatgatattattttattcatacattagaaatatttcctactatcgatttttctcagaatttttctacagggattcaggctacgtttcttttgaaatgtcaatgattgagaacttaggtttaaaaaaaattacctaaatctttaaagttaaaaaagatgaacatatagtttattcatacaatgaaacattatttggtggacatacatttgaatagattgtagctaaaataaagatgaattacaggattataacatggagagaaaaatgcaagttgtagaagacagcatagagtatggttccatttttgtaaagctcaaatagaataaaaactaagctatgttttatttagcaatatacaaataggttgtaaagctgcttttaaagagcaggcaagaagaatggtaaacacaaaatcaggatcatgcccccagaagggaggcaaggggctgatgttggggagaaagtaggtaatggcaatattctaggattcaaattggatcacaagagttagtgttatcattatatttcatagcttacataaacatttattttggatgcatcaaatactatataatagaaaaaagtagaagacaataattttctgcctgtttgtcattgtatatgctttaaaagaaagtaatgaagtaggaaatttagacaattagatggttgttatgtctacatgagaccaaataatagccttactgattattattatttttttttttggaaggactaagtaatcctgttttaaagattcatgttttaagtttcactacttaatttttatttcagtgacaggaccaattcagaccaggttaaagtttataagagaaaaataaatataacaaatgtttattgacttcccacactacctgtcaggtagtatattgggtgttgctaaggtatcacagtaaatgagataagtttctgctctttgagacctttaagttcagtgaaaacaagaggataaatgtgtctattaatccaattagtacaaattctgaaagcacaaaatgttaaataaattaaggacgttcctgagactaagtcatccctcaatattattagaaaatgtgataaagcaaagcttaatataacagattatatagaaaatattgatttttttgttaattttgtctaatttctctttgctttatttcataagcttatatattatcctacccttaggagttttcttgtcaagatactaagatgttaaggcaaatgcatcaattccatgaagtaactgttacatagcttattacagagaaatctttatgcttatgcagagatccttggcctggataacattataattatttttatttaatccttctccttcctaggaaatcagtttgatatgttgaaaagagtgtcatattttagagaaactttgaattccatttctgatatgtttcattccatctttaggactttaggtaaattagttaactttgccaagtgtgaattttccatctataaaatggtgttgtaggctgggcgtggtggctcacgcctgtaatctcagcacttcgggaggccgaggtgggtggatcatgagggcaggagatcgagaccatcctggctaacacggtgaaaccccgtctctactaagaaaatacaaaaaaataagctgggcatgggggcgggcacctgtagtcacagctactcgggaggctgagtcaggagaatggcgtcaaccagggaggcggagcttgcagtgagccgagatcatgccactgcactccagtctgggtgacagagcgagactctgtctcaaaaaaaaaaaaaaaaaaaatggagctaataatattgtccagatagagctgtgaggattaaattttataatgtacacagacaccttaccaacttgaccacagtggttattatgtgtctaaatccaggatagtgctaagtaggatttaaggccacttaaagataaggccttcagtgtatgcaaattggatttgttttactgagcgattaatttcctagtcctagaacattgtgtgtgctgagttactgaatttttaaatgaattaactattaaaacctgaaggtcgaaagtgtttcaagacagctctccaattcaactcatagaaaatatcttttgaaacaaaatgtgctgccatcttcttatcctgaattgaaagcttaggaagaaattgtggagacactcagaagtctgccttgtttctctagtctgggatggaatttctgcctggaaattttccaggtagaagatgaagaatctggaaaattttccatatgtgtctgagttagatattaatgttggctttgttatttagttcagagtcttgcttgtaaattccaaaacatcaagggtattcataatcaaatagaaagcaacacatggattccaaatgatatttggattattcacaaattggtattttctgctctcttactttgctttcttagtatgaatcatgggagttgactgtagaaatgtcactattgtatgcagaacacatttcagtctcttcctctcatctattctgttcaaaatttttcaaaaaagaaccaaatattcataaagtattttaaatttatgtagtttgattttttgctacttgtttaagaaataaatgtgaatttctgtgaaatatgcatttatttaattaactggctaaatttttctgtcatttaaagtatacttctaaatttttttaaattccacttaaaataagatttcaatttttaaagagatataggtaaacatttcaatgacattaaagtgcttatttcttaagcaaaggattggaatgttttggttctattgggcaaacatgtccataaaaagtggcttttgtttttggtaggagagtgagggcttccacaggtttacagaagaagtgttgtcaagggttcagctatggaaagagatgggaggcttatcatgcaaggatgcactagagtgggtatgatggcgattttctcaggcttctggtggtcatggttgaaatgttgctgtagcacttccaatcccatcatcttaaggttttctgaaactgcctttgttcccacattctcagcaaaagtgtaattgtgttgtattggctcacaatcattttgtttggctatgtcagatcatgatcccagttggggagttttttttttttttttttttttttttttttgagattgagtctcacactgtaggctgggctggagtgcagtggcatgatctcggctcaatgcaacctcttcctcctgggttcaagtgattctcctgcctcagcctcccgagtagctgggattacaggcacctgccaccatgcccagctaattttttgtacttttagtagagacggggattcaccatgttggccaggctggtcttgaactcctggcctcctgattcacctgcctcagcctcccaaagtgctgggattacaggcatgagccaccatgtctggccaggaggagatctttaaacaaaaaaatagggctgctattactaaaaaaaaggatagtggataccaggcaggcaataaataatatccaatagactacgatatataaaaaagaacaaaatgatcggccaaaagatgagatgttatgcttttttataacacaaagcatggggagactttatcaaatcacatgttgcattaagtggtaacattacaggaaacttgtaggactttttacaaacatccagttatctgggctttagggaagttgctctagcaccaggtaaatatcttttggaactgggaattctgatgttaagtagcttacaacaaaataaatactttaggaatttatccttggaaattctctatcccaataacaaatcattacactttaatttgaccatagatctcatccatgtatgcagtttaattggaaagtactggataagatttacatgactcggcttcttgacatttaactaccaagtttcttggtcttggcttccttgttccttaagtgaggctgtcagtgaagatctttaagatgccttacagttctgtaaaatattataattagattgctctgagtggcacaaataaaattaaggtttagcacagtaaaatctgttatagagagaggtgaagtttatttaatctttatttaaaatgtatgtatacatctcatataactcaatatattaagcattttggacacccaaatgtataaaatatatgaataataaatttatattattagaaaaacaaatataaaaagattattgtcttaacatttctttgtaaggaaataacgaaactcaaatagaaaatggtagttttatcgcttctcagcctattggctaagatcaagtgaaaatggtagttctgatttctaagatcattttaaattatagttatatgataaaacaacattcaagataatttagataatcatatatgatttgtttttatgttggttaaaatgattagcttggaaaatggttcagattagtgtggaattttttatgaactcacctatgatcaatgactgaatttgaattgagtttatagaacaattattggtattttcaactaagtattgttgtacagtaaagcagagctagtgagatacccaatggaaacagcatctaaaaagttggtctccagaagtatcatttatacaaatattcttctaaaagctttatcactgaatacctctatttgtaaaaaaagatacatacatatatatatatatatatacacacatacatgaatacttaaaatatctttaaggatactgccattatattcatttattaattatatacctgttctatattatatgcattataaaatatgtaaggtataaaattaaaagaataagataaagattaaataataaacttagtttcattcatggtatgtttatatggtatggtatatgtatatacagtatggtatttttgttttggctaaaacagaaataggtaatgcaattgagtatgaaccattattttttaaaaatttgttaaacattttgaattgtagaagatctgattctatagtttgatttattgattttaatggctgtatgactgaaaaatgcttcctcacaaaaatatatagatctaagtggaaaataaattgttggctaaaaattatgccaacatttttaatgaaattcaactgatgcatttccatctcacttgaagttaatcagttattcttgtaaagtagccacatgatgctaaacttaaacatttctggcaaatgtgttcaaaatgctgtcaaatatgtcaataattaaaatatttctaaacatccacttttacgacattctcttcatagtattaactttttttcaatcaacaactttttttttctttttgccataaaataatcagcaaagctctgtgtggcataaatggcgtttatgatcacctacatctcaatactaagtattataaagaatcattatattttaaatgtcgttttcaagaaattcactcctttaataacattgtcacacttaagaaaatttctagcttcaagttttgtcacaatatctttcctatgattactgtaaataatgattttcatgtgtgtagtactactactattttcttgctttgctgtttttttcttgtctgacaccctctcacttgttacagtctttccattaaatattattattttatttttattttaatatttcaagagatttattctaagccaaatatgagtgaccatggcccatgacgcagcctccaggaagtcttgagaacatgtacccaaagtggttggggtgcagcttggttttatacacttcagagaggcatgagacatcaatcaaatacatttaagaaatacattggtttggtccagaaaggcggaacaactcaaaggggtgtgagaggttccaggctatggtgaatttaaatattttctgtttgacaattggttgagtttttctaaagacccaggattgataaaaaggtaatgttcagcttaaaaataaagattgtgcagcacaaagttcttttgaagtcttatagtggctgtccttagagacaataggatgacagatgtttcctgtttagattttaggtaatctctttaggattgggagtgtctggaagaaaaagatctagctatgttaatacagattcttcatagatgcaaatttttccccacaaagaacagctttgcaggggcatttcaaaatatggctaagaagcatgtttttgagtaaaatattttgatgttcttctttatcttgtaatattatgccagagtcaggttggaaagtaaataatgatatatagggttaaataaaacccaacctgtctgatgcgaatttgtgatttgtaggccatgactccccagacaccttagataggagtaagtccttaccagaatttgtgagatatgattaaagtagtgctgtgagagaaatgtttatccttaataacttatattagcaataaaactatgatcattggtcagataagtatttatcttaaaacattatattaattgaacaggagagtaaatccaatgaattaaaaaggaagagataatacaaatgaaagtgaaagttagtacaatagggaaaaaatgataaggtagagatcaacaaatcaaaaaatttgttctttggaaacaaatcaacaaaatagacaaattgcttgcaagaccgatcaagagaagaaaagagatcacagaaataaacaattttatgaatgaaaagttgagcacagccctaagtagagattacaagataaccaaaggtaattataagatgcataggtagttcaattggggaaggataatcttttcaacaaatagtgctgaaacaactgaatatctgtattttttaaaaagaaaactttgattcttatatcataccctgcataaaaattaactccagatgaatcatagacacaagtgatatggctccaacgattggaggaacaccagggttcttggtcctcatgccagtttagataaaacgacacggacacacatggagtggttttaaggagcagatagtttaatagccaagaaggaagaagaaagcagaaggaagaggctcccccatatggagacagggaagggagagggggatccagagccgaaagaggaggtcccccttaaatattattttttaaagaactcatttaatgttaaacttataatttctctaatatagttttccttttagggttaatagtaaaaagcaaaatatcatatatttccttatttaaaaattgaatatcccaatctaaactatatagaaacactggtgttttgagctagctgtgtagcaattctaccatttatgaaagagtgaaagtggaatagaacaagatcataatgttaaattaccccttcaacaaagatatgcactgtggaaatgtataaagtgatgataacatgtctctttaagtttttttgagaataaagtaaggtcgctgttttatgtagactcatagaaatattgaaattctaaaacgacatggtataatttttgaagaaatcttcagttcctgaaagagggtagaacagaggatgttttctttttattttatttttccagaggttattggggtacgggaggtacttggttacatgagtaagttttttattggtgatttgcaagattttagtgcacccatcacccaaacagtatacactgcatcatatttatagtcttttatcctttgcctccctcccactcttcccgccaagtccccagagtccactgtatcattgttatgcctttgcatcctcatagcttagcttccacatattagtgagaacatacaatgtttggtttttcctttcctgacttacatcacttagaataatagtctccaatctcatccagctcactgtaaatgctgttaattcattcctttttatggctgtataggattccatcaaatatttatacacacacacatacacacaccacagtttctttatccactggctgattgatgggcatttgggttggttccacaattttgcagttgtgaattgtgctgctataaacatgtatgtacaagtattttttaagaataatgatgtcttttcctctgggtagatacccagtagtgggattgctggattaaacagtagttctacttttagttctttaaggaagctccacacggttttctatagtggctgtactagtttacattcccaccagcagtgtagaagtgttccctgtttaccacatccacgccaacatgtactgtttattgatttttgattatggccattcttgcaggaataaggtggtatcccattgtggctttaacttacatttccctgattattaatgatgttgagcattttttcatatgtttgttggccatttgtacatcttcttttgagaattgtctattcatatccttaacccactttttgatgggattgtttgtttttatcttaccgatttgtttgagtttgttgtagattatggatattagtcctttatcagaggtacagattgtgaagattttctcccactctgtgggttgtctgtttactctgctgactgttccttttgccatgcaaaagctctttagtttaattaggtcccagctatttatctttgttttcactgcatttgcttttggattcttgaccatgaaatccttgcctaagccaatgtctgcaagggttttttcaatgttatcttctagaacttttatagtttcaagtcttaggtttaagtccttaatccatcttgagttgagatgatataaacaaatggaaacacatcccatgctcatggagggatagaatcaatattgtgaaaatgaccatactgccaaaagcaatctacacattcaatgcaatccccatcagaatgccaccatcattcttcacagaattagaaaaaacaattctaaaatttatatgggacctaaaaagaagccgcatagccaaagcaagactaagcaaaaagaacaaatctggagacatcacactaccagatttcaaactattctataaggccatagtcaccaaaagagtgtgatactggtataaaaatgggcacatagaccaatggaacagaacagagaaccagaaagaaagccaagtacttaacagccaactgatctttgacaaagcaaacaaaaacataaagtggggaaagggcaccctttttaacaaatgatactgggataattggctaaccacatgtaggagaatgaaactggatcctcatctctcaccttatacaaaaatcaactcaaaatatggattaaggacttaaacctaagacctgagaatgttttcttaatggtacagtaatcctttacagtttaaataaactaaaaggaaactgcctataatttatacactgttcatttatatgcatgtagctataataaaatatagactttcatagattcagttagaaatttggctgccttcccagcaaaaggcaagtatataaaaactgaatatcctcatctgtttaacaagttggccttgtcaacccttaatatatatatatgttcagtgataacacatctttttactatgttggaaaaattcatatgctgaaacacagtctatgttttgacactgataattaacagtatgtatttttgtattcccagctagacttctttcatggagcaaattgggcaaattctcaggtcactacataggcaatagtctattgccttattttctggatatgttttctgttctctgctctaattgaatacattaaattaaggtacttatcttcatcacttttaattttttatttaacaaatcttcatatttaataggaaacattataatgctaaatggcagactttgtgggagggcataaaaatgtgaaggacagccagcatgttgtagaggaagaaaaaagacaggcttaaaaccaggccacctctgaacctgaaacccagacttgtcacttacttgctgtaaaactttaagaaagtcacttatcttgcataagtctctgttttcacactgagaaaggaggttaagtgttaagcgaattatattgtttgaaatggggtgctcctgcaccctttgatagctcagctggtagagcgaaggaccgtagactatagagacatctgtgaaatgcggtggtcctcacagtagacgatcaagaatttttacctgtatcttacagaagaagaacatttgagataattaatttttttttagcttttactaaaataataaatatagtatttatcttgtgtaggaaatttaagcattgcacaaaaggtccccaactagagatatactgtactttaaaacaagcagcataatgtgcttccatcaggcaatagacaagtaggcaaaaacatatttgacttttaggcctctgctttgattactgaaaatgtgttgccttctaagcagatatttagtaatatttgtttcttctacagtggtgtgcaacaacagttgtgatttgactcattgcctttcagttcctcaagcaatatttggctatgtaataaagaagcttattaggctaacggtattttaaaagatgtttagggaaagagtcaatgttggtcttggtagtcatagcacatactaaccctatggtcttttacagctctcatacttatgaattgaattgactccttggtgtctgttaaccaccataccattatgtgaataatttcattgcagcctttccaacttaaagctaatcttttttaaacatgaaaaataacttttatctctcacaaataagctattatgaatgttttgagaccccaagtgtttttgagttattaaaattgtaagatggagcatttattggaatgcgttttgtttaagactaatatgttggcaataaagttaaaaaaaagtgctatggcaagtgtttgcttaattttagttagagagaaaaacagtcactgttaatgtattatagcatttaatgacacttcggtgtgtgataaaagcaaaaagtactttccttagttaaaaagatgaaaatggctgactttcttatgtactctgaacttcttgcatatataattttctttttttaaaggtgtaatctgtcagctaatcagcaaagatttattgtacaccttttctgcagtgtatactgtgctagttgttacgcagaataagtaagacaaggtaagtggcttcccatcatattggagaggcaatcaattttctatgtgaaacagatagtaatattagctgatgtatgagtaagtgacaaaattaaaggtaccaaatagcatgtcccagtgtattctatgaaacattatttctttgaaatgatctgggaaaaagattctacagccaaatgtgtttgagaaacgtggcccactatatagctcttttaaagatttacagcatactctagcatattaaggggtctgaggaggcctgcaataaagatgcctataaaagttacttgactaagcaattttccaagcttatttggtcgatgtcctgaatatctcctacaggaacccactttaggaagtgctccttgatttagaatctgacccaacagagtgtccccttaaagggtggaaaaagcttgctttttaagactaaatgctgatttttaaacaagtgttacatttatagatgcattattgattccagtcgagactgttagaactttcaggaggaaaacttggcaagacatgtaagagtataaaatataaatgctctttagcttaggaattacacttctagaatttactcttgttcaaaagattttaatggctaagccttgcctctgaactaagaataatctcgtcagcctgccatttaatatcttccacaacatttccttactacaatttcgggtatactagcatgcacaaatatgtgctatataaatgaagagtagagacatatttacagaggctagaaagtttggaaaaagattcatggagagggtggaacataaagcagccctaatggcgcattgcggagttaaacgtgtgtgtgtgtgtgtgtgtgtgtgtgtgtgtgtgtgtgtgtgtgtttgcgctggtgatactactctatctcaggcagggttctaagtactttattacattatttcatttcacaaaaccaacccatgatatgaatactactatttttcttttttattgacatgaagagacagatttcacagtgttccttgagtcacactgccagtgaaagtttgagattggtaaacccattttagagcctgaaatttagctacgttgttttattgtgaccagaatattttctaattaagtcccagaatacaaaatatcttataaatcttgagagaaagtgggattttttttccccattgtactgaaatttacattatttgattgagtttttgatggatataaaaataggagaaattatgaaccattgccggtacttaaattgtaactgtacatatgcatacaaaaaaatcagactatgtaaattctgaacttctcttggttggaggtggaaccagttaaactgagtatctgcaccttcacatttgactctgttaaataattttatggtttccaacatgggtaggatacatacagagaagttttgatgacttgcctatttgttttcttttaccatataatcagtaagaattgagattaaggcatggtttgtgaagcaagctaatctatccactctccacagaaggatacatgagaaggacatctatcttaagacattgactggaagacatagattgtctcaaaatcacaaagaccctaagggcattccaaaattattttttcacatttttagtccattcttattaataaactgtaaataatgatagtgtatggaataatcaattacatgataaatcttctttttattataaatggaagagaaatatttttcattgcacaaaattctaaaggatttttttcaaactttttcttaaatgtattagttaactgctattatcttaggaaaatttcttccttaattttgaatgtctttattatttgttttttctttcatgcattaggctaatacctgaagtattacattatatattacaatatatattacattatatattacattatatattatttcagtaagcctcagaaataatatgtaatatataaagaggacagagtagctattaataaacagccattatgcattcaatattttaggtgttggatatccaaatgagaagaggaagtaaaagacatataaggaatagagaacaatcaaaacattggttgttttatgtttttaaagctctcaaatctcattgaatgcagtaaactgaccaagaacttcttgtttatctggtatccagtttcatttggcattgtgcggcgacttctttctgagaaaatagcagaaaatctgaagaattttaaaactacaaacaaaagccaagtgatgacatagatttagtagaacataacacaacctcctaacctcctaaatattctctataatacaatgctatgcaatggcacatgacatgattgcagtgccatgatgcagagcaatgtcttgcggtctcagagaaaaaagtcaattttatgtatgattgttttcatggaaaatatattcaactcaaagttttcaaaattgctaatttatatatgcatttgtatattatattttttatacataggaagttgaatatccaggttaaaaaaacatttaaaagaaaattagttggtcgagcaaaagaagcaaatgtgtaatatttgaccatgccagtttttcgttatttacctaattatgtatatgagttttcaaaaattagaacttccagattaaaaagtttgtaaccattttctatagtttctctaaagaaatgaaagcataaaaattacagtttcaaagataaatgtcaatcttaatttctagtacctggaatttccacatttatttttgcgggaaaaagaaaactattgtatatagtaaaccttaatgtgctttaatagactttgtattgtgttttaatagcaggtctatttattgagatttattgaaaataaaactattaagacaattaactttataagctaatccatacttacaatattttttctatgtttcaaaaagtattatttttgaaattatttgtttcagaaattaaccatttaaagcatgttcatgcatatcttcatttgtggtcttttgttatgtctgttctcaaatcttgtactatattaattggcaacattaatctgtttccacaataattatagttttaaaatttcttttgttcaagatttaaaaatttgtaaaacattgctagtgtttatcagaatttgaatagcgtaaaatttttttaataataatatgaaataaagtaaaataagatactttttactttaaaacaattatgcagaggataattgttgtctagttttcttaatagtaaattagatttatttttaattaagttgtggttgtacattggtgtaaaatgtctgttccttcccccttatatttttctggtttatgcactcagaagataggaaataaccaaatagaaaaagttcagctttattttatttatgtataaaataagaatgtttaatcttccagaaaaatgcattgtttggatttagtttattatctaaacagtaaagcaagatatttaatgtaagcaagtttttctatttaaagaaattagtaattatttcaggcatttgtttttaatgaatattttgaaggtattatggagatactttctccttaagttgcataactgtacattcaatatataccttgcatctctttagcagttatcaaaattttagggctaaaagaccactttgaacaaaatttctagaaactcgttacttacatgctttagcagaaatttaaatcatgaagttaaatctactcagtttctcaaaagcacctgttatctctgacccaaggcctttgtcacagttgattcttttgcttaacacagcagctcttctcccctttcctgctcttttcatttagctaatcactgtttctccttttgagtctctgtgtattaatccagataggttatgttatgatgcattaaaacaaaaagactaaatcttagtgacttggcataacaagctttttattctcattcacacaagcctatcgtggattgacatgtctgtctgtcatgaactgctgtcattaatgtgtcgctttccagttgttccatcttgtgatacttccatcttaacatgtaacccttcaatagctgcacagagaaagacagcatgaaaaatcatgcaacacttttaaagtacttatttctggaagtataatttgcccaagtattcaagaagaagaaggttggtgggcattagtcatgtccactaaaccttgcataaatgaaacattttcttgtctttttttgatctctgttctgccctcagccttctccagatgctctcataaccacgtgttctttctttttcatagtcattattataatgaattgtttgtctaacttttccccttctacattgtaagctccatggctccatgacttctgtgactacatctgctttttctctccactttgtccacattaactggcaaacagtaaccagccaaatatatttattatatattaaatatatatgtgttatatatttaatctatttattaaattaatgaactaatgagtttctatggcttgcaatcttccagttagagtgctaaatgcttaagttggatttatgttgatttcttttggatctcccatggtttcatgtatgattttcacatggtatgcaacaaataaattattaatgtatgaatcaagtatatatttagaacatcttatatgcttgacctattttgaggaaatccatcttagggaattattatctctcagtataagtaagagaaaacttcgacttttggcagccagaaataatttttccatgatatttttgtcaacctcctccctcacccaattaacaaaacccttattatagacctaccatggtaaagacgatgctaggaatttgctggaggaaaaatgggagaagacaattcaaaggaatgaggcatgatctctgtcctcaaagagatgaccatctctatctgttagggataagatgtacatataactgttgaaggaagaagtagaagtacagcataagggatacacactgggactatgaattctggatcatgaactgtatcttaaagctaggaatatccaggaaaattttatgaatgaagtaacatttgatctgggccgtaaatgcttgggcacattgaaaagggcagaagaccattccaaactgatgaaagtataaagatcttctactatatctacattgattaagtaggtgtagaaacataaatagtgcccatcagcattctaagttctctttccttgactacaaaaatagaacataatgactcctaagtctttttttttttttttttttgatggagtctcactctgtcgcctaggctagaatgcagtggcattatctgggctcactgcaacctccatctcctgggttcaagcgattccactgcctcagcctcccaaatagctgggattacaggtgctcaccagcacgtgtggctaatttttatagttttttagtggagatggggtttcaccatattggtcgggctggcctcgaacccctgacctcaagcgatccacccgccttggcctcccacagtgctgggattacaggcgtgagccaccacacccagctgattcctaggtctttttatgctaggtagggtcatgtgactaattcagatcaatgagctctgtttgataatggtgtttattgtttctgggacaaattatgaaagaagcttgaattttatacttgatttttccataattccttctcacatcttcaataaatttgaagctttatgttgagaaagggtgtcataacatgatagggaatccatcaacatagatccttgccaatatgaatcagaagtgttgcagcatgagtaagaaataaaccacttttgcctaaaaccactggtttttgggttttattgttaccatagcatattcgagtctatcctgaccaacagtagaaatatagtcaatgccccattttatatatatatatatatatcaatcacagatatataatttctaagggagttggtgttagaaaattaagatacaactcaagtttattcactataggtgtgtctgacacattgtgcttctagttcactctctgtctttctcctttaaatctaagactatgagatttaatagatatgtagaagaaacccaaggcccacatagtgtgatgcccaaatagtagacagtaagtagactgctaattgtttggctaacatttgatcaccttgctccacaatattttacaaattgattcctcctcacattagtcagaaagaaacttaagacttgcatgttcgttttttttttttttttcttcttttttctttgaggtggagtttcgctcttgttgcccaggctggagtgcaatggcgtgatcttggctcactgcaacttccgcctcctgggttcaaacgattctccaacctcagacttccgagtagctgggattacaggcacctgacactacgcctggctaattttttgtatttttagtagagatggggtttccccatgttggccaagctggtctcgaactcctgacttcaggcgatctacccacctcggcctcccaaagtgctgagattacaggtgtgagccaccacactgagcccccacttgcgtgttcttgaaagcagtatgaaacattcaactcaccagtctaattggagtttttgtctatatgataccaaattattgataggcttttaagaactgaagtgatatagtttgatataaagcagatgagaagttacattaaagaagcttatgcaaacatacatttaaatgttagtctaagaagaacacactttaactgctctttctcacatattcaattacacaaaaatgatagtttatgtttaggagggatctatattatcagtaggatgaatactcatcttggaggctaatatttgtggtcagctgtatgggttaagacagctatgtgagttacggaatctaaggtttcagtattctgatgattatggtggtgtgtgagttcttggtaatggaaacaaattataaccttttaaccttttggaaaattgagtcctatgatatcagatgtgtaggaaacagtaaaaataggggaaaacacatccagtgcaacatataggatcttagttaacaattctctccttattttcaaacacctgatacatttaaaggacccattcttgaattttaggtaagaacaaactgctgaaatcattcatatagttttatacttgggttttaatttccttatgcgttaggatgagtcaaacttccttgtttcacagcccccactttataaaaaataagttcgctgtgaatttcaaacatgacctgagtgaacaactttatgaaaataatgtgcatgtgtaattacatgctgtcaattctgttacatgagggaggattatccagtttgcatattaatcacgctcacaatttcctactttctcttctgagtacaatgctgttgtaaggactgtatactgtgatgaataaaatggaaggaaacagacactacctgtgctgtagaaggtgtgacagggtgaagaataaaatgggagtaaagtatagcaacatatatcaggatcatagagatcagcgtggataaaccagaagatgcgactgaaatgatgtctggaaagagcagcagagcagaattgattcctagatgtatactgagaccaactgctctatctgtccgacctcagtgcagatggctcactgtgtgttatccttcacaatcacccttgacttcaattcagaaaagaaaaaaccttaatcactgtgatcattattaatattattaatagggtattgatttgcttctgtttttgctcttgtaacacaattcatgatttggcaactctaggacttttaaaacctgatactaattgatagaatttttaaaaatagaaattggatgggagagttaggctagaattgctaataattagagtatatttagaaaactatatgcatttgcttattttttaatgttaaactagaaaaaataaacataaattagttttaatacctttgctgagataacttgttgggtaatcaaaaatcacaaaatgtagctggtttattatattctctcaccttaaatgtggcagattaattaagggctgatatattggttagcactaattttctaacttcagttgtgtagctgatgaagtttcattttcctctaaatgggtgatgctataaggaagggtggtagagcttaatgctgcctgtcacttcttaccatacagagggaaagaaaggatatgatcaccagtcaaaaaaggaagctacaggttgtagttctcatctctgtacacaggttgtagcataaactgatacaaagaagtaagtggaatcacccccttagcccatgggccccatagaaagcggaatactctcccggggttcggaggaggcaacacttctaccaggttccaacagatgcacaccatgggtcctgtagaaagctgaatcctctccgggggttcagaggaggcaacacttctcctagcaggttccaacgggtgtacatcagtgtcacagacatggcctgtctcccatacccttaggctattccagaatgaatgttttcatgtccttttattgttgcttccagcaaagtctggccctaccctttcagagagtggacagattataaacactaggcatctgatcatattaaaggttgcagggagatctgagtctcaaaccctgctgccccactgcaggaaaaacaatctgctcatccttttagaaaagttaactctagatcagtcacatgtttaaacacagtactgtcatccaaatgaaaactgctatgttattattcttttttcctaaagtgcttgctaaaacacagaaaactgctgtatcataatcaaattccaccaatcaattttcagattagaggcccatagcctttacttccttcagaaacaaaagaaaggaggtctcataacaatgattaggaggtttcaggatcccccaaagctcaccaaaaaaggacagtctgagatacctcttatcaaggcagatatattatgatcatgagatatttggaactaaaattaaagtgtcaattttcagttaaaaacggaagtgatgtagtttgaaattgtttttatttccgaacatgtcaaccacttctcgactttgtgattttgataaatgtcagcctcacctgtttgtttccttggctttgtgggttgtagcaagctgtgcacagtggtttttctggtgtttttcagatctcatcagaagatgccagaagtggtcatcttaagagcttgttcaagggctatactttagaggtacagtctagtatgcacaacccagtagaattatctggaaaataataggaaaataggtgttcttttcttatctatccactctttttctctaagaaaattttggcaagagagagaactggtggatgattttgttttttatttttccttgtagaccaaggaaaatagttaattcttgagtggttaattattccaaaggacagatgtgttccaacaaatcatggaggggtggcatggatttgtagggtctgtgggctatggcataggactgctgggttcatatcccagctttaccacttagtgtgctgtgtgagttgctgaacctactttaactcaatttcttcaactgtaagatgtgtataatcatagagttcttgcaaagaagaattaaatcttgagttagctaattaatacagagtgcttagactggtgctggcactaagcaagcatctagtaaatattagctattatcattacaggtccacagtcactcatgtaaaacatgtggggccagatgagttttggagttaagaatattttagattttagaagttatgtatactctatattatataacacccactataggatttggggtagaaactcttaaacactttaatatttccacagccaagtctgtaaaatagttacattatgtgggaagaataaaaactataattagctcaggtcaattaaggttaggttttgctatgaaatgagctagcaatttttttttgttcagactttttaggttttcaaatttcaggtaaggaactgtgaaactctattatattttctgatgttcctgagccaaacctgactctaccatagaatgacaagcatccataaggatgggaacaaacacacctctgcagttttcaaagtgttactggctcaggctcactttcgggcaagccggcttatatcagggtcctagtgttcaattagaactgaacagagatcacacataaaacaataaggtttagttaaatggttgacttgaaattctaaagaagaaaataccaaatctgcttcctaattatgatatgtccagaaaccataactcattttgtccttttcctccattccctatatgcagtacatgatgatactacagactcatagcattcttttggttaagaaatttaagatgaggaagggattttctgtacaatgcaactggcaatgagaaaagacaacttgctaaaatatgaggttgagtgatcttatggcttagcctatgaatatcttctcttaaaggcaaaatccatgcctttcactctgtctgataagtggtccagatggagtattaagctgaatttctttctcattaacaaaaagtaggagtgcctaggaaccccatgcctgcagaaattgaacttgagttattattcacttcttatatctctttaaatttcaaaattattttgggatctactgaccatggcaaaactcaaaatatagtttacacaattcagtttatgtgtctccagtttttcagctttcctacagcagagcatcatcagtgaatgaactttgtagaattttgcttggcatttagaggaatgatagctaaatgaatgtattctcacccgataattccattatagtctccaaggctcaccactcattaattgcttctctaattgctttatgagaaattgctatttgataggtttttctccttattctttctaatgtcgttgagagttgctaatttacttactagataatttaggataagttacataatttatttgagcatttacaaataatttcaacatgctgaatgctgaattgcccttgtgatatagtgtgctctgttgatctattttttgatattcattaattcaaccatttattctacaaacaagttttgaatgtttataatgtgcgaggcatcgatccaacaactgtggaatctataaagagggttggtgtcctaaaggagcttatattctattagggaaagaagactgaaataattagaatccaaggttgaaagtgatgaatgcagaggcctggacaaagtcctatgggaattcagaagaaggatggagattatttctagctggggaatttgaaaatggtttaacagaagaaattgtcttagcagtatatcaaaggataaatacaattcatttttattaacaattgattaaagtattgccttttgttgtccatcaagggaagactgcttaggtaaataatggcacttctaaaattagagagacattaaaaaatatgtaacagccagtataatgtatacactgacaattcagagtagatgtttgactttttaggatggacagatgccagcctgtatcctcttctggtacatgctgactacatattgagtctatatacagtggaatatgtggaagtaaaatgatgattcaaataacattttttaaacctggataactgcaacatgctggtgcattaaagagagcaagataagcaacaaaagttataaagtatgaattatttgtatataattgtttgcatatatttaaatctagagaattgtcttagtttgaattgtaaaatttcaaatgagttttacctattctttgcatttttctgtttgagtcatttacagcgactatgaatcaattttataaaagaaacaaagtattttaaaagccatgtcaaaaaacattctgaacaatatttaaacagatacattagtgaaaaacataacaattagaaggaaattatagctatgtataggttatgtattcacgaaaataatctagttggtggaagcagaaatgagataaaaataaggtggatacatatggatgaaataaagttggaaactagttgttggcagatcctggaaaaccttgaagaatacaaatttggctttatctaataggcaagtatggatgggggcagttgcagtttttgaatgagtaatgattactgagaagcccttatttagaagtttttctggaaacaacctttagaagaaatttttggtgactgacactggaattatggatgacatttaagaggttactgcaataatctacagaggcaaacatgacatggaatttgacagtagcatcaggaatgaaagtgcagcagagacaccataagtttttttggagggagaatgaacagaacttacagactgaaagggtaaggaaggcaaaggggaggaaagagccattgacgaatactggtagcattagcttaaataaagcaatttcaaaagagctacacattagtgataaaggttcagagaatcggaatgtgagatctgaaagtgatcatttttattcctcttatttcattgtatgtaggaaaacaaaactgaggttaagcaatttatcaaaagttatacagttaaagcttcagttggttttagacttatcagtttgaagtgccatagagtatcccaggatatctgataaacccattagaaatacggatcaagagctctgtcaagtcccatcttttcctttagtcaaaattgaagactcctccatagtcccatataattatacatacttctaatatagaatttacaaaattttatttgcttttattgttttcctccaaaagaaaaggaccaggtctcatcgtatatacgtatacataggcatacatatatatggctatgtatatataactggtactgattataggcgctcaaaattgtttaaatgaataaatgaaaaagaaaagtgacaagtaacatatatttgagagtctttctagaagttgttatagaagataaggtagttgaagtcctcaaaggagactgtataattacaatagaacctccttctcctgcttgagatatccacctatgtggatataggtatataggtttataacctattaccagagacttccaaatgaaagggcagtctcttttttgtattacagataagccaaatggcattatgaatagttcccttaaatcaaggattatgacactgaatgcatcatgcctctccacatgcagtctgtttctcctccctaagccctatcttggttaatagcaccattatccaggctatcagaaatctgaatgttgagctatcctcgtgtcctaaatctgatccttgttctatcagatttacttcctgaacatctcacaagtggatacctcattctgcccccatgatctcctactgctactcgttgattccaggtctcataattgctcttggaacattgcaataacttaccaagttgtcttcttggctccagttttatctatatcccaaagcccattagaaaacaaaattgtctttataaaacctaagtattgtttttatttttctctttaacaaatgctgcaaagactctcaatttctcaggttacaaatcatactcttttctgtggtggggtgccgtttgtgttttggtctatctatctaatttcaatgctcttccacttactgctccaactacattcacctaatcacagctcctcaaacactccatgctgttttgaagctggttacttcctttctctataatgctctttcttctattctgaagaattcccattcatctttagaacaagctcagttaacattcttatctgagtaacattttctaacatcacctgataggtctgatcactcctcttatgtaccttttgccatgtgttgtttccattatacattattgcatgtacatgcctgtggaacagaaaattatactataaattccgatagaatagagacttagttatttttagtcctgcaccaggtgcagatagcaaacatataataaatatttatcaccttttgcataaaagaatgatgtctggggagaccttttttttttttaaagttttatttgtgtccttaatataacacttttaggaaagagctgggaatagggacagatttcgaagtttaatgaataagatactaaagagtcagttttagtaaatgtggtaaaatatatgttatgatggaatacatacacacacacatacatatatgtatatatatataatggaatcttaaaaagaatctcagagtcctaaagagatcttagaagacctaaagaagtatatggaaaatcggaaataaaccaatgcaaaaatgcagacttgagtttaaagaagtgagaagacaacaaagaattaagatgaaaacagaaaggactttgtcttacacatttttatatctttagtgctgtgcagatagaatcattcaatatatttacatagaggaaagggatatgaggaaaagaaaggatgaaaaagacacagaagggaggctaaaataaataagttgaggaaatttatatttaaaacaaaatgaacaattaggttcaacttatctccaacttttccatgacattatcaacataggttctattcatccttagcttttagcatgcttatcatctataatcagactgtgaaactactttgaggccagtttatagaggtttttaaataccatgataagcactttgacttttagatctcttgtgcaggggatgctcttcctatttccttaaaataaatgccctttgggaagtgatgctttagttggattaagtttacctgactacaagaagtgagaaagtctccaagaagtgcaattaagaaggggtaatacaagtgtacaagcataaataacagtatagggattaatgtatcaattagaacaaaaaaaagcattgatgtatatcagagaaaaaaatagaaatttaaaatcagttaacttgtgggctgcaaaagaggcatgagtcaagtttgggagaaagattttttttcacactttgttgtaccctccctctgatgtcctttgtaaggtatcatagtgcctatgagaggatttttaatctacaaaactattcagagaaggcaagcctgttcagaaattttaaatggtcttttgatgtagctgagatgtcatgggaggctatcacaccttccatgctgacaatgccttaggccagtcatgctgatagggcagtgcagagacaatgtgaatcgtgctctgggtttgaatgtaagtgcctaggtacaagagttcagtgattttactatgcgacagccattgaaccacttattttcattatgaaggaaattaaacatctgccttcagaataaaataccatccatgactatccaggtatgctgttactggaattgattgaatatagctttataacatttcatatttattttgcatttgtctttttctagctgtgaatttctgattttgagtatcatacaccctctttcctttcataccttcatgcctcattgacattaaggggaaaaaatacagatttgagaagcaatacttacaaaagcatcgcaagcaggccaagataatacagatattttcctcaatcactaaagttatggattaagttaatcagaagcagcatttgtgatacacatagttttattttttttttttgaaatatacattttagtggtatttctagccttagtctgctttcagtagacagatccttgcaactatgcatctcctattatgaatgactggcatgagatttgtttgacattgctgactagacactggtattaaaaaacagtattcaatgttttcattttatgctttaatacagaaaagcttcagccaatttgtggtgtttagatttttgaggaagtaaataactttttaagttatgctgtttctaaatacactatttttgttttcttacccacagaatattatgtctacatctgattattgtgataagtggtttcaaagtcagcccaaatgatctaaaggaacctggttgttttgctagtcttttatgtgagatgcattcctaatgcaatctgtggaaactcttgtgaacattggcacagattgatgactatatgtacaaaattccacttagtggttttagttataagggctatttttaacaaagtttgaggaagacagtctatgtataattcctttgaagcatattatcctataaaccctcaaaaatggtagcatatctttgagctacgaaatgaatcattctaattgcactaaaacaacaaaactcaccaactaaaacgccatcaacaaaatcttagtatttttctctgacagagaataaaagttcaccatcataatgactttttttttcaaagcttttgatttttctttcctctttttttttcttactctaaaccagtaggtttataagccgtgtacttgaacagcaaagccatttgccatttggtagaactggctgacatttcattttttctgggcagattgcagattagtttgacattattttgctgagctctgtgctacatcattaacgtattgcttatgactaaaagcaaagtagtttcattttgtggcataataccctacactctctacaagtagcaaaaagtatgatttttctttgaaaatgactaggtattgcttcagtcttgtgaaaaaaaacagaattctattaatgtaacaaaatgtatcactaaaatggtgtgtcagaggggaacgaaaacctctataaaggcatgatgtgtttactgttgatatctctaaatcttggctagaaatgagaaacattcatgaaatattggacttaaactgagattacatcagtatggtagcaatatcgtacttgtcaactaacagaatataactgcttggttgtaccacatgaaaatgaaaattcactttttgatctaaggcataattcttttcctgtccatgttagataactttttgttttcaatgtaaataaagtagaggctagggaactgtatcacaggttggctttgtttgggaaatcgggaataacaaatggctgatcattttttaattaaagtggtaatcaaacaattaccaatgctcttatttcagttgttaatatatctgctcacatcctctttccccccactgaattaactctagtatgaaaaatttaaaaagccacattgtacaattgttgatttctttcctacttaaggagcaattgttgtattataattatatatgatatggatgagttatgttgaacaattcacttgctgtgatttttccctttttttcattatgttgacatattttatgaagacagaacatctcgttgctgcaaaatgctgcttttaatgacagtaagcacctaaacgaagtattgtgcaaatgttttggtcacacacaccttaatgtttaaacaaaacatcaaaccaattagcaagccatgcttcagagatactgtatatagcctgatagcaggttctaacgttttttaaaatctcattaaattgatgaacttaattcttcctacttttatggtagcagataggaaatcttgagggacaaacaataatttcacagtcatctgagattattacactgattaccttttattaattcaatttcccatttgtttctttgacattttgaaaggataaaaaagtttttttgtgtatgtgtgtgaacttgcttttgaagccccactatttctaataataaaaagcgttcagggatgatgtacattgcttcaacatactctattcatgttgtacgtcagagatgacttggtttctacagcgtcttagatagaaggctattaaaccagaaaaaaagtatgcaattttcaagaatgatttaaggcgtatctcttttttttgttccagcatgcttatcttctaattcaccctatatgttaggttttatctgaaggaaatctacacattcagttttctccagacacaaaatctaagagttggggtataaggggtaggaccacacaaaaagcaaaagacttagaaaagacattaacaaggattacatttctttgattataattatcttattgctattaggtttgttctgctttattttacgttttaagacttatagtaaaaattatacccaggctaaagtttcaaaaacttagatagagagatacacaataaaatataaaagtagtatttgaaaaaaatgtgattttacttctggttgcaaaattgccttttatatttttagataaatatttaccaacttattttggattataatcagattattgatatggttatcaaaattttccttcagtgaggttgttcatacacattcagctagattcttccaatggataataattcttagtcaaaaggtcaaatttattctagttttaatcaatgtcccattattgcaatccaaatgagcttaatattacccataaatattgtgtttataatttttatcttcattaggaataaaagataaaaattctaaatgtatggcttttgaaccaagtggtatggtgttggtttcttgtagaaatggtcaaaatactttgaggtatgctagctgttttagttttctggagtaatgtttagtatattattctaatagacctagaagcaatatccaaacaggccggagaagttaaagtgctcctgaaactgatctatttattcccgtggaggactcttggatctccttgttggttccttgttattggaaaatcatatcaaatatgaattcatattaaatattattctttcaataaacactgaaaaggaaattgtatttttcccatattgttgacaaatcaactgaaacaactttattttgcttaatgagtattggttccagccagatgggctcattgttatttcctcaaaagccagtagatggaaaactaatcaacattttaataagttgttttatgtacccaaaataagagtagaatgtgtgtgtgtttgtgtgtgtgtgtttgtgtgtgtgtgcgtgtgtgtgtgtgtgtgtgtgtttaagcaaatcagggagattatatgttggggggagacagaggctaaagcaatggcttttttaagttatttatctatgttccagtgtttgtggccagatgggcatctgtgctacaaagagaaggtaatattattggcaagatgaaatgatgtgagaggatttcaaattgtcctatgaacttatgagaactatcaatagtttctctagttttctatttaattgaagaaacatgactagagtcattagatgacctctacaaatcattaatgatgcagctggagaggaattctaagactcctattttcgagtggactgttttacatatgccactgccatcaaacaaagcaattcaataaagctagaggtaataccttgctgtgagcagatatttattagcacatgcctatcatactaaaattttcctaaaaccatctgcatagtattgtttgcaagaagtattccgaaatatgatggagatgaactattcagtttcagaatgactgcaataaaagctacaataaagggaactacttattgccatagaaacaagaatgtatgcacaacaataacatttgaaaccaacaagactgttcataatagcatatcataacctagaatcttttgcttacagtatgattttggtttgtgttattactgtaaagtacaccagtggcttatatttgcaggactagaactgtctcaagatgctatgatgctcaattgcatcatccagaatttagaatcagttaatctaattttagtgatggcaactgaatttccaggcacacatataaatttgacagtaaagtgtagttctgaaaaactatcctgatctctgtgtttgtatgtggcattgtgcattatttgataatactagagaacacattattttctcatccgaatttttcttataattaaaattaccattttaagtattggtaaatttttttacaaataagtaaagttttaattgcttattataaagttttatgatagacattatattcttgactttcttatacatagtaggttaaacataattaaaatttatcttgacagcctgagctcataattaagactatcaatgataatattttgtgagtcagtaatattgacacacaaatgccctcagtatctttttttttttaaattcaaccctgcttgtatttgctctaaaggatccttgtctgctatagtgtgtccttcctgtcaactgtggcttcactggggttagtactgcttctttgttttattcatttaattaccatttgtgaatatgtgactgtgttagaaatgtctgtagaacaaggacaaatgggttccgaataaatatctgagatttttctgataattaaaatgttgttgccttgatgaatgttttgtgaaatttatccagagacctcctttgtcagcttagaattccaaccaaattttatgtggtagtgaatgctagattgctaacttgttgataaatgtgttattattataatttgaacgtgtcagatatagtaccacacaaaggaaaaatctggcatgttgaaaaaaaaagagaatttcagggttcatctagcaaatcaaagaatattgaatcaatcaacaaataatcattacttagaggcaaagaaattgaactgtcacttcataccattagttagataatgattaacacagactcttaaaataaaaataaaagcttctgaaggccagttcacttctgttgtagatagcaaattttacctttcagttttatttagttctttgaaaacttataactaccagattgtaatagcaaccatacatagcagaaacataaatatttggtgaaaagacatccccgataggaatatccaacaaatataaagtactgtaatctaaactccaaattccaaaatgttaataaagccatcatggaaatggaagaaaggaagtaatctgaatacttgaaggcttttattttaaagttttacatgatgaaatcagaaaattgagtatttatatcaactataaagtgtcatctcagattaattgcctaaagttttaaagttaacagtttggatatttgcaataaagtcatctgcctaggagggatagtagtagtaagtaacagacaatctacattatctacatttcttcatgtaggtttctagtgggccttcttttatcttttattttctttgctaacatgacatctctaagtacattattttttgtgtttcatactttggattctacatggctgagtcataaacacaattctcaaggtcctaagtcatgttcgtacatgaaaaaaattttgttttggctgtaggatttttttttaattttaacataccagaaattttaccttcgagctctgaattttcaaaaagtggcagcaactttatttagaagtttcttctcatgcctcagttttgtcgcagcaagttgatagggctttagctacattatctcataagttctttaagattcatcgattcatattaaaaattggagaataagtgtgcatccattgatatttggcctttgaatttgttccacctgccaataaagtaatatttcttggcagcttgccatgaaaggtcagcacttcttggcatttttttcacctgatttttagatattcattcagaaatagttatttttctctgtggtcaaagctgtggtttatgaagatatacattcttttgcaactccatcttatagaattttgagtttattctgacaatttactttggtgcatataaaaagactgcttgatagtgccagtgtcagtttaagtttagatctttgtaggacatggcaaagaacataattttcattgaaaagctacataaacattataagacctagtacttgatggcacaatagggtgcccatagtcaatgataatttatacttttaaaaataactaaaattgtgtatttggactgtttgtaacacaaagcataaatgattgaggaaatggatatcccattctccatgatgtgattatttcacctcacatgcctgaatcaaaacatctcatgtactgcatttatacacctactgtgtatccacaaaaatgaaaaattaaaaaaaggaaagttagataaaaatgtatgaggaagcaaactttaaatgtcaggtctttctgataactagaagcatacaaatatgaaactacagtcttgtgcagtttgaattgctcactagtgggtatattcaagcagttctagttataagatgttttctaaaactgtgaataagagactggatgaccttgcctgaaagttctttctaatttaaatttccttgatttacagatataatgtaattatattgaccttggatttttgcttaagtaaggtttccataaagaattaggctcagaacatctgtttttctgggctaatgcatgggagtagtcttgatactttacatgatatattagagccattaatacaccagaattttaagaccaatttaagtagtgcaagcaagaataatagatctggggggaggatatctgtagtttgcaaaatttaatgaaaaatggaaatcaagtcttgaggaaagatgggaatcatggcagccctgaatctcagtagtagaatttgcagactatttgtagatgtctcagttttaaaacacttctattgctacatgtctgtgttcagtattcaaatttccatggaaaaccaattgatttaaattaagtcataacacttctgtggccaaagcagtgaattagaaaggaagttggtaggagaggagaaccaagcactatgacttccagacccaccagaaccaaggttcagtaagaatattggctgagagtgttatatcgaagatgggatgggctaggaattagaagtcgcccaaaggaccgggtaacagatgttacaccccagcgcacacaaccacacacacacacacacacacacacacacacacacacacacatacacacacactacacccttatacaaacccaaccaaacaaacaaactgggatgaaggtgagaaaggatgctgggcagataaaacagttagtaattttccaatctatttctgtctccccagtgatctctaagatccttgaagtcaaaattatgtcttgttcgctattaagtttccagcctctcccacatcctatggcacatagcattttgtgtagtacatattttgttaaaaaacaaatgaataaatgagtgaatgtacttaagtaaaacagtttagaagcttatggaaccccctttcatagatacgagggatgcaatttagcaagctgctgactctctgatcttccaaagctattaaaacacatgccagccactggatagtgatggagatgcaaacttcatctttttcttattccctctttccttttgtgtcctttcctttcttttattctcccactctccctcacttcatcttctcttttgttcctttcctgctttccttaatatgtactatttcgttacagatcataaagacaatataaattatttttacttattagcaaaatgtaattatacacaatgatatttaaatgatagttattctgtttgtattctcataatagttgaacacagcagatggactgtaaaatactgccaaaaagtcttggattctaaggtgtttttactgtttcccgtgtttctagggaaactgtaataatcaggtttttcatctgaatcctttaaagcttttatgaaatccagttcaaaagtagaactaatcatagtttataatgagctttgagagatttttcttgtaaattcaaagaaaaaaaaagaaccataagagaatttcaaatgctgttaatgaggctgaaatttttataaaaatcagaaaataactatcttaaaaacaaattgcatatatattattatgtatgttcactgtatccatatttgaataactatcaccagcaattcagggctctttgcattttatggtcacctaatctctaaagattcttctttatcaataacaggcgtatttaaagaatggtcactgtagcaagaaggtgttttgatgcacagtatttagaagaaattgtagcatcttcctttaaaacacattctaaaaattgcatcagcaaatatgcataaaagatcatattatagtttgtagtatttaaaatattatgcattagttcaaaacattaccgagttagcaatttttagacgctacttacaaatagctgttttggaagaacatgagccatttggagctttttggaagagttttattattatataactatgagcgtgtaagtgatgtcacagctcaagcagaaaattaactaaattttgaaaaattaatgtctccatatgaaatgaaaattcagtgatatcaagaatgctacaccaataattatgccctttttttgttttgaatgtcatcaaaggctatttaaagattgtaatgtgtttagatttcaagccgattgtgtcaaggagggtaagaaagtaccctagatgtactagaatgataccttctcttaatggataatgacatatatgttaagcaacacaaggaaaaaattttgttgtatagaaaattggattctttcctgtgtgtgcttttgtaatatatgcttaggaacacataagcttaatgccatttaaaaaacaagcaaacaaaaaaaggacaaacccagaaaatgatggatgtcctgcttacctggaatagatcaattttgtaagcacctggaagaacatctaatgcagacaaaaatcaatgtgactccatgaagaacacttcttgttggattaatcttattttcttctgtgccagaatgacaaacttagtagatccatcagaagtcaaagccccagtgtaacttcacttagtgaggcttttcttttattctaaaccatatcccagttaacaacctggaaaatgtaaacctttctacaaataagcaaaaggtgggcaatagttttggccaatggggacatttcaaataaaccctaccagtaccaaatatattcatacatgatctgaacaataccatcacaaaaacataaagaatatctaacatttgtttatgccttcccatatgctggatattattccatgatatttatatgtgttaacccacttaatcctatttgaagggtgacatatggtactgtataaaggcctggcctcccgagcctgtgtttatactccagctctgccatgtggctgtgtggccttaggcaagttattcagtctctctgtgactgggtgtattctcatgtaacatggggataatagttcttagcccttagagttaggaagattaaatgagatattatttttaaagtgcttaaacagtgaatggcccaaagccaatgctacatacattttgctaaataaatgaaaatataatccaaacaataaattgtcaattacagagaaatgcttagtaaggggatggccaaaatattgcttttagtgaagagctccaaacaatgcccagtgatagaaaatgattgagtaagcagagtataatatagcagaagaagtgctgtgatctcagtgggacgctggttgagcatatgtcaagaacacagggctgtaattacttaaaataaacagacactaggttttcttgatggaagagtgtcaaaacaatactaaccctgattctggtactttcatccctttttactacattgtaaccaatatagttttttctcctttttatatcccctccatccccttttccctttcttccattcaccttttatttttaataacaatttggagaaaaagatcacccagtggcaatatttttatcattgaaaactatgctggagaaaattaatagagcttgaactgatagatcatctgtataagatattgtgcattctaaacataagtttaaggcattcttgtcacatgtcatcatttaatacaaagctgaatgaaactccatgagaattatatttccctatcgaactaggccttctgtgtaccccgggggaatgaaaaccaggttttggtcctgccctggaagtgtgtgagtgactcaatttgttgcttctcgaagactttttaacattgttgtggatccagtatgaatcaccactgaagcgcttcacttcattgcctcttctctcaattattattttattttggctctgtacctgtagtataccttcttctttatgctatgtctaagtttttgttcaaattcgtctaacctttgagtgcctcctctatgctatgctctatgctcttacgcattttaaatcacttaatcttcacaatagccctttgatattgttattattctgctcactatgcagtttgggaaactgagatttagaaaagttaattaatttgttcaaggtcatccaataaggcagtggtagaggtgaaattaaaactctggtcttctcaatgttacaatctgccaatttcttctaaaccttttgttgagctgtgctcatgaaataaatatacagtagtgcttttaaatataaaggagttattctgctcttttgtaaaataataaagaccgccctaggatggatcgccacatatattttctatttctctaagtagtatgttcaaagctgaacatttgtttcttcatctttgccattctttccttcttttcccctgaagtttctcctctcttgaacatttaaggacacctcctcaaattgtttcttaattttagatgatgttcataattttacaatatttttctaggaatatttagttatgccactggggagatgcttatggagaatatgccttttttctgactgcttaagtagatgagtgcttctgttatctacctccgaggtgtatagaaagctgtagtgcaccatcttgttaatgttttctctcacaaaacaaagccagtgcttcttaaactttgtcttctaagattttctaaaagcctgtaggccgtgtacatatttccagtttgagtcatctaaagtagcttattttaagagaaaattttttgggagtctgttttctcttttaagttgtatgcatatttttcattttactgcataatacagagagtttttttgaaagataaaagtaaaatgttactcaaatcttcaaggaaatgtgcctagctagatttgtgtaaatctttatcttgcggtgtttcatagacacttggcttgattttacagaatatggaaatatactgtgaatttgttaagtgataatagtgcaaacatatatactattatttcatacaagcaactttttactaggcaaagattttaattttgactcaacttgaaagactagaactaaagtcatattacacaatccttaggtcacaaaccttaaagtctttctcatagcgattttctaatgatatatttgaatcttataattagctttccctttcataattagctgtattatacatctgatttttgatttcttactttaactcctttctcctatttccaagaggttagaattcttgcttatctgtgctgccatttagttctcaacattttttttttttctgagctgatccctctagcttttttcattctcctgcatccagtgccccattcatctcttccatgcagctgaatttagttaaatgtctaccttacttacttaaatgtattgcatgaacttttcatggttattcacttttagatttcgactcaaaagtgcctggattatttctgcctatcattctactctataggcaagagtgatgctgagctggaataacaataaacacaagaaaattcttttctggactaaacatctttattattaaagtgagaatataagatgttgcggttatctcaaaaatgatttcagaaaaggtgataaatatttctgtcttgggacagaatctactcattttaagcactgcttaataatcacccctaatgattaacctgatacctttatgttggccttttatttgagaattttctatatctccacccataatttgtctgaacttttaagtgttaaagatctcaaaaaggtattttatttcatatattgagggcattgtagcaaagcagttaagagcacagattagagacaaactgaaggtattaaatcccggtttcacacttatcacctaagagaccttgaacaaattaatctttctatgccctagtttcagaggataacaatagttcttaccacacaagagtgttgcatggattaaattagtaatgtctcttaaagaatatagaacaatgcctgacatattccaagtgctacctatgtattagttaatattgttctataatattatctccttaattaaattgataattccatagttgcagtgcctcttaaaagagccagttttatacactggcctgttttcctccaactctcatgtttttgtttcttttttttttttttttttttttttttttggagacggagtctcgctctgtcgcccaggctggagtgcagtggcgggatctcggctcactgcaagctccgcctcccgggttcacgccattctcctgcctcagcctcccaagtagctgggactacaggcgcccgccactacgcccagctaatttttttgtatttttagtagagacggggtttcaccgttttagccgggatggtctcgatctcttgacctcgtgatccgcccgcctcggcctcccaaagtgctgggattacaggcgtgagccaccgcgcccggccgtttttgtttctttagctcatgcctcattctgatataaactcctgccatctacattatagtatttcccctctttctcctacaacatgtgaaatcatgaaaacaaaggatgagcgtaatatttgaattatcctacgcaaattgcgaacctataatagtctgtgcattttttattagcagtttcttttttttggattttttttattatactttaagttttagggtacatatgcacaacgtgcaggtttgttacatatgtatacatgtgccatgttggtgtgctgcacccattaactcgtcatttaacattagatatatctcctaatgctatccttccccactccccctaccccacaacaggacccagtctgtgatgttccccttcctgtgtccatgtgttctcattgttcaatttccacctatgagtgagaacatgcggtgtttggatttttgtccttgcaaaaatttgctgagaatgatggtttaaagcttcatctatgtccctacaaaggacatgaactcatcatttttcatggctgcatagtattccatggtgtatatgtgccacattttcttaatccagtctatcattgttggacatttgggttggttccaagtctttgctcttgtgaatagtgccgcaataaacatacatgtgcatgtgtctttatagcagcatgatttataatcctttgggtatatacccagtaatgagatggctgggtcaaatggtatttccagttctagatccctgaggaattgccacactgactcccacaatggttgaactagtttacagtcccaccaacagtgtaaaagtgttcctgtttctccacatcctctccagcacctgttttttcctgacttttgaatgattgccattctaactggtgtgagatggtatctcattgtggttttgatttgcatttctctgatggccagtgatgatgagcattttttcatgtgtcttttggctgcataaatgtcttcttttgagaagtgtctgttcatatccttcgcccactttttgatggggttgtttgtttttttcttgtaaatttgtttgagttctttgtagattctggatattagccctttatcagatgagtagattgcaaaaattgtctcccattttgtaggttgcctgttcactctgatggtagtttcttttgctctgcagaagctccttagttgaattagatcccatttgtcaattttggcttttgttgccattgcttttggtgttttagacctgaagtccttgcccatgcctatgtcctgaatggtaatgcctaggttttcttctagagtttttatggttttaggtctaacgtttaagtctttaatccatcttgaattaatttttgtataaggtgtaaggaaggggtccagtttcagctttctacatatggctagccagttttcccagcaccatttattaaatagggaatcctttcctcgtttctcgtttttgtcaggtttgccaaagatcagatagttgtagatatgtggcattatttctgagggctgcagtttcttttatcatcattgtcatcatcatcactgtatcatgatcatgatcatcctctcatcatgtatagcatttgttgagtgcttaggatctgccaggaactagtcaaagcactttacatttattgaatcatttaataagtacaaaaatcgtatgaagtaggtagtattactatcctcagttataggtatggatatgtagaagtatattctctcctcatgcttttttcttacctctgtatggcctcagagaacacttatagtttgaacatctccttatagatagtccatgttcccttccttattttgatctcttggaagaggccagatggttattgagtgtatgatgctatgtttatcatttatatcatcaaagttttgagttcctgaccatctctcaggatatgaacaaaacttgaggattaatttaggggatattaaaagtgtccaattctcaaacacatggatcatcatgattctttttgtcaggcactgaattagaagaagaaacacatacagcatacattgtggcatgaaagagaatgggtttctgtgtgggatatcacataatgcctcattggatgatcaaataaaggagggttagtagtgatgaactgaaaaaaaaaaaaaagattgtatgtagtatttctctgtggtagatggggccagcctggtagggtgggaggagaaggcttggcatttcacggagacagatgcttgaatggattttgcaggtggttttatgttagttcatggtgggctcattggcagatctttctttggctcttttagttcaatcctggctcaagatgacattgtgtgtctctgctggcaatatatatacaatgaccttactcaccttcccaatatttttccagtatacattataatatatttttatttaattttatctgattttaatgcagcaatttttttcttttagtttaagtttttagagaaccactttatggataaaatttccttgatgctgtatgaatcagccatcaaaatgctagggtaagaagagaaacttaggtatctgctcttttttgacttaagttaaaacatcatatgcagtaccaaagtaataaaaactaacacttgtttgagtggtcgtggaatgtcagtgtcttgagtgctttacatagtttggtgccttttaattctcacaacaatccagtgaagtgagaactataattatccccattttgccaatgaagataagaagatatggagttgtcaaataacttttctgaagctactcacaaagtagccaagtaggatttgcacccaagcctctgtctccaggacccatgctcttaaccatcacaccacctccttttgtacagttttctctaggctggatgcttcattgcacaaatcattttctattagctatcaagcacaaactgagccaaaagctctattgctaagatgcacaaaattataacttgaaattgtttttctgcattctccattttttactagcaggagaataggagaccttaatttttatttcaattagtaacattgaaatacattaaacagaatctgtggtggcagctgtgtattctcactttgacttgaaaactacattcattgatatctttttagtctttggaaagaaatttattgtccattatagctgctactgctctgaacccttttgataattgtccatgcaagagcctgttctctttcctttgagaaaataacaatggcatactgtacttcacaggtgcaaaaatgaaatgatttgctccatcatttagtttgcttaatttacagctttttatgtttaattatgtctattgttcatagattggatattgaggatccaacaaagatgatatttgaaacagctttgtaatgtcattgagtaggtcctacactgcaggatacttaaatcttttctccaattgtgacagtttggatatcctcaggggttccgagctgtcttcaattatgccagctgtcttaacgtggaatgtaaaactactattacagtggggaattaaatattatttggcccaattttacctttctagtcaacagtgaatagcatgtgcctgcatatacactgaaagcagactgtagcgcgatgtgttaatgtgctgtggatacagttttcctttataagcatttatgattccaagagaatacccatctgccactaataagttgagtaaccttgagtatgcttctttatctctctgatttctacttcttcacctataaaatgaaagcattactaaataatttggaagccatttggcatagaatcatgtaagtcttattatttggagaattttattgttctcttctctgctccctgctctgatgacctaatggagcctcagcctcacctaaggctcacctcatgactacagtttctgcaaagattggcagctatagcaagatcactgtgatctcaaacttctccctactctgttatcctcagagatgcatgtttcctgagagcttttttagaaaccagtcagaatgaaatttgcaagaatatcagattttttctttttggaactggtgtgcagcaagatttcagctgactgtttaaggtatagttctcatttgggagagcttcgtatagcacttgcaaacagaaattttaggtgatatcctggttctaaaggatggggggtggtggtggtgacttaagcccataaatccttctaagttatatttgaatgccattctaggtatgcataatttattatactattcattttatcactatccacagacatgggagaactagaaattgagggtgggataaaattttagaggagtaagaagacactgcaggacatttatggtctaaaagcctaaatatttttctagttagtcattggacatggccatatccgggcctggatgaatctcaattattttcattgatttatttaataaacaagaatttgttgtggactcagcatgtgtcccgcactgttctggactcttggaacatagaagcgaacaaggaagacaaagcctctgcccctataagacttatactaccaaaaagagttcagcactgagacgtgagcttacttcctcccgagcattatctttatgcctatatatgttaattctctccttcacttcgctcgttttcattcttggaattctatcttgtcacaaaagccaaacagatagtgcaaagttttagtatactagacaaaacattattatgttatggcttcttgcttcctgatatggtggcaataattatgattggggaagattagtgtaaagcttctgcaccaagcatagtgctgacctaaggcagtaaggtaataagtaagttaataaatgaaaaatattggatgaacctgaatttggtctgtcttcaggcttggttgtggtgtagagtaattgggaatgggtggatgcatgtgtagtttttttcagtatcatgactagagggtaatagaagaatatctacttgtactttagaaaagaggagaccttggaagtgggagtaaattcaagatacagcacaaatcaactcagaaattcctatcatttggcagttgagaaaatttgagctgaaagttttcaaatgatttgtcagaattatacagaaattccctgggcagtttttggtgctggagggctgaagtggtggtatttagcttcctcaaatttctagttttaagaaggcagtcctaaactttaacccaaaggatctctgttccttgcttttttccagctggtagtatcttatgggactcttgtggcatattttcctgcttttgctttggctgggtttctttagggtaaatcccagggagcccctcctaaccctgcattatttctagagggaaaataataaaagggttagagatgataatcactggaaattctcaaaggataatcctccccattcaatatttggccttgctccttcatggcattatatatgggtgggaaatatcagtgtgtgcatttagctttgttggtctttgagatgcttcactgcacataatgtggcactaatcatgatgctctgcccagacagatgtgtctaacctgctatctgtgcacctgagaattggcaaggtgatgtactcagcattctattataagcttatttctctaggcacttcaaaagccactaatgaaaaagtctcttctgccacctgaggcatccttttactgtttcattggtttttaaagatgatcaataggaaatactctaaaaaacactctatgtctgaagttcaaactactagattttcataagtttaggcagctctgcacaattgtaatgctctttaacttccacttgtaatcatattgaaaatgtacatgaccatattacttatgcctcaaagttaccccagtgaatattttatcctcattcatttaacagtcaaggccagttctctgtcaaacattggaaggaaacataaaatgtctttaagaagctcacatttttagaaaggaggcagaaaaagaaaacaattgagtacaatgtcataaacactacaatagatttatatactgaatattataggtttaatatggcacggcaattaatgtgcatagtgattgtcctatttcattagaaagctattaaatattttcagcattctcaattaaaaggttagggtgtatcaatgtattatagaaagagttactttaaaatgtgttaattaaagggatatgtttgagttcctggaactgtcatatttcaaatattttcttttgtatacatttctgattcgtgaagaattattttgtttatactctgctataacctaacttaagaatttacattttctggtagctagtatatgttcagtagatatctaatgaatgattgaatagttctttatatgaaaaaaataccaccatcaaaagtttaattataaagttatagcataaatgatcacagggagtttaaacccaactgtaatttggttactagatagaggcattgacttaggtgatctatgcacagaactaataaggccaaggtcaaagtttccttctttgtatgagcaagttaaatttgtgttatgaaaggcagtggggcaaagatgtttgaggatttagctaaaacaatctgattctgcaagccataggtaaaattttagaaaattggaaagagtcagaatttaaaagttaaagtaataagaacaaaggctaaaacaggaaaaagcagaatgtacctttatccttatcaggagacgccttgaatcacagtactcactttgtacttgcctgcccataccgccttccagaggaactatctactgacagacgcagtcacctcagtggacgggtgttgtttgggccacttccctgtccatagttgactgctagatttgggtggaatcttgacccaagaacagctaacacatgcttctatatgtgacctggcaccagaatttgagctgtgtatatctatgtaaacgtagagagtgaaaccataagcagtaggaacagaattagcaaagttatggctgaaattacaaagaaggagaaatcacaagaaaaagagcccggttctgcaggaagaatagagacccaatgtgagaccaaccaggccctgagagacacaaagggacagagctgccaaagctcctgaagttcgtgttagtgtctgtgtccttcagattgtgaccaccccaacatgcattcagagacacaagatttttattattgttagaggtgactaaagtgactttttgttctttgcaacacacccaaagagccaattaaaatatttacaaatgctaatttgttgctgtgaggatactaggtggaattattttaaaagatatgtgtgttagagtgtcactaccaggatatataaagaaataaaaaaatcactcaaatcccttctcctaattgccctctgcctttatatctactcctggctaggttaggtgacctctgagaactgtccatcaaactctggatatatcactatcatggcaatcaatacagctttgaaattctctgttaatgggactttatgacactattctccactagattgtaggcttttaggggtaaggttgtggattatttattcttcctgttttagtacctatagtaccaccaaaatacctagttctgagtatgttcttgaagcaggcttgctgaaaaaaattgtacctgcgcataagaaggatgctttgttattaaataaactgatttaaatacttttttttttcccccaaaatcaaccataggtatatgtgaccactcaaaactgaatagataatatgtgatggagctgtggtataactcagtgatcttacagctacatagaaaagattttaaaatagtgaattgcaagtaaatttaatttccacataattcctgattaacttttatattgacagttgggaaacattagagaaaaacgttagtaaagttgaaggaaatatgctgttcagactccttttaccattaacaaagtagtttttaggtttccttctccaccagaggttgatatttggattttactgcttctgttatggtaaccccttttacttttatgctagtgcctcaaaagaaaagtcctgttagtcttcagagtaaatgagcttttcacacagtaactgggctatgcagaggtgtgctgtgccgggaagtatagctagtgccaagccacttctctgttgtaattatagggtcgttgggaaggttagtggaccttatccccttatggcaagcagcacacatgtgaagcctctcttgattttcagaaaacatctggctcagtagttcttggctcttcctttcaatgtcaagtttgacatatttgcatatgaaacatgtagatatttcagactaactcctatatccagaggaatagggacttcaatgatactcaggaaaaaggcacatatagaatttaaaaatttcatctaaaattttatgtaatagtctttctattgggtacattatttccctctaaaaagagaatttataaagcatatttacttaattcagaattataatgtttgtagaaattttaaatatgaattgtttcattaaatgttactttttcaattacattttcatgagtcaatctataaagtggaaaaacattatgcatttgatctttttgattgcattactcaatttttttatctgtttctattgaggtaaatgcaaataaaaacataggttatgagtggagaattttgacaaaaatgtcttatgatggggtaataaattcctaactaaccacaaggacactgtgtattaatataagaaagaaaaccaaaataaattacttagtaatgaaggagaaagaagacaataagaccaatgttatgaatggaacttagacactgaagttttcagtaatttattacaatctttaatgttaacattttgtcagtaggctctcttgaattactacatttttatttttagtgattatatatatcacagatgcgtctctaaatgcaaatatctttatatctccataaatgctcataaagacatgacattttgaaaattatccgaaggtatctttttctataaaattttaaaataatgaacatgtaatcttattgagttttcgtagggttattagcagatttcactaatattatacatatttttaagttgatttgtcaagaaatacaacaattgcactatgtaatatattggtaatttttttttttttttttttttttttttttttgagaccgagtctcgctctgtcgcccaggctggagtgcagtggcgcgatctcggctcactgcaagctccgccttccaggttcacgccattctcctgcctcagcctcccgagatatattggtaatttttaaaaaattgtttcacaaaatgaacagctgttcatttgtattttatttttttaaatgttcaattatagaagaaacatgccaaaggaaaattattgaactataagaagttattattgataatagctgccatttattaagagcttaccctatgctacatttcttattaatgttttacacacagcagattgttttatcctcataacaaacctgtgagattgctgctgttattcgcattgcacaaaagaggtaacaggtgtgggatatggtaagcacctggccaagatcacttagcttgtaaatagtgaattgagtattcaaacaggtcggtttaatgccaaacctcaggctcttaaccattctgctgtatttcagagacttcttaatggtgatatttttaaaaagataaataatttggtgaatttgtggtactttacaatggattagagtaagtaaaaatatttatgtcattgaagtttgaataaatatttctatacagtacctaaattatttttacttcacatcactgttttttaaagctgtttaaaaaaaaactctcttttaggtgtttcattctctatatatttaacccacatttttctacaaaaggtagttttaaatgcttagaaagttggctttggaatgaatatagtctaatatttgaaaataataaaaactgattataataaacatgttcataacatgcactgttaattattctttccagatttctactgactttaaattttttggcttttattgttagaccattcaagtaccacgaaaataacaggtgataaatttgactctcaatcagcgtaagatcctgaagttttgtttattgcaaagataaagtgaagatttatatggttttgttgttaagggcaatttttaaaaaatatctctgggttattaaactagttcatggtttatacagctctctattaactgagatgttttgttaactaaacacctattatgcacaaaagagatgtgaggcttattattttgctacttaaccacagaactttcaaatacttgtgttacagtttaataaagtggggttttcttttatttctagataatacaatcatgtagccttcttttcttgtccatcccatttttaaatatttgcttttctaactcctactcatgttcagcaacatacgcaccccttattcacagaagccgctctataagaatagaagtctcttagtttttcccatctatgacagaaaatttctactgagatactttctttctttttactaacttctcatctgagaaggaattgttcctgttttccttcagctacctgttcatttagcaccaatgccttctttatctctccctaacattacacaatcatgcctattatttcactgcttatgtatattctctcagcttataaatttgatcaagatttccctgttttaaaattccttcccttattcattggctgaactgcaggaaacttttggttttcttaaagttactctctcatacctcaactgcccttcggtagcaaattgtagacacagtgatcttcagtttttcttctctaattaccacccacttcttcctgagtcctttattatctggcttctacccacagcactaaagtgcaattgtttttctaaaggtcatttcttccttctaaatagccaaatctagcttcttaatctctgctctcattctactcaaccatgcagaaggctgtatcattactgtccacttgagctttccacattcaataaacattctttaggtgttgactaggtggtaggccttcgggtttagaagatggctaaggcccgcatatgccaacctggagtttccatttaaatggaggagacatacacaaaaccaactaccatacagggagctgagtgctctaacacaactgtgtgacaagtaagacaatgtggggcaaagagtggagaaactttcacagaggaagtggtatttgaaagaattagcggagagtgagaactctaggtatattaagttcccttgtactatacaagggaacacagaattgggaacaagtacagcgtgttttggaaatagtgtggttataacacctgggaatgtggtaggggtgggtgtatggtgggaatttggaaatagtttagggttgaattgtccagatttaaaacttctttccattggctttgttcctcccctttgcttcttttttttttttctatgttgactgctagttttcagacaattttcttcaaaaacatttcttctttcatgtgaagtcattctatgttctgtcccaagtgatattgtctactttgtgtcttcaaccattatattttgcacattgcagttgtctaaaatcttcctgtccctgatgacctctcttttgagtgccaaatgtgattttttttctttttctgtatgtcaattcacctcaaaccagatatggtaaaaataaaacagatcaccgtatatttatgactctttgctatttctgtattctttatctcgttcattatctccaccttccttttggttaccaagaggaggtattatactaatttttacttcctctgtctagatgacccctaacatccagtcagtcattctcttaaaatacttgctgtgtcttctgatccctattttcatactcatttagtttatgccatcacatttttgtcagaattagtatttaagtattttaatgattatttcactacctgcagcctcttctccagtttttttttataccagagttaaaatatagtttaagtaaatatagctaagtgtatttaataagttatagtctaagttattttttcaaaatcttccatattattcagttatctacagaataaaatccaactttgacacggtccaggactgaagctctctataatcttgtaacaacctatgtttccagtcctaaaattccccacataagtattcctactctatatgccttcaattcattgaatgattaattgcaacctctcatttaaattttaatgctccttaggttgaccataggtatttaagttatttggagattacaattatatgtgacagatttatttaactgtaagtatctaaaagacagggacttcactatatttacaatcagctactcccaagaaggttgggaacataatgcttttcaaatatttattatttaatacctccatccttaactgccttataattttaatagcaatgaaagagaaattccttctttgtaaattacacatatttgtgatttccttgagtctctttcccttttccaccaaataatcaatctgatttagctgtcacacacacccccacacatccatatgctttgaatacaactgctggttttacttacttcatagttcagtgtgaaaggctctgcagtagatagataaatacaaatacaagttgtggggtgatatgatgatagaagaaagtccacagtttttgagatcctatagcagagtcagctaaatcagattgataatttggtaatgggcaaagggtatatggacaaagcacaaattctagaagatttttccaacttgatgaagcttcatagcagaggaataggtcagctgattcgatgtgatattaaacaaatggttaggaattagtttttagagtagaactgtagtccttagaacccaatacccctctccagtattgccaacaataaacaatttgtggaagagcatcactcgcctccatcagacgagtgtcaagagactgtggtagattgttctaatattctaagtttattttcctttactagtctgcagtggattttatcttgaaaatattttttataattttataacatatgataagaattggattttataaattaaccaattaatgggcaattttgtagttacttttatttgtagtaaaaatatattttaggtttttagggttagtgatctgtgagtggctcttaagtatattcagtcttaaaaaagttaaagatcgtgtattattgtttccaatgccagtatagcattttcaccatcttgacaatatttattccagtcttgccatcttacaacttggtttggttatcatttggaagcacattgtagataattagaaactggacatttaaaaaaaattgataattaaacaacaatatatactgttaaaactgcacactgattattggcaaatatttcagaagacataatttaagtaattcagctgctctaaattctttaaggtaacttgatgccctttgtatcagtaaattttttttcctttcaaagcaaagaaaaaaaacaaaatcataaatggaaaaaatacctcatgaaatctcactatttgtcaacttcattttaaatcacattattgctaacagttccaaacttgccatttctattcatttctcatcatcactgtgctagcaaaaatcctaccacagttaatgttttgaagaatatagacttgggaaaataaatgtaaaaggctaatgtctatgctagagagaatgagagataaattaggcttggttatacatgcctttattggttattcattgaggacctcagctatgggccaggcactggcctaagtaatgagacaaaagatagcaaacatagaccccagcagcagattttttcatatgaagtttcaatatatttagtgtattcttttgttaaagaatataaaaaaagtctcttaggaagctatgtgtttgatgtttgagataacttgtccaaagatgaaggtcaaggaagttcatttaagaaaggtgacattcagctggtcttagagcatgtatagagtttgtaatgggcttaaaaggattccagtccaagaaaaatcatgaggaaatttacagaattgggagctaaaaaagtagatctcatggaggcagagaatgtaatagtggttaccaaagactgggaggggaagagagaagggggggatgaaaagaagttggttaagggatataaaaatacaattagatagaaggaataagttccagtatttgattgtatagtagggaagttataattaacaataatttattatagatttcaaaatagctagaaaagaagaattatgagatgatggatatcccaattactatgatttggtcattacacattgtgtatgcatatcaaaatattacatgcactcccagaatgtgggcaactattatatatcaataaaaatacagaaaaaaaagaggatacactggaggaaaaatctgctgaacttgaggactagaagggaaatcattaggcatgcaagagggagtaattggacttgggtgtttggaatttgggaaggggttatagaaatatttcacaatataaggaattcaagacaaaaatattttggacaaagattagagtttaatttttgggtcatgtagtttccagcatgcctggggcaccgagtgaaggtgtccagtgggtagatagatattaaaaatcagagaacattagatttatctgagctagaaaaaatatgtgggggtcatccttataaaaggatggtttaaattagttgtagtatagatagtggtcaagaaacattaccttgaattagtggttattatccccactaacctgacagaactgcagaaaacaatggcaaagctttatgcctgtccttattttaattttggctcagtgcatgtctgtgaaaaggggggaaatctattgtattctctcatgccccttccaagttagctctcagaaatagtcagaaaataaaataatttagatctgctatcattccctaaaaaaaaaactttaggggagcttttatcctgatttttacttgactcatggtggcttattctccaggatgacagatgacagttctgtcataatggacacggcatcacacagtttgagtttttgtttgtttgttttctgagacggagtctcactctgttgcccaagctggaatgcagtggcctgatcttagctcactgcaacctctgcctcctgaattcaagtgattctcctgcttgagcctcctgagtagctgggattacaggcatgcaccaccaggcctggctaatttttgtagttttttttagtagatatggggtttcttcatgttggccaggctggtcttgaatttctgatctcaagtgatccgcctgcctcggcctcccaaagtgctggcattacaggtgtgagccaccgtgcccggccagtttgagattttagcagctgtttgggtgcaagtttcttctctgagcccataattcccattatatctatccttgaatgttcttctgatgattaaatgatgtaatatatgtaaaacatcaagttgagtgccatatactcaacaatgatatttcccatctctttttcaagacaacacttttagtagcactttaataatttacttttcacatacttgaattagaatatctatctgtggtctctgtaattttcattttggttctgtgtaatgatactttttaaacaaaactagtagatatgaggaaaggggcagtgaagctttataagctgctatgcttgcaatggggctgtaccttctctcactaagacatcaaattcactaaaaaatatgtttgatagggcagctgctcctaccagctttttgagaattccatcagttttcatccttgattattttgcctgctcctgatgaaataatattccttttttcacctgctaatatgcgacacatgtttttaagcacaatgaactagacaagtgaaaactgaggcatgaaggataagacagtgaaccatcaggcagggcttctttctttaattgtgctttttggttctattaagtatcttataatgataaattattgagaattgtaaaagatcaaaacacatgttctgagagcagaaaatatatattttttcactgaaaacatagttttaatcataaatgaaaggaagcaaatatttccaaaaaacatcttaataattcgattcagatttgttgaaacattgtgttgtcctatattgtaccatgtagagcattcattttaataatttaacttcagctggatgctttccaatgatgtacttaggtacttacataattagaaaaatcagtgatttttgcaaatgcttttacccctttatcccacacaatttttccatttaaaaatatttttaaaggctgaatatctgaattttaagtgagatttgataaattataaatgtcacaggaaaaatataaggcatcatactttacatttttgtgtaaaacattttaaaattggaatttggaataataggactatctaatatttgtatgatgttttaaagtgtaaagtaccttttcatctacattatctaaacactcttcctgtaaaccctatgaagttgacttggagagccattatccttgtctttctgattttagcacattttagtcttccattattttcttttatgggaaaaacaaaaaaaaataagctttaatactttaaaaaatgcaacaaacaatacaaaaatttaatagaagagatgtaatattcaatatttctattttaccatactatttatgaatattacagtaaactacttcagtatttgcttaatatgtgcatcttggatccacccgccaaggctgaatacaaaatacaacacacctatttttttacattcaaattatcattaggctaattgctagaagtcatgtctcctcaagtcacgtttaagctggttttaagaggtttctagtgttctgcttcatgtgtgttaaaacaagcatttacatttctttcttattttgttacaatactgcgtccactaacaatgacccccagaagaacgctattctcttgtgcacagctgtggcatggggatggaatgagtgaggctctctctttgaacacttctgtaaaaacttgggacactttcctacttcttcacagcaaaattaagatcaggtcacagacagaagtgagactgtatcaaagcctttttgaaaatataagaaagaataactgagtgtaacatcaactgaaatggcaaaggttcatctcaagagccagatgcccaacctgaattcaagttgctcactgtgcctgtatgtctagcaaagacaccaggcaggagtcggctttctccctaatgtaagtatttcaaatgtctacttgccttggagagttgaccaaactgtcatctcattttctaccagacactgggaagaagttaaggtgcctccttgcgctatataaaccccactgcacttctccaccagattaacttcttcatcatattattcctttcaggggaatttcctacctcacagctccttcagcatatgatctggtaccatggatccaatgtgatcctcttggtgcaaagtaacatttcccaaactcttgatttgttcagattaaaggaacatgtgtatgggacaatagcactccgatgtatgttacactctgccaatacaacactgttcattccattcattctgtagggtgagggaatggagcctcatgattatactctctctccctcctgcaatagtctcatccatattccccaaaatgttacaaaaaaatatgtctcaggaatgaggctacttaaatctagacttttaagatttaggaggaatatatttaacataatgtacaggggctggattgtcctgaaagatgtgccaattacattaccaaacagaacacattccatttcggtctgaaacatctgcacttgatttacctcatggtattcagaccttccccaaaagaagtatatatagagctctaagagaaaaataggcccttctaaagtggttcctcgaacaacaagggattagttggttaccagtataattctgccaatctttatcctagaagcagaaaatattgatgactcttaaaacacacttttcccaacctttgtaaagaaagtgtttggttcagtctttaccagtcagcacaatatatttatttttaaattctctaatttttctactttgaagagtttctaaatgaatataattctaaagataaagtgcatttttatatgttctttgaattattcagttcacctgagtgtaaaatatgacaatggtgatgtaaatgtattcactccacttccttttttagtgtgcaaattatttaacaaagaagattgcattgaatgtataaacagtgaggaaagaaactactaaaagaaatttcatgtcaataaataaatatttactactttattttagggattagatttaatcaaattctacctgtgtcagaaatccatatgcagttgacccttgaacaatgcaggggataggggtgctgacccccacacagttgaaaattcatgtataacttttgactcctctaaaatgtaactactatttacctattgttgaccagaagacttaacaataacatgaacagtagattaacacatattttgtgtattatatgttaccaatataattctgccaatctttatctttatatacctattttatatatatatatatatgtgtatatatatatatatatatatataagcaaactagagaaaagaaactgttattaaaattataagaaagagaaaatatatttactatttaagtagatagtggatcattgtaaaggttctcatccttgtcatcttcatactgagtaagctgaaaaggaggaggaagaggaggggttggtcttgctgtctcaggggtgacagaggtgaaagaaagtctacatgtaagaggatctgtgcaggtgcaaacccatgttgttcaagagccaactgtacaagtgttctgtcttcttaaatgaagccaattttggtaagtgtgatcataatacatatgaaaacatgtagtgtatattttgaaatcttaagtttgatctgttggcagaatgtgactagattaaacttcaaatgtattgaagaaaatactttctgagggaatactatgtggaaagatatcactacagctacttacttgtgttcacataaaaacatctagctgtatgcagactttctcctttaaaaaattttctcctttaacaaatttttaaatttctaaatatttaaaaaagagtcttgccttaaaatttttagtataacaattttgaatttcaagaaattagaatctgaattgttaataaaagtcaaactaagaaacaacaactttactaatgtatctttccatagtatattcatccagtctaaaaatgaaaaaatttcaaatatcattagtataaccaaaaggtcttatgttactttatcagttattagccatttcaaaatcaatcagtgaattaagtaaaacaagaaaatttttttattctctatataaatttttatataatagacatatgtatgcctattatatataatataaatgtctattatatatgatagactttatataataggcatatacatataatagacattttatgatagacatatatacatatattcagatatgtatacatatatacatgtctattaaatacatacattttctataatagacaaatataaatgtaatagacatttatatatgtatatatgactatcatataaaatatatatctattaaataaaaatttctttgggagacattttaaaaattacagagcgaggaagctagaaagctctgtaatttttagtgtatcatcaatataaaggtcagaaactgttttacctacaaacatatatttcattgtattttctgagtgccctgtccactgtagtaggcaccttaaatattttttgatggcattcatgatgggaaatgttatatttattttgcgattttcttatagtttgattcttgttcattcacattctttctatcttatttcaagattccatgatctctcttgtcatattgtagtactttctaaatcattttatatctcaaaaagtcttttgtttccaatgcatcttacaagataaatgccatattaacttcacaaatgcaaatctgtcatgtcactgacttctttaaagactccaagcattcttcattttttttctaaatttacatcaaatctcaaaactgatattatcttttattgcttaggtgttacctgtttttcctctatagcacatattttctttatcaacttcacattctgggcaaatggaataacatcctgtttcataaacttactctcaagaatcattctaagtccagctataatgctgccagcttcagaaattctttagaaacagagttggtgtttgagttgcctacctgtttggaatctaaaccttaatcaataaagttacacttctgtttcttagagaggtaaccagggttattttgtggaagagcatggtaggttcatcccatatgtcaacttattgaatactaccatcctgaatccattattaactcatcttctgaatttgcttatacaagtatcattttgttctttactgtctaaaataattatttaccatcataagataatttttataaaacaaataggagaaaactaattttaccttttaaaataatatgccacttgtagatgtagaatacaaaggcaaatatttagatgtaaagcataatttaatattcttgtttctaaccagtatgaactttattgatcttattaactttgtaaaaataatcttgggagaattgtatagaatatatgttgtttatcttagtaaatgacaaaaagaagtacttttgtgtttaagtagcttttttgtcaaattaataatactaaacataagtgttaatcttttcttttccaaactatttcacatcattttttcatttgattttctcagctctctgtactgtactataaggcatgtttctgctcaacattctacattgagcataaacaaggactaatgccaaggtaacctaaatcctttgtgcttctttgggcacttgacatgctcacaaccatgggtaccatttctattaaatgcaattatctaattggaaaagttgcaaataatctgatgagtgagaaatgcagattcaatcaagtctcagcttactaccactgattataatataaatcctggtttgagcctaacccttttacatgactatcccttcttctgtttatctactttactaaacaatgtcctctagcatatagactgtacttgtatcctaaagaaatcttagaattgcatctggttataagaggatgaataataaatgtaatttgaagatgtaaatgatgctactaaggattttaaactcttggtaatcttactgtgcaatgcaaatgtcaaccataaaatttatttttatagccttgtgaccatttctaactatcttaaaagttattaaaatttgccttcaacacatttttatttaggtgattttttggttatttaaaaattattttaaaactttttggttttttaaaaattctgataacgagtctatccagtcacatatgaaagtctacagaaaatagtgcagcatgcaactacattattctacagcaatggaagctgtcatataactatgttccttttcacatgaaaataaacttgcctggagtcctgtgtttcaacagaccattacagagctggagtaggaggcaattacaaagacaaggaccctccatgaaaaagtcttgctttgagagccataatattcacgtttgtccctagctgtgagtataaaccaatggaggagagacttctgaaattgcaaagacacatacattctgtacaaaatcatagctttgttattctgagtcctttgtaacaaatataggttacatgaactttagcctcccagatagttttaattttaattcaaaaaaaccctactttttagtattgaaaagtataaacgataaacatttaatcacataaattatataagggaaaaataaaattaagcaaaaatgctaacagtctcaaaaggtatttttaaaattataatattataaataaagcttttaaaagtaattaagtagatgttaaactttatgatccaaacggaactacattcccaatagaagttcttttatggctgataccttgaaatctacacaggaagtaaataatctgcttagtaaatttataaatataaatattataaagctgagtggcttaactttattgctgaattattccaaatatatttagtgtgtttgtaaacacatgtatatctagtgatatacatgtacgaggatctaatttttatacatttttactatacctcatatatgttacccaaataatagtccagggaattctttatgtttatgttgatatttctatccaaagaataaccaaatattaatttaaacaaaaacgctaattgcttatgaaaaatagatattaattagagtacatctttagcctcctaaatcctttcggaaggaatgattgtaataaggtgagtaaattcctagataactaaaggttaacctcctctgcctggatatatttattttaaatactattgctggaaatctttttgaattactttctttcttgccttcttaaataaatagtacattgagtttaacacaaacatttcttattgaatcagagtaatctttgaactttgtttattgtgaagcactaaagcttcagctacttgtagtaatatagatagaatggaaaatgcaatcaaatggctatgatgcttgaaacatgcaaaaactgcttaagactgtcttcctcagtagttgatattagtgcagtgggtgagagagcagcctttgaaaacatataggctcaagtttgaatctcagtcctcccacttccatgatctctatacagtttgggaaagatcattttaccgctacaaaatttacttttctatctggtaaacttggggtaatattaatcttgtagggtaagtataaggaatgaatatgataatctatgtaaatcacttgagccttctggcatttaataaatgctcaagaaatggtgatgatattctacaagcagcagatagtgagagcagtgtgaaaactagagaaggacaaatcaggataaataaagatagagtttcattctcctttgtcactcctcctatctttcttcctttcttttctgcccagcctcccccttctccccctgccagctccctctctgaagggacaatatggtctccagtgagggatgtcccaaatgcaggacacatctttgagtaccttattgaaaaattaaatggcagttcacctaagaagttcttccatgtacctaaacttggaggatcatcgatagaaccactaatttgagttactcttccttgctggacatgatttgccctgacttgaatgccaacactttagcagatatttgcacatgtctgatcaaggtcaaacctttccctgtggtctcagaagagtgaacttggctgacctccagggccttggatgggagtcttgactttattgacagttgagtaactttctcaggccaatggagggaagacttgtttggaaggatgattaatccttattaacttttccgtgaaaatgacatgaaaaggtaaattaaatgccaagtctactgtggtctgttgtgaagggagcttttgtttaatcttgttttcttcttctagcattatttaatttaattgaaaggatagttcttgtgatttttctgtagagtttgattaaatattctaggctgctatgtgcagtattttgtgtatgtgagatttagatattttggagtatcttagaaaactgtcatcttagaattaggttgctatttaaaaataaacagtttgcaaaaatgaaagcaatatcctttaacttgcatgtttagtcacagtgatcagtattgatatgtttgttaaaaacagttggtttacacgtgccatgatggtttgctgcacccatcaccccaacatctacattaggtatatctcctactgctatcacagaatataaagtactataataataataaaaataataaaaactgattagtaacataaaaaaagattggtcattttcttagtgccatgttttcaattcacatttattttatcttttcactgatgagtttgcattaattttgcaaaaattttgccatgtgtttttaattcatatttagtttatcttttcactgatgagtttgcattaattttgcaaagggaacaactaaattgattctgtgcaagaaaggtattttatttccctttacttctccaaaatatctagtgattctggcctggaaatgctttaacccaaattttatagcttaataaattaaaagagcatatatgatgatgatgtttttaaaattgagtataaatactttctgcagataatttgtagaactgtgcctacttgaagatggcctatatttcctaaattcaggaaatcagtagggaactaccaaaatcaattgtaaatggtattaaaagggaataattaataatataaaagttaaattatctctgatagaaaataaactgtcatggacatctatacataaccatgcagaacatatctgtatataacaaaatctcatgcaataatatgataactgtaaatataaatgcttacaaaacagaaaaaaggtggaagattacacaaagtatttgaaagtctatcatcttcaaaccagtgttcttattgtctgctgccagagtatatactgttacaggccaatctttatttttgtgattctcaacactgttgatcttgattactattctgtatcttttttaatgattttttgttactttctagctttgtcatttaaaaaaagttgcttttttattttaataaaaaattcttacacagatattagcagccacagaggtacttctttttagcaaacaaattatcacaatatttggtagcaaattctttctaatgcctttttatgttctccttggtgcttaacgggtacttttatttttcttatttttaactctgaaacagtatatttctaccacttcctcataccaccgctctttctcccatcataattatttctgagtttgcaatcattgtgataacactagtttttgttgttaatgttttactgtaagtgtgcgtaatacaatatgctataagcattttaaatacttgtgctaaactgaagccaaattcaatttatgattaaaaagaggggaacaaataaaagtagaataggaaatgctttgccatcacaaggccaaggttagttgttttgatttcttgcttaaagataaaaatgtattgtagatgtgtgttccttttagagtgactcaagcataaggggaagtagagactttctatgctgtagttcaaaacgtaccctgagttattgtgtttctcaaggcatctgtactattttctaccatagaaattattttcttgtacttggcctcagtttctttttttttttttttttttagaatcactttaaggtgttttgttgttgttgttattgttgtttattatttatttatttatttatttatttatttatttatttattttctgagacagagtctgtctccgtcatccaggcccaggctgcactgcagtgacacgaccttggctccctgcaacctctgcctcccaggttcaagaggttcttgcctcagcctcctgagtagctgggattacaggtgcctgccaccattcccggcttatttttgtatttttactagagatgggtttcactgtgttggccaggccggtctcaaactcctgacctcaagtgatccaccttcctcggcctcccaaagtgctggaattacaggggtgagccaccacacccagacactttaagtttgataattcacgtgtggtgatggttgtgatgtctggtggtgcttagtgaaggtgttgcctactacaagtttttggcataaaggaagacctcaaactttgctcgaatcatcttttattgtctatgtttgtcttttgtagtttactcagacatgcttggggttggttagactactggtcatagattgctcaggagcagatttcaccttgagcaaccaggaggcagcatgttgatggggacaaaagcagtctgaagaaacaaagctaattgttgaaagaagccacaggccttgagatacacattcctctttaattattttgcagagaatcagctctaatactcacgttgtttcataatccagttcttttccttctggaggatttctatcattttcactcatctgtaaacaaattccaaaattagttttattcatttctaaatctctggggctcagcaaagtgttggatacattgtgacaaaatatttgtgatagatctatttctgctgaatctgactccttcattttatatacttatttttttccagggtgttcatttttacagaccacttgaattctttcattggacaccacaggggctcatgtaacctgtaaatacaaataagccttcagtatttaaccaatataaattgagaattccctaattctctacaacaaaagtgacaacaaaagtgggggtgtttttcttcttttatggtagaatttaaaagcttgttctagagaaattttcctttaatttataaaaatcttttgtcagtaatattaaactctaactagacttgatgttttttctccctaagaaatcatgtaacttgcacgcagttaccatcatgtcactctttttacttctctttaatgcactcaaaattttaatttatactgagaatagaattttaggtcttgattgtattttctattgagattatatataaaaatatttcatgatacataaaatggaaggaaatgttttgaaggataaattataggtgtttatatatactgtttattaaaaatacaaggataatacaaagcaactgaaaattttaaaacagcaaatgtgagcttgaattttagttgaggtaactgttgtataaataagctgttaaagtgtatatatatacactgtatatatttatatatttaatatattatgaatatatgataaataaaaatatataattatatatacttatatataaatatataaagtgtatatatacactttagcagcttatttatacaacagttatgtatgtatatatatttctaaagagcactaatgtaagattttaacccttttttttaagaaggaaaaacaaacatgtaaatgaagagttctatacccaatttttagacaataaaatataccatggcaaaaaaattgacgaattgtaatgcccagtttgcactttaagttattaataattctcatctctgtgttttcggactacctactaccagcatgtacagggcttgcttttgtaaagacaaatacaaagcagaatgctactctaagtattataaaacctgtttactcggatattttaatagaaaagaatgtgaatctagaatggcaaatttaaggctaaatttaagatttaagtctaaggtgtaaaataacagatattatgtggtaacctatttttaataaattcaactattaagttagctatcattaggctttcagatatataatttagaataatatatttaatacaaaatttttatgtttattgaaaatgctgttcttatatgctggggaaattctattgaaataaatacctctaacaatattatcaagagttacttctttcaaatgcaaatatgttgcacctactaaaagtgtttggcataatattgtcatatgatttaatatttatttaatattgtcatatgatttattcatattttagaataattttattgcctcttacctgtaatatatgccactttattttcattattttcaaagataagggataggtacaacgaaattctccccaactctcaaaaaattaagttcctctatgatagatggtaacattgtactaagatagtagtaagtaatattacattaattcagtgcatacaatttatagatataatactattcaaataaattacaaatgtaatagttttctaatttttttgtagcagaccaagtttttaattaacatgggcagaaaaattagacattactttctgaaaaaaaggtttatttaaataaaatctaataagtatatgtaggaaatagcataaagtctgtaacatttatattgtctccattcagcagtttttgagacatttctgtggagtaaccattctacattagtaaatataactgttttgttgttaatctgaaactaaacatatctgaatatggctttcttgcatattgggtggttttgttgaatcatgatttcacctagaaaatatagatagtgttctgttgcttaattctattagttgaatatatttctgggactctctcaaagacatggtaattttgtttttatttttatgaaaaccattaagccttagctttataatctttacaccgtaaaccataagattaatttctgagctttgcggctggtctaactttgcattaattgtcttaaattaacatctgcagcctggtctgcatgttctgtcatcattatttctgtttccattcatgcccacacctggcatttaaaggttccttttttgtgtaacctatgtaagaattgatttttccacctcatcaccccatgttctttcaatttagagatttttctggaaagcctagttagtaaataattgtcagacagctaaacaaccaagatgtttgagtctagaatttgtgtatttaatagggcatatgatataataaacatgtttgaaattatattatcatattatgatatatgatattatgataggatattatatcacattaaacatgtatattggggtgtttcttttagtatatcaaatttccacacattttctacaggatgctcagctaccactgataaggaaggaaaaacatgtctctaagcactttcaatatcagcaggtattggcagtgggtacaaggaagtcactatttccaagggacatttcaaaccaggactcttgctctaaatttttgagcctgaaagaattttggaaatctgcatgaaagtctcagtcaatgctattatcatggtggcatttatgatgtttatgaggtgataattgttaagacatcaaaacctaatattcctctgggatgaatacaagttataaaattaataaaatcaatattcttttttttccttttgcccagaggaaattactatttatattatgtaagtatgatccaccctggcatttgtatgcaggaaactgatgtgtttaccaagatttttaagaaaatatctaaggtgatacacatggcaaatatctgtcacattatgcatagaaatgaatttttatattggttttcaaatgctaagttaagctcttttgttatttttctaccagaatcaaacatatttaggtatctatttaagaaaaatggcatatatgtattacttttctgtgtaaatgaggagaattgctgacaaacataaggcacctgaacataaaaaatttttgctgcctgcttgctgattttctaaatgtacacttttatctaagtgttttgttgtggcaagtactagagagacacaaacaagatccatttcaggaaaaaaaaaatgtccttgtagtacatagcggaggccacattgaataaacatataatgaacacatcatgtttttatatctcgtaatctaatcagattgtctttagaagcaaatgataaggatttcaaccttgcttaagaaaggtctttatagtggtgcttagggaataaatgtttgatttcttaaagatgtcattagatatcaagtaatagactaatgattagattttgtttgctttctttgatatctgggttacagttagttgcatatggatacaaaaaaaaaacaacaacatcaggctaaatgtaactttgcatctgacatagggagttcttaaagaaaactaattacttgaccctttttgcactataaggaattttaattaaagtgactttttttatttgttaggtcagcaatatgtcataaaaagctatatgaatggtagtaaataacataataacagcattcattgaatgcttttaaatgacacaatatttttatgagaacattctctaaatcatgaaaattaattaaaaaaatatttagagtaatttttgtattctcagaaaccatattttttcttctaaataagaaaataatctgtcaacctcaaattagaacacctataattctatgagccttcaatccaaatattaaagttttaatataaagtcaagtattttacaaaaatagtcaataaaacaagagtgttggctatttagagtacacatagtggatctgtttatcttaaacagtgttatgaatcaacataggtcaacagaatgaaccagaagaatgcatgactttaaaagtttattttccttgagaagatgataaagtacttactaaaatattacccaggtctctccttacattgcgtgaatcttaggaaaatataagttaacacaatgtatattcatttcctttattcaagcagccttgagagagaagggaccaaaggaaagatgccattaatctaatgaatgaagagctcctgtgttcctggggaatggggaatggatgggaacaacgtagaaggtgaggtgggaatgcctacgaaaggttgaagtctagatcacaaacttggctcccagcatgcactggcagctcatccatgcagtgtgatggatgacactccaaacccgattcttcacctcacgttctcccttagaaaggaatgagacttgcgtcttgatccaggaaagaacatctgtaccctagaagccattggctatatttattttcaacagtgcatttcattacagccagggatgcacaggtttatttattcataacactaaatgctctccattccctcttttcctggctaatataaaagtgtgcccaatttagaagaaatgaacaagagagtactgaaatatgccctctgtgtattactgaagggatcccaggaacacttcagcagtaccaggttaaatctgaactctgcctatgtattttctataatgttgaaaattggaagaacaaaatagtcttggcattgaactgacatttcattttgtttgagtctcagttccactttataaaagagcaccacaagccggaaagcaaccagcttagattggtatgtgtgctggtgccaagagagctaatcagagtctagcatatggggcatttgaacaaggaaatggatgttaactatctggttgtgcatttggactgcttcagaatcatttgggttttgcttggtaatctgagaggtagccaggaggggatagaacagctgtggccactctacctgtaagtgccttaattacaccctttggccttcccaccttccccacctgaatattcctctttggcttcatggggtgcttttctaaactgcctaagaactatttgatgaaggctcatttctagattcaggaataaaattgttgttgatgtcctacattcaaattcagtgaacatttattgaatatctactatacatccagcaacatataaattccatccattgagatgcaaaataaaacagttttcaaaagcaattctgaagcctgatcatactggtttgaatcacaactcctaccattttctgaggtgtgactgcaggcatttaacttctttagatgtgtttcattttcctaatctgtaaaatgtaacagaagttagcaaaatattgttaaataaataaagtaaatgtaggttatatgtgtgtacttagaccaacactaggcacattaaaagcacatagtaaatgcctgatgtcacacacacacacacactcccttgatcagtataatatctcttgttatacatatagtgttattctccttttgctgataagagaactgagagtcaaagaaatgaagtatatattcccatggtcatgaacttagaaagcagcagttaagattcaaaatgaaggttgtatatttcatgattcattttcttttcataataccataataactttaaggtatttccatctctagtcaggaagattgcttccaaaatgctctgcagacagtttcatcatgctctcttttcttttctctttgtctctttatctttctttatcttttatttcttttttttctttctttctttcgctttctctcttttttctttttctttctctttctttctttttctttttcttctctgcaatggctgtcctcacttagtctatctttctaacagtttaaaagatacatttgggccgggcatggtggatcatgcctgtaatcccagcactttgggaggccaaggcgggtggatcacaaggtcaagagatcaaggccatccttgccaacatggcgaaaccccatctctactaaaaatacaaaaattagttgggtgtggtggtgtgcacctgttgtcccagctactcaggaggctgaggcaggagaatcacttgaacccaggaggcggaggttgcagtgagccgagatcatgccactgaactccaacctggcaacagagcgagactgtgtcttaaaaaaaaaaaaaaaaaaagaaatgcatttgataccctttcttctggaaacattgtcttctctgggcttctacagtcccattcttttttaaattcctttccaactttatgactacttcttctcatcctcctttgggagtcttccttaatttatcactacattttggaaagccccaaggcttgaagtccttggacttcttcacatcttattctacaactttttttctcaaatgattgtatctaattctcgtaactttaaatactgccacaatctgatgacttcctaattagtatctcatctctggctaatgccctataatatagattcttacagccaactttctctatgacatctcaaactgaactctttattttattcccagccaacctggagattttgtttggctggttggttcttttgttggttggtttttttggaatcttccctgatttaacaaatggctacccaacctcccaactgtacaggccagaaacatttgaagtcatttttaaattgtctctttcccctataccccatgtgtgatctgttagtcaaatctgtcagctctaccttacagttatgtccagaatctgaccatttttcaccacctcttccactaccttcctactctaagccactattatttcacatctccattattacaggagcctcccattagttcacctgcatctatccattgtttcttttgaacacaatattcaaagtgattcttttaaagtgtgaatggcactatagcattcttctggaaaaagtcaaaatcccaacaagcacctctaaggccctaactaacccccacttcccacccgaacctctctgccctaagttcctaccatctttctcttcctttctcagcctctgtgacctccttgccctttcttggaaatgccaggcatgctcctgcctctgggagtttacactttgctgttccttttaccaggaatgcacttccttcagttatctgcatagttccctctcaattcccctcatctatgcctattctccaatgctaccttctcagtgatgatttgcatgatcattctattaaaattactgcccaactcctagcactcctaatttttcttctgtgctttatttttctccataacaataattaccctctctcatcctctatattttacttatttttcccctgatagaatgtaagtttcaagagagtagggatttttgccttttttcagtcactactgtatctctagactctacaatagtgcccagcacacattaggcatgtgttacgtttctccagagggacagaattaataggagatatatatacatatatatatatatacacacacacacatatatatacgcatatatatacattcacacacactcacacacatatatgtgtatatatacacatatatctacacgtgtatacatgtatacacacgtgtgtgtgtgtgtgtatatacatatgtatatgtatatataattaaggagtattgactcacaggatcacaagttgaggtcccacaataggccgtttgcaagctgaggagcaaggaatccagtccaagtcccaaagctgaagaacttggtgtccagtgtttgaggacaggaaacatccagcatgggagaaagatgtagtctgggagactaagtcagtctagtctttttattgcatccttcaatccaattaatattacccaccacagggcactcaatgaatgtttgttgaatggttgaattaatatattctgtgagaatttactgagcattaactatacaacactagtgtaagtgctgcttaagatagagatgaaataagaatactccatgccttccagaaaattaaaatctggtttaggagatgaaacacacaaatatctgtctgtagtataagatagaatattaatggcataaactcttagaagtaaaatactaaataaaatgttagaagtaaaatactaaggggaaataagattggtgtctttgagaaactgacacctaaaaatgggccctgaatgtgtggttggatttcagacaaaaaagatggtgacatggcttggttctgcctcacaacccaaatctcaccttgaattataataatccccacatgtcaagggtaggaccaggtggagataattgaatcatggggatgcttttcccccatactgtccttgtgatagtgagttctcatgagatctgatgggtttttttttcattgtttttatttttattttttattatactttcagttctgggatacatgtgcagaacgtacaggtttgttacataggtatacatgtgccatggtggtttgctgcacccatcaatccatcatctacatcaggtatttctcctaatgctatccctctcctagccccctactccccaacaggccaacaggccccggtatgttcccctccttgtgtccacgtgttctcattgttcagctcccacttaggagtgagaacatgtggtgtttggttttctgtttttgtgctagtttgctgagaatgatggtttcccaacccaaatgcccatcaatgatagactggataaagagatttgatgattttataagggatttcccccttcgcttggctctcattctctctcctgctgccctgtgaagaggtgccttctgccatgattgtaagtttcctgaggtctcctcagccttgcagaactgtgagtcagttagatgtcttttctttataaattatgcagcctcaggcatttcttcaaagcagcatgagaatggactaatacagatgggaattgaaagatttataagacaaaaagtacaacataaggaaatctacatggaaatgaaaacacgttggtaatgtacagaggatagtctacatttcaatttgtgaagagcatgaaatacacacataaagggagtaaggatttcagttatgtataatggaactgtatagttcacatacaattcctgacaaatggaagcttctgtgtacctattccttgagcagaggaaaccatgtggttttcatgttatttgcccacttttctaacctctttcttgtccatagccactacaatctgcagtgggcagagtcctgtgaatagcctgttgtggaaagccctgttctctcaaacagtacagattactcagatgaatgaggttttgtctcctggaaaattgaacaatgaaataaggagacaatcaggcaaggccaagggaggcataacagagaaaggccaggaggcagagaaaggccatgagggagcagtggaagcagaagttacagctattttcaagtatagagaagctgtgattaagcaaatgtttagtggatgtttgagaaaagactgattgaggtgagaagataatacagccaataaaggggagtcggctggtggagggataattagtcaaaaaagacactgagagaagctgacacttaatggatacctaagccacgttaatgaaggtgtcataaagtcaggaagatgcaccaactccagctcttagggcttttggagcaaaaagttgagaaagagctgtgtggatcctgaacaatgtaaaacttctcttctttgattcctatgagaatgtttttctgccttattgccatgtgtagctacattataaatccccattatttaagactgcctgagtgaactgctgatgcttgcaattcaaagagccttgtacaatttgccctctagtccttagcttcctcaactatgatgcatcagatagtggacttgctacatgttttctaaggccctatatagtgatgaaaaaaacctatgatttttttgttggatgattacttgcatattttccacatagaaaagtattattgcaaagtagcccattgttatattttgacagctggggacagaaaaaaacttgtttagtgataactaatgcaactggctttttttgtcctttcatttcatttggtgcttttgtttgatgttgtatgtcttgtccatgaaagatgctaccatcctggaaagatgggaatttaattgctctcatcaaacatattgcctaataaattgcttactctggcagagaaaattaaaagcagctttgatgtgaacaaaagcttttttaatatggcagattttatatgatatatatgtatataactagatttctttatatcatataccatctgtcattgagtattggcatgatggctgcagttgatgtcatgtgcataaatacaaaggtaaatggatcttgttttgtgtgtatgtactattttaatatttttctgttaaagaaaaaatatgattataacattttgaaatgaatttgtatttataagatagagaaatcttgtaattccacttcatttgtaatactcagttttactttcctagatttagtgatgcaaagcaggtcacttaagagcaatattaaaataaggcaaactttctcctctcagttgtgcccatctactcaaacacaattcaaattattttatgcattagtagaatttgtttctttcactctagaggaagatttttcttcaagaaaatcaattctcaggttttcaaataaaaatggtctagtttaatgcaatttcacagaacttattttttttctcataataagactaaaaaagtctgctttgtacatcaggaaatatttccttagcattaggagacagtagcaaaactaacatttttaatgctgtaagaaatatgaatataggactatttgaggaacaaaatctagaagaacaaagtcaaaagaatgaatcatttcttctgtgaagtaaataagcatcaaagttgttactagctccttctgtactgtacaattgtttcaatttgtacatctttagagaatataacagatcttctaaatcagcataactacccaaagttataatatacctagaaaactcaaagagaaagagaaggaactggcattatggataagtgcaatgaggcattcgcaactagctacagttgtgatttatttacaactatgtacacacatacacatcaaaaatgcaaaaatgcaagattacagaacctgacttttagttacataatcctcttttatgtagttacatcaccacttactgaaatgttgagatttcagtaagtggagatgtaactacatataagagaattctcgttagtaaaccagcatttctcatttcctaagctctgagtaagtaccttttcatttgaaaagtgaagtagaaaaatccaactcaaatacttatttctcagctatatgaataattgagcaagtttataataatctccttataacccttaggcatgattataatgtaaagaattgagatttccccaaaataatcaacattaataaattagtaagatagacgtttggtcaaaagttatcgaattttcaaaatcatttgttgctatgtgtttttggtaaactttagaacagttttttaaaatagatattaaaatgtctgaaattgtatatgtgtgtttatatacgtatgtgagtatgagtatgtgtatattcagtgtacaagaatgttagtccactggtccactatgataaaacatattcatgtctttattcaatcattcagtcattcaacaaatagtggctacagagtcaaatgtactatgccatcttgtagtaatgagtaatttacataccctaatctcaagcaattcatatcctcaagaggatacaatacaaataaaaaggtagcacaacataatgaggtaaatgtgatacagggtattcatagaattgtttccacttaaagaacacatgcaattgatgtttcatattaagggccttgtgaatatggtgctctaggcaaagagtataagtgaccatggattaacttctaaatgcactgcaagaaattggaaccaggtggaaaaaggtgacacattatgagcaatgatgaacaaagaattggcaaacaaataggcaaatataaataatagatgattcagaaaataagtttgaggcagctacagtgaagacaaaagtaaaatacaaaacaggaataacagtatcattagaggtaagagctgtacaatcatgtggtggagcaagctaacataaaatttttcctcctggaaacaaaaaatgattaacttttgaacaagggaggaagtatatttttaaattactattattaaaatataaaattagaggaaagaaaagagggagattaaagccaactcattcacattgcaagttactgtaacaatgcaatgctgggttttagggttgaggtttgggagtttagtcctgaagctgggcgcctacacctagccatgtgtgcttctattctcacccaggaataagaagcaataggtcagtgtagggcataaatttggaactgaaacgcctgcataaagccaaaacctgaaatagatgagtcttccatggaacagagactaaaaaataactcagagaaagaaaagtttgactctacccaagagtatgaatcgaaaaaaaaaattctttaagaaataaaaattcaaagtttgtttttacacagcatataatgtatacattttactctcctcatggtacagagatctccaagtagacattgtaacataaaaagtgatcttgaggcaatgaaacaccttggacatctggaagggccaaatccaaaactgctctgaaggaacatttccaagctacctggaagtagagacccatagggaaaaaattccctctcaggatgagtccaactccctctccaccctgcaccatgacaaaagtcattgacactgagagttagaaatcataagtagatgcctgtaatccagcactttgaggggctgaggcaggtggattgcctgtgctcagaagtttgagacgagcctggccaatatggcaaaaccccatctctactaaaaataaaattaaaaaaaaaacaaattaaaaaattagccaggtgtggtggcacatacctgtagtcccagctacttgggaggctgaggcatgagaattgcttgaacccaggaggcagagtttgcagtgagccgagatcctgctactgcactatagtctgggcaaaagagcaagtctctgtcttaacaaaaaaaaaaaaaaaaaaaaagagagatatcaaaaacagaagagtcagcaaccatgtctgagaacctgaaataatgggacaatctgggaaagaacatgaaatatggatttaaactcaatggcagcaagaatctttttgtccattttattcacagggttgaggataattctagaatttgttgaatggattgatatgtataaaaactaagaaatgtaaataaaaatagggttttaaaaatgaatatgaaagaaaaaatgaacaggcaaagttgaaaaagaacaaaatagaactgctggaaatgaaaactatagatattaaaatttagaaatataagagatggtttaaagggacaattggacagaactatgcccaagaaacaaaacttggggaaaattccccaaatgtgacacaagtgaaaaagaggtagaaagtatgaaaggataattaagacatacggagaattaaatgacagaatctatcaatctatctgtctgtccgtctgtctgtccctccgtccatccatccattcatccatccatccttcctacctacttacctacctacctacccacctatctgaaataggatttccagaaggagctgagagaaagaatgaggaagcagttatatttaaggagctaatgatagataaattttcagtattaataaaatatatgaattttcagattggaaaccacagttaattctgagcagattatgtaaaagcaaatttaagtattgatgttatgaacaaataagttataattagttgaacaacaggtattagaaagcaacattggaggctagaaaaccatagaatggtatcttcaaactgctgagaagagtaattttcaaactagaactctaaatcagaattgctaaattggtgatgaaaattgaggctaaagtacagttattttcaagccaacgaagactgcagaggtttctatgcacagacactctctgaactactaaaaaatgcacttcaggaagaagaaattgaaactaggtggaaaaggtgacacatgagcaagggtgaacaaagaattgctaaacaaataggcaaatttaaataattaatggctcaaaaataactttggggcagctaaaataaagaggaaaatataatacaagaggaataagagggtatcatgggtaagatcagtacaagcattctcagctctttgtgttagggggcaaaatagacatttccattagtcttttattttgttagtgtaaaatatgaatataacctaaaatgtaaagatcatcagaatgtaaatagatgcaactatgaagctaatagagtggaggaattaaacaattgatcaggctatcgataagaaaaatagaaaaaagcataaactaaaaacaaccaaatccaaggaaagatgtatatgtaaaagcttgaaagccagaaagagcagtcacatgtgagagctgcaaatagttcaaaatgactggagaagaggcaggttgaggtgtgcaggggcggggaggatcagggtacaattcaggataaatgtagaaaggttatcaagagccataaatatctttatgttcatatcaaaaagccacagaattgttctaagataaggttggagtagcaaggcctggtggcacatacctctagtcccagctagttggaaggctctggcaggaggatcacttgagcccaggagtttgaagctgtagtgcacaatgattgcacctgtgaatagccactgcactccaggctgggcaacacagggaaactgcatgacacacacgcacacgcacacacacacacacagaaaagaaagaaagaagaaaagaaaaaaagtgaagcagcccatatttgggtgcattgaaagatcattctaaacatggcacatacatacatatgtaacaaacctgcacattatgcacatgtacacaagaacttaaagtataataaaaatatgtatatatttaaaaaaagatcattctagcttaagtgaacaatacgtggaaaagacatactgaaggcaagaataccagtgagcccagggaaacacaaaaatggcacaatgtaaggtggtagcagtgggaataaaggcaagtgacagattagggaaaaacaaagcttaagaattaatataatgattatgtcatttataattaataaagagtgattgggtggtgaatgggcagaagaatatgggatgaaacctaccattctggcttggatagtggagtggagggggctgcgattcactatgacactgaacaggtaattagcaacagttttgtttgttgtggtttttattttaaaatcaacagataactttgtatggatttatgtataacatgatgttttgaagtatgtatacattgtggagtgactaaatctagctaattatgcattaactcacatagttattacttttgtggtggcaacaccgtctaccctcttttagaatatttttaaaacacagtatgttattaactatagccaccatgttgcacaatagatctcttgaactttttccacctatcggaagttttgtaacctttgaccaatatctctccaacacccacccaccaccacaactattctagctgccagtaaacaccattctactttctacatctatgagatcaactcttttagattccatatctgagggggatcacgtcatatttatttttctgtgcctggtttatttcacttaacataatgtcctccaggttaatccatgaggatagttttaatggttattaaattttcatagcttgaaagaggccatgttgagaacatttacacctcagaaaatatgctcagtattggtttttatttttttgagaactggtttactagctcatgactgagatttggacattggagctggaagtaatgattgggacatcaaaatagagatgtccagcagctgatagattaaatatatctggagccatggagagaagtagtttggaaacaaagatttgggactcaagaattgtgggtaactggattatttatttactaattcaacttgtttacctacttgaaggggaaactaataataacctggataaaataacattttaatatttgatgtactacaaaaggtagagtgatttttgtctttgctttatactacatactgtatataaaactgtattttcctgtctatggaatatactcaggatacatttaggcatatttctttattttaaaaacatagtatatttgaaggaaactcaggcttgtttttcctcaatttgttattgttgtttataatatcatttaccaaagttaattctgtgatggactgtaccagttatctgcttatggcatctcagctccaaatctactcttcttttttcctgctttgtgatactgaagctgggccctacaaacatttctcctttgtcaggtaactcagtgttaggttttgtcaataaagggcattggagagcaatgtacagtatagcagaggaaaaggcttctcttccaagttctggtatgattccttttttctttgtagaatgcctgtggggacaggtatgtggggagactgtggtgcttggcctttagtgtgttctccaacccctggaaaatttctctagcaccccagcagtgattggctgactccatcccatgggattcagaaggcagctttctatatacccgttccagcccacagtgcttcagtgaacattgtaggcaacctgaagggcagctttcagcacaccagctctgacccaggataccctcacacgtatttttgtcatcctatgtgctgtagtcatactcttcctaacgagatcttaatatcatctttatggaagagggatgggagagcttacaatttggccccttctttgggttttctcacttaaccctaaggtacaatattctccctaaatctgcaatgcctatattttttagatttttaaaaattcattttagacattaactatcttttactagttaataactctctttacatgaaattttatttttcctgcttcaattattggtgtggtttgtgtctcttccctggaccctgactaacacatggaccatgtaagaagttggtcggaaggcagaaacctccctatgcagaaaaataaaatatcatccttttctatgaaataaagaggatgcttttggacacctattaaaataatagcgaaggacttttatatttattatatatatggcatttttctgacctgcatttttaaattaatgtatttttcagaatcctctgaaaggttctgactttctagatgcagcattgatttcagaagcaatggtgaatcttttttgttccattttttttttaatttttccgcataagtctacataatggtcatttctacctttgtaacttggatttactataatttccacttagtatttctctccttttttttttgctcttctaatgccgatcatcctttatggtctagctcaggtcatgattctttccaagcttatctaccctccccacatgcagattatctactactctttatctgccaaatcatatctcaagagccatctctaatcaacttattgaggtatttctcatgtttccaatgaaatattaaactatgaacctttgtggaattttatacttctttatggggaagttattttttctctcattttcttctctcaagactatttttttcttttcacatatttaaaaaatgttttaagactgattttgataagaacagtatataatagtcccatattaaaatagaagaagtggattaacagtgatgttaacaataagaaatgtactgttaacatattaacagtgaaataatgaagtatggtggggaaatgactataaagcaaacagaataacaattaaccttaattgagtttaaggtttagctaagagtttctgggagtcaaatgaaaaagggaaatacaatgggctttgtatttattttacatttttagtcagagattatattcattggtgatatggtttggatgtgtgtcccctctaaatctcatgttgaaatgtaatccccaatgttggaggtggagcctgatgagaggtattggatcatgggggcagattcctcatgaatggcttagtgtcatctccttgctggtgaacgaattcttgctcaattagttcatctgagatgttgtttaaaagtctggggtctcccctcaatctctttcctactccctctttgccttctgccatgattgcaagcttcctaatgccctcactaggagcagatgccagcatcatgcttcctgtacagcctgcagaaccatgagccaaaattaaactttttctttataaattaccatgcctcaggtattactttatagcaatgaaagaaatgactaatataattggaaagcagactatgaagtggatattattgtgcaggaatttctatagggaaatggaaaaaaagcaggattgggcaaatggaatgctccgaagctgtgatgaccccttcacagttgtcacaagtaggggtgatggatctgtgtccttatatcctgacatcctggcattgatcagttattagatgtgagttacctagaaaggaggtatgctttggtaaaaaacttcagctgaggcaattcctgggaagaccagctgacaacatttccatcagctgaaggaatgtatccttcagtgttgaaagcgattctggaagtcatgggatagaattactaatatcacatatatatatatatatatatatatatatatatatattgctttttcacagacaagcactacgtctatcatctctctttagcaggaaggactgggctttgcagaattgttcagcaataaatttctaggattgaattgaagcaaaattatattcatgactttggggggtttgggtgtgggaagaagtggaagattaaaacacttaatttttaatggccactgatgtctcattgagagatgagaaaatgacaactgtataaaggaaatgaaaatataagtaacagcttgatgcaacagcagaacagatgctgtaaggaattacatcacatgattaattgtcaaatgagccacattaattatttgctggaacaaataaaaacaaattaccagattaatgatataggcaattgttgctgcaggagtttagctggagtggagagttagaaaaactgaacagttggagataaggctgagatatttccaaataaggaatttagattgcttctggcatcctatgggtgtttgaaggtgtttgatacaatgattgtgatctaagtaagaacttggtttggtgttggcataatagatttagaataggaagtaactgggggcagtagatcactgatagataatttccagtctggatataaagtgatggaggtgatgatgggaatagaagcaacttccttcataaagatttccctaactctctgctctaagttgatttctcccaaagcttcactatttgtttcatatattctgatctttaataatttgctgtcgtgtaatgagcatcataataataataattaagatttctgtagttatttatattttacagagtgctttcactgttcctctgactctttcaaacataccatgagctaggcaggacaggaatttcatctccatttttagatgtgaaaactaaagcccagctgcttaatgctattattcctctctcacaatattataaacttcttcaagctacagagtgtatttctatttttacagagcctaaaatagaaaggcagtcaacagattttagtaggatgtgtgggagctcatatttgaggcaatacaaactcataaaattaggtgttatagattacgctgccaaaagatgactccaagtaatattaaagttgactttttcattttttacttcccaatgagcaaagtttagtttttgaacagatgacagcttcatatgttactttaggtataatatcacatctgggggatatttcttttttctcatgctattggaaaattttacagaattttcagatagattgcgctataagtatttctctaaaatgaatatgcctccccatgaaaaatgtacatatatccagggatgcttacatcacatgaaaaaatcttgtaagaaataaaagcatatgtaaaaaacaaaaaatgtattatgaaatgtcaggtgttgggataaaacattaacctaaattcacaattcctgataatccacaagtaataagtgagtttattaattaaatgagttattacttttcttaagataccttgaaaaggaaaacattccatgccaatttagtaatgtaatagaggtagcactaaaatgttataccaagcactggaacaggcttgagtgtgccggctttatcagtaatttattttctcaacataggaaagtcaatggggttggaatagatgatctccgaattttctttcagagagtaaatacatctattccgttgttatttagtatttaacatgtaactgatgctcaagacacaataatgaataaaaaagacattttcatatcctcctggagttatatttgatggatgtattatatcacaacttggagtagaaagtgcttgtgccacacaaaaagcatagtttttcaaagaaagcacaaccataaaatgggtttaaggcaaggaaatatatagcatatgtttgagaaaaagttgtattttacttgaatactagtggaatttttagtctcagaaacaaaatgagtatagagtttcaataaagatataagaaaatcccttaccaaaaagaccttaatgaagaacaaaacaaaattggtgacaagttggctcttggtagcttctaagtaaaattcagtggagtagcaaggcaaagccaggttgaaggcatttatagtgtaagtggatggtaacaaagtggaggcagtgacatatgagttatgtttaaagaaatatttgtagtttaaaagcatggatgaaggcagatagggcggtgaattacagggaatcagaattggtgagacatctttttgtgtttttttctcttttttttcttatgttgttttatactttaagggagaataaagaaaaattttagacaaataagcatgtgggcaagatagcaaagtctggaagatcttatatcagggcaaatgttggtggctaagctttggaatatacaaatgaataaaagagggaggttaaggtaccgagaaacctcaagtaggcattcatagacttttcaataacttttaaaattctaaaaagtttagaatagccacttttgacaatgtgatgatcagtcaaaaacatgaaaaccaaaaggaataaaaaggaagaaggcaagaaatggaaggagaaagggaggaaaacagggagagaagaaaggtgggagagacagacagaaggaggggagtgatgtacagatcagttagcaaactgtctgtgaaggaccaggtagttacagactttcagtatttgggggtatatggtttgttgcaactgttctactctgctttgtaaaagcacaaaagtagtcttagacaatatataaggcaatgagtgtggttgtgtttcaatacatctttatttataaaaacagatagctggtcaagtttggcctaagggccatagattgctgacattccagccagatgatgccagattctatgtagttcaaaacaagccatattagcatggtcctatgactttcttgaatgtaagaatagggattttatatgtgtatatatatacacacacacaggtacaaacacacacatgtgtatgcatacacacacagacatatatataaacacatatttatatacacataaatatatttgtgcatgtatatatatatgtgtgtgtgtgtgtgtgtgtatatatatatatatatatatattcatacacatataaatgctagaagtcatctggagtctccaactccttgaatctgcttaagatcagtctgtcacagacccagtttttatgggccttatattttcttggtcacctatggttctgactttcttctataccagtgttttcttcctatgtgttttatacccttttatttacctctgccccggtgttcagctaaatataattcattaaaatttttttttttttttgcttttttaaatttcagctgcaaatccatgaaggcaagcatgttgtgaggaaaatttcttttactaacagagtgagggtctccaggagttctagcctcatgaatcacagagcaaacaacttcaaattttaaactgatttcaggcattcatattttcacaaggcctttgggttatcatgccaccaagacattatcagtggtcaactgacccttgcagaattgtttttaaactaatcctttttttttttcttgctgtgtccttttttttttttcctctcaggcaaaataaatgaatgaatggtgtcacgcaggattcagctaattttttcattatttatatctttgctaacaaccatcacctagaaatttacctttttacctgagaggcttaacttctaagaagtatcagttgttttttcttttttaactagggtctagcattctaggtcatctaatttgtgttatcctgtgagatcacaacaactctgtattgtatggttggtattatcttctacattttaatagatgataggaagaatcaagagatagtcaaaatgggaagcataaactctttcttaaagggtgagtgaatgaaatttataatttggtgtctatgggaagtgggcttgatgatactctagatttagattagagttaattagtagcacctcatttacttttgactactttctcagaaaagtaatcataaaaacccttaaatagaggcaatgttttaactgcatggagaaagaaatggaagcagcaattaaagctcttctagaacccaggagtacttttcttcaataaaaatgcagtgatccctggagcagtatagccaaagtaggtaactcttttttaaaatgtctttatgtagaactaaaaatagaactaccatttgaataaccaatcgcattacaggctatatacccaaaggaaagtaaattaatctgccaaaaagacacatgcacttatatgttaatcacagcagtattcacaatagcaaaggcatggaatcaacctaggtgcccaataatggtagattggataaagaaaatatggtacatatacaacataaaatactatgcagccatagaaaacaacaaaattatgtcctttgcagcaacatggatgcagctggaggtcattatcctaagtgaattgatagagaaaaccaaataccacatgttctcacttataagtggatgctaaatattgggtatacatgaacataaatttgggaacagtagacattaatagaggggaggaggagggaggggaagaaaggttgaaaacctgttaggtactatgcttactacctgggtgacagaatcatttgtacccagacctcaacatcatgcaatatacccttgtaacaagcctgcaaatgtattccctgaatctcaataaaagttgacataatttttaaagtatctatgtaaatttaaataaatccctatctgaacttaagttttgtgttgattttagtgtatactgaaaagacagggtttggttcaccattatttaaggtctttagtagttaatactgaatcagaatttaagcccattgaaatgtaaacctcatgagcacaggaatttttgtctgttttgttcaatgctctattctctgacacaaagaagattctgaatactaatttgttgaatgaattaatttagaacttcttcagttttaaacaaagttaatgtgaagccttcagagcccatttggtttcctgcagcattcctgtgcatactctgtgcccctggcctcacccttttcttccatttcaaagcaaggacgttctctgtttttagtagaagagttgttaaaaagacagcattgaagaataaccaagatgtcatcagggccactcagcccttttcaacatctttgaggattctgtcctgcggtggcgctggtattttactgagtcacctctggctatagttgctttctctgaattctctcatctcaatctggtcgggcagctgttatgacatcaccccaaatatgaacaaaatctctagtccttgattatcccaaataccacccacacaaagacatcagttatgacagaatgtactgactgattgtatggctagaaaatgtttagtaacttttcaactgaactgaatagtaagcctttctatttttaaaagtcatttggataatgctctctctctttccttctgcattttcacttgtattctctcttgcttgtatataaacctggcttgttgctgagctagctagtcacttcaatacccccttttcaatcttcttcctagttcatttgcccttgtctacaacctcctttaatacgttgttagcagaactgtttgtctttcctttgtctcaactcatcctgcgggcaacaccagttcagtatttaaagatgcatactccagactgagactttattggtgcaagtcttcctctactttattagctttgtaatcttagaaaacttacttttcttttccccagttacatttttatttgtttttttgcaagcttgtaatgaattggtgaatgtaaagcatttagaaaagcatggtgtggtagaaagctctcactaaatattattttacatttttgtcttgctccagggctctcttccttaataaaaaaaaaaaaaaaaaaagaaagaaaaaaaatttaaaaaaaaggaaaaggaaaaccaaaaggaaaaaaaagtattctacaatgactttcactaaacagagccaaataggaccaccacaaggaattcagtagtcagcaattaaagtaaaattatttcttccctgctaaagaaagcaagtagcagttttttaacaccagaggctattatgtcctcattttggtcagttaattttctctttcctgtggaaagtgatcatcataattttatgttttagggctcaattcactatttttcaacattaaattgtacaatttaaaaataattttaattttaattttagattcatgagtgtatgtggaggtttgtatgtggctatattatgtgatgctgaggtttgggatattaatgatttcatcacccaggtagtcagcatagtatccaacagttagtttttcaacccttgtccccttccctccctccatccccactctagtagttcccagtgtctattgcttccatatttatgtccatgagcatccaatatttagcacccacttataagtgaaaatatgtggtattgggttttcagtttctgcattaatttgctcaagataatggtctctagctgtatccgtgctgctgcaaaggacaccattttgttcttttttatggctacagattattccatgatgtacctgtattatatttcttgatcagtcccctattgatgggcaccttggttgattccctgtctttgctgttgtgtatagtactccaatgaacagacgagtacatgtgtcttcatggtagaactatgtcttttcttttagatatatacccagtaataggattgctgggtcaaatgatagttgtgtgttagttttttgagaaatctttgaactgttttccacaatgcctgaactaatttatgttcccaccaacaatgtatacacgttcccctttctctgcagccttgctagcctctatacttttttataatagccattctgactggtgtaagatggtatctcgttgtggttttgatttgtatttctctaatgatcagtgatattgagctttttttcatatgcttgttgaccacatgtatgtcttcttttgaaaattgttcatgtttttttgcacactttttaatggggttgttttttgcttgttcaattgtttaggcttcttatagattttggaattagaacttagtaaaaggcatattttgtgattcttttcttctatcctgtaggttgtctgttcactctgttgatagttccctttactgtgctgcagctccttaatttaattaagtcccacttgtaaatttttgtttttgttgaaattgtttttgaggacctaatcataagttctttctcaaggccagtgtccagaatgatgttacctaggttttctactaggattcttacagtttaaggtcttacatttaaatatttaatctgtcttgagttaatttttatgtaaggttaaaagtaggaatctagttttattcttcatatagctagccagctatcccaacacaacttattgaatagggagtcctttttatcattgcttatttttgtcaactttgttgaagatcagatggctgtaggtatgcaagtttatttctgggttctccgttcttttccactggtctttgtggctgattttgttccagtaccatgctcttttggttattgtagccttatagtacagattgaagtcagataatgtaatgctcctggctttgttctttttcttagggttgctttagctttttgggctattttttggttccatgtgaaatttggaatagttttcttctagttttgtaaaaaaatggcattggtagtttgaaaggaatagcactgaatctgtaacttgctttgggcagtatgaccattttagcaatattggttctttcaatccatgagcatggaatgtttttctatttgtttgtgtcacctgtggtttctttacacagtgttttgtagttcttcttgtagagaactttcaccctgttggttacatgtagttgaaggtttttgttttttgtggattttttttaagctaattgtaaacgggattgcattcttgacttggctctcagcttgaacattattggtgtgtaaaatgttactgatttttgtaattggttttgtatcctgatactttactaacattgtttatcagttataggagccctttggtgaagtctttagggtattctaggcatagaatcatatcatcagtgaaggcagattgatttcttcttttctgatttgtattccttttttttatttctctttcctgattgctctggctaggacttccactactggcctagccacagccagcactgtgttgaataggagtgatgagagtgggcaagcttgtcttcttcagttcttatggggaatggttcaaacttttgcccatttggtatgatgttggctgtgtgtttgtcatagatggctcttattattttgaagtatgttcctctgatgcctagtttgttgagttttttttttttttttttatcatgaagagatgttggattttatcaaatgctttttctgtgtctgttgagattacatggtttttggttttaaatctttttatatggtgaatcatatttattgacttgcatatgttgaaccaaccttgtatctcaggaatgaaccttacttgagcatggtgaattaactttttgatgtactaaaggattcagtttgctagtattttgcaaagatttttatgtttgtgttcaccagggatattaggctgtagttttgctccttttgttgtgtctctgctaggttttggtagcagaatgatgctggcttcacggaataagttatggaggaatccctccttcttgatgttttggaatagttctggtagaattagtaccagcccttctttttacaactgatagaatttggctgtaaagccatctggtctggggtgttttagatttgtagtttttgttactgattcaatttcagaactcaatgttgatctgttcagggttttagttttttcctgattcagtcttgggaggttgtgtgttttcaggaatttatccatttcctatagattttttagtttgtaggcatataggtgttcataatagtctctgaggatcttttgtatttctgtggggtcagttgtaatgccaccttcgacatttctgatgatgcttatttggagcttctctttttttcttggttaatctagctagcaatctattgatcatgtgtatcctttcaagggaccaaattttagttttattgattttttatgtatgggctttgggtcttaattttattcagttcctgtctaattatagttattttcttctgctagcttaggctagttcttgtttttctattatccctaggagtgatgttaaattgtttatttgagatcttactaacattttgaggtaggtgtttagcaccataaactttagtcttaactctgtttttctgcatccagagattttggtatatgttgtgtatctcttttcatttatttcaaagaatattttgttctctcccttaattttattgtttatgcagaagtcatttgggagcaagttgtagttatttatttctgtataattctgtagttttgggagatctttttggtgttgattttgatttttattccactatggtctgagagtatggttggcataattccaatttttttcgaatttattgagacttgctttgtgaccaagcatgtgtttggtcttagagtatgttctgcactttcattgtatatatacagtaaatagggttttaccttactgagcagaaaaacaattcttctttttctaatagtctaagatactagataatacctcttaagcagaaattatttcattatttcttacattttaaaaatttgaattatactgattatcagagggagagaatgaatgattagtttttttttaaagaaatggagggtaatttattgattatacagtgtatctccctacactttacaaatgaagactttgagttcattggttatatgacttgcagaaggtctatgtttcagtgcctggattggagtcaagcaactcagaatacttttgtacctgcacccttccttgttttgttatataactctagaataaaataaaaagccagtaagtagtgcttaactagaatcagtatagaaagaaacaatcctgctttcacacttctcccaaaggacaatgttcaatataatatggagtcaacttttatttgaattgttgagtgatttgcatcatattagtcatagctctaatcaaacagaattgttttttggaacaagattatcatctctatcttctctatatcttctactttcttatagcagggtcttacagaaatgctcaacctacttcttgttgactacattcgattgttgccttaatttgccttttgagggtccaaattattattttaatatataatcttcctttgaacagacataagtcaaatcaatgacaaaatccctaatcttaaagatcttatcatatacctgaaaacactggatgtaaaatagacctaagagagtaaataatcaacatatacacccacagtatcaactgaatacagtagaatttcacaagttcccttatgttgacatcaagccaaaggggatatgtagttaatttacctaacttaatcacaataaccttagaaggaggtgagaattttattagaggactgaagaaagaggatagaagtatgagctggtggataagacagagtcttgtagatcattggaggagagaggaataaataaccacgatttggaaagcaagaattttggttgggctactgaagttcatgtgatgagaaagaagagttacctaattttaagaatggagtgagattgggtctaaagctatttgtgaaaaaaacttaaaggctactctccgcaaagtctgaatataattttatgatttaacatgtttttgcttcttactctcttttggcaagaacttcataaactgaaaataactcatgaatgaattataactagtatcttttcatgttttaggagctccatgaatttataatgaattctattctttgtattctctgtttgagtgatgaaagggtcagaagcacaatttataggttaaatgatattagagaactatgtattgtgtgacatatttcattaaagaagaggctatgagctggggctttaacaaccaggaatttcacacatctggccagcaatcttgttcataactacttttataattgctaagaataagaaaaaagaattatgtgcatgcatttttttttaaggtttacaactgcagtttctattcagagtagattttagtggtgagggggtactgtgcccatataacatgtaaatataaagtataataattactttgataatactcatataaagtaaaaaagttttgtctttataacttttctgaaaatatatattagcatactagcactgtactaaaattaaaattctttcgaggatttatctttgttaggagtagaaaaggttagttacaaattatcccagaaaattaaaaagcagattgaaccctttgtttctcattaaaacattaataccatttgaaaactctgcttaaattctctgttcctaaaattaaagtatttaaaaatagaaatataacatataatatataattacaacaccagctgcatgtatatggatatatccaatggatgatattgacagccaacagtaaatcaattttaaaaattttaggcatcttccatttgcccttctgcagtcatgagatttcttgggagcctaatttaatacacatgaaactatgacagaaataaagaacaaggcaagacgatctataattaagtgatgaatgccatagctttaagtgctgttggaatttaacagaagtaaatacagcctttgagaagaatagccattttccaaattttgtaacactcattttattcattttaatcaatggccacagggaagtttcagagccgaggatgataaactatgctatttgaagggctgttagaagacaagaagattggttaattatccacataatgatagtttaaaaagccaataatttatttagatatgtaatgacctgtttgatgatgaacattttttcctgctctttgctaagcaagatatgatatcttattttcttcgtagtaataagtaacatttaaaacataatattgactagcttccctttttaggcacaattaaatataagtccccaaaccagcaggtagcttgaatcttcaaatttaaaataggtgtagaaatttggagaaacgacaagaacaatatagtaaaatgggaaggatttacccttgctaatgatttttggaatcttacataattagtgaatgaaacaatttcattaattttgacacctatcttttggctggatatcatcctatgacagataaattgttactattttcattccttaaatctatttatattttttaccacctctcaacacaatgcatatgttgtggctgaaatacaaaggaaaggcttgatgcttatgttcagaaggcctgaatttaagtcctggctatattgtatccctgctgtgtgatcttaaacaagttacttaatttctctgaatgagatttgattactcatctgaaaaatggatcagtactgatactttccttacccagtggtgaatccatgcatgcttatggaaactgttaattaccaagtgctctggattcattagttcttctgtattctctttcttactttcctccttctcttcctttttctttcctttttttcttcgtcttctttccaatatctgtccatattaacgcaggtatttaaaataaaataaagcttaaataattatatctatccatattaacacaggtatttaaaataaaaaaagcttaaatgattatattttaaattgctacatgttggatctgatttttaaaatctttaactaccctggacccaggaggtggggtggcagtgagccaagatcgtgccattgcactccggcctaggtgacaagagtaaaactccgtctccaaaaaacaaacaaacaaaaacactttaactacattttttccttttatgtagatatttagaaggtgactatataccttcaatgatgaccttggtagaggctcaaatcagtgttatttctttttaatcatttttttctaaccttgaataaaagccatagagaattactttgtagagagcaactgattaacataataatatcacagggtagaaatataattactggattatttcaaatacatttctgtttctagaaagtagagctcacttcctattcttgggtaagatgtggcattaacaagaaaggcagtaggctgacagaaatccatagttatgatttttgctgttcagtacaaggtcaatggttaattaagtcaccaccagtggaaatttgatcacagatgaggtctccaactttgcccatattactgggctctcactggatgactcagctaagtcattatattaactttgcttcctccagacaggtacatgactcaaactgggctgacaggggacttaggttgtggtgctgtaatattactttctagacactgtgattatccatttcagaaaatacacattcttctcagaaataggatttaattttaaacgtgtcgtttgttatgaaaattaatcacctaatgtcatagatagattagattggcaagggtcttatgggtacctttattcactgatctgttaaatactgacctcattcatttccatgaatattggaatcattgagtatctttcatgtgctcagcattgtgctgggcgctggagttagatagaacagcatgagccttctttctcttgagacctttaagctcctcagatcacagctaggtaaactaaagccaagaacgtttaactaacttgcttaaagttcagttggctaataatagcagaaacaggactagaaccccagactctgagccacctccttgttaagcacttatcataagtaagatgacttttaatttttcttgtgagttcatataagtatggtatactatgcttagacaccttatatttgtattagcacttaaatatataaaatgcaaacaaaaggtaccagagaaaactcaggtggatttagatgcaatcagtgtacctagcatcccaagccttttcctgcattagaggaaaaatggctttgtttaagtttgtactgtcttctcagtatctttattccatgaatttgtccataaataaccttttctagcttttctctgaggtgtactttgtgccacgctttctgtgtcacaaacaggtatgtgagaagaaaaacaaatggtgcttttactcaaattaggaatatgagatatttgttgtcctctgctaaaacctaaataaatatgcatgacatcctacaaatgtagtggaaattccatctctgcctctaggctgccttcaactaggtcacactaggcagataaggatatatgttggctcttatgtgtctattgggagaaatccattcttgaaagttgggttgggaaaccgtttcagttgtggcttatgtatatttatagtgcttgcatttattcttttgctgttcccctgtgtgaagcgttatatgggttcattttgacaggattggacgaggcacaatgtgttaacctcttttttcttgtaattatataaacatgtacactgtacacagtgacctgggaatgaggatcagaacatctgttataataactgaaatggtgaatgagagtagattttgaattgtaaagcaataaaagtcactcttctgatctgtggctttatgcaaatgcaaatgtttgaaaatgctgctgaaacgtgttattctttaacttaccagaggtagaaagagagcttgctttttattgttctcacatgggtgctcccagctagggagttatttgtctttcttggaatcaattaagttaacctttacagcaatttgtttagtagtttaagcattctagaagctacagaaaagtgtctatttaaagtagctgataatgtcaggataacctcatgctagcaaggcatatttcacagtagttctttggtatgcaatcagcatcacctacataggctcttgataaattttggattaaggaaccaagagccttttgggtacaaattaataaaatgaatgttactttcatcattcttttcccaaaatgaatgattagttgaagaccctacctaggggcaggtcatgaactcaccttgcagaggaacctttgcccattcttctgattccatgcaaaccctcttcaccacaccaagattacctttctcacgagaattatcattgtctttgccagtaccagcttggctgcaagcagaggacattttaaaagattattttaaaattatttaaaaatttaaagttacttaaaattactggttagtacttggttatacaaataatgtagcaatttttttcaatagaaaactgaagtataaaaaatgaagtgatttgcctaaggccactcagcagaaaggctgaactggactgtgaacccaagccaactgactccaagagcccttatctttaatcactatacaatatttcctattttattagccatatattctgaatatttttccacatcaataaatataaatttaaccatgcattttaacgattgcacagtattcctctggtggtttacaatgctattgtagaatctcctcccagatgatatacatttagattgtttcaattgtatttcataattaaaaatagttcttctatgaatataattgaacatgtgttatttctagtaaaatttgtctaattcttcaatagctatgtaatttgcctttcttactaatagaaatatacaaaattgcttgctcaaagattattccttgactctacatatcattatatttatattaatgcaaaaaacacttattgagcacctactgtgttacactcagttaagagctgcacattcaacatggagtaaatgcacaagaggttatagactaataattctcactaacgaattttagaacaaatgctttaaaacctttgcttgattataaatatgcagttcacttctcaggggatgtttaggagtattatcatttttaatggaaatctctcatagaggggtgtgtgtgtgtgtgtgtgtgtgtgtgtgtatgtatgtatgtgtgtgtgtgtctcactctccaccctgaacacacaaagtcccatagtctacagttgggtcatttcatttgatcttgagacatttgtttaagctatgtctacacaaagtcactgtaaacattttggtcagtgacctgctttgtttgacagtgtcacaccactgtatttttttctggtctactttcactctggattaactagcaggtttttaaagctttcctcagactgcttttatatgagtccttgtgggtatgcattagtttgcatgcaaactcatatatgtacattatttctgcattagatctctactagattagctacattatctgcaattcgaatttccacaatcagtttttgagttagatgtttagaaaagaaaagttactaaactttaactctttatttatacatttacattttccctggacaattttctacaatattttcttcccacacctgctttgggttctttcagtttttcaatttcacaggaaaaaaatacctattattgtatgttgaaactagttgtaaagagtaagaatttttaaaataaattctagttagcattagatatatcctctattccacagactgttctaattataaaaataactcatgtcattttgtaattaacaaaaggctttagcaaatacctgaggctttctggatttctggaaggaacacagtgtgatccccatgattgtcttagttgcctgcaaaaggaaaataatggccatttgatcaatttctacaacattttaatatgatgttgatacaaaaatatggctttaaaacttcattttgttttaatacatgagacactctcatatttcttctccatattagtgagattctccaaacatttattaaaaactcacactacatgtgaggcaccaagttaagtccgataagtcaaagaagagtaagccatcaaagagttttcagaggaaccatgtatggtaatagaaggttatacccttggtcctgtcagaagtagtagaaaaaaggaatgaaaaagatggtgtgagagggaacttgaaatctatatgaggaatagatagatatttatagagaagtaggcttcttgaaggagaagatgaggtgttattaatgtaatatgaatgttaatattttagcaatctcaagataatttaatactatagttttaaaaagggggaaaccaaaagtaattttaagaattttaagaaactttgccagaaaatatagaagtaaacagttgttttactcttctttgttccttcatttaaaacaaaataaaataataagcacacaaaaatatacatttatatataatagtaaatattccacctaagagcattaaaatattgcttaaagaaactgcaaagtaaataggtaagaagaaatgaaggacctatcttaaagttatagtccatataaataatagatactgttttgtatataatatcaaattacatatgtagattgctttatgaataatactattaaattaatttgcatttttataaaatattaacttgctagccatcttttaaattactatttctggattaaaactctagaatgtttaatactttcattttaaactcatgatatctaaatcatctttctaaactcaaaacatatttgcatctatattttattgattgaatttcataatattttggcagatgatttctcacatcaatgtattttttgcaaaagagagagttaagtgtcccatatttgcaaaagactggcatttaaccagatctgaaattcagaatcattattcttccacaatttactgtgcagttcttaaggcagttttagaatcattaaagtgttataaatctctgatattcagatcatttcacctgatcccttcattttgcagaagagatgatggaggtctggggagtgaagaggcttgctcatccagtcacttttcgccttttcttttcatttggttgacctattttcttttaaataagtacgattaagcacatgctttttaccttcaaatagttggtattatttatactgtttatattataattatgtgactacctttcctgttatctcagtttgatcagttctatttatatcttgatactattcaagcgtctgccttcccaatcagtatgcaggccctcttggttgtaaattgctaacatttaagtagccatttcccaattttcttctcagtgtgcagtgcctctactttaaaattaatattatttgcatgtgtattttgaagtcctcccttggattttaatggtccatttatagaaagaaaaatcaacacttattttccatccactactgaaaaataatgttggaaagtgtaggagctttgtcaagtaaaagcttatttatttttaaaataagaaagcacatttacatgccagaaaacaaccaatctttgtcaaggggctattacactatttcctgcaacttgatttcagtttatatactgacttctcactcatattctttattctggactgtatcagcaacttctttttttcaaatgcccaggacaagtctgagaatatgatagatgtaggaagatgtatgcaagtggacctttaacgtcttctctagttgaagaactgcagagagtgctagaacttcgaaaattccaggacattctgcagacaaaattttcattggttacatatttgtatagtttttatttcacctgaaatattgacaaagtgctaatgtgtatgctttgatgagataacttagcaacaatgaagaaggttattgtcattagaaataaggttgaaaatactggagccagtctttttattaaatcaaaaatacctgttgtttcatggctcaaatgactcaaaagcaagtaggaagggtgggagatatttttcagcgtgaagtggagaccagacactcctcctcgcctggaaaatgagtacattacgctatatactttccacataatcaccttttgggaagctgtcacctacttatttatttttccatggtgtgtccacgggtcacatgtatatatgttttatttttgttttcactttttaaccagcatacatttaggcactcaccaacttcacacaaaattaatttcaaattgttatagtcatagtttatatggacataaaactcttagaatttgttcaaagaaacaaagtatttaccacttagaaagaggaaagttattgagaaaatagccagaagttgaggataaagagtggcaatattacccagcaagaagcaatacagaatggcaattaaaagatggggcctggactgaggtccctcgtgtcttaatccagcatccatcacttgccaactgtgtaactgaccttaggaaggcactgaggatgctagacctgtttcacggtcttgctaaagcagaattcaataagctcagtgaagcaggttctttggactaagaattaatctaccttgcaggactgaaacataaagaagaaaaacaaatcttagactcagtaattgggacaacttaaatattattatattcagacttaaaatataaattttatttgatgggaaatagattaaagacagaaaacgtgagtcaaataaactttttgatgactttttattaatgtttgtaaaatacacagtgcctgatgtagcgtatgatgtcaataaatgttgactgttaggaactttcattcttcaatgagattgagcttaggtgtaaacatgtttcatacttatttaaatttctttagcttcaaattgcaggagtttgcattatgtttgaaaggggtctggaacattgagcacataaagcaaagacacaattagttcagtgcagttaggaccagtgaggaatgttttcccagaaaaggtgactatttcaaaagctcacaatgagagataaatttacagatgtatgtgttaatgtgtgtgtgtgtgtgtgtgtgtgtgtgtgtgtgtgtaggtacataggtcagtaagaagaagctgggctcctgggcagatgagccctgtttggaaagcaatggaggcatttgattttggttcaatcaggtaaaggtaagtggtttaatatggctgtatgactggggaagtgggagtggtaagaaaagaggttggaaaggaaggtagaagacaaattatgaaaaactttgtaaatagcattaagcttaaagattagtcattgaaagattttaggaagttgaataataagatcaatgtttcacgttataaaaatgactttgattgtagtagctataaactactgaaaaaagctagaataggtgcaagtatccatgaaaaatccagtggagatgcattgttgtggtgtggaagacatagaacttctggacttagtcaagcatatgaaaaggtttacagtgacattcctgtagaaatgatgggaatctataaactgttagctagaataattaagaagaccattacctagtttaacaatagggacagactccagtggggtatctatgaggttatggtctaaagctttgcttggtctttaactctttctggcttatgatttttatcactgacttagatataaaagcaaaactgaatatgacctaaaggcagaaggtaaagaaacacatttcacatacctttgtaatattagtaaattaccttgatacattagatgttgaataagttaataataacagttgatgatagaattaggccccaagtggttttaattagaaaattagaccaactgtaagtaaaagatattaatcagggatacttgtaaaaaaattttaaaaaagtacatcacaaacataaactttttaaacaataagcttaagatgaatgagcagtgtgatactgtactgttaaaaaaatccagtattttatctataatacattaacttatggagctggccactctctcataatttgctttgcttggatacacttggagtataacattgaactgtggacacactaggctgtgttcagaaaaaaaaaaaaaactagaaaaacgaaaggatcagattagtcatgtgacaaacagttaaacaatttcaaagtgttaggctagatgaaagaaacgcagtaggaagatgaaatgttttcaaattctggaagataatcatgtttaagttgggattaaatgtatctcaataaaaagatatgattaaaaactttaggaaaacaggggatggattaatatatgggagaactttgtgctggagctctccagagaggtgagggactgcttcagatgataagtttgtcattcctggaggccaatgtgtagtaataaaggcaatctatgtatctgaatgatgagtagaccagatgatttacagattgtatgattcttagactccatcttttacactcaggataatagtgcaattttagtgcatagtacatgtaaatatttgcaggttaatttaatggtcattttgagaagtctgttaaaaatatgcattaagaacaaaatgagtattggggttttatttcttcttgtccattttcttttccccccaaacttttattttgaatttttaaacatacagaaaagttcaaacaattgtataaataaacactcataagcactttgattaaacaattgcttatatttttccagttttttgtttatgatacttctttcatacctaaagacttgatctcctaagagtcaggatattttcttatataaccactatatcattattttgcctaaggagaaaaaaatgataccctaatgtcatttaatatccatggcatgtcatttaatagccaaaggccaatgtaacattgtcctttggcattatattgtataaaaattaaagaagcttgatgattttgtcctttggataatgatttgtacaaaattaaaatgcagaggaaccttttgcaattgtttagacaggaaataagattggtataacatttgatggagaaaatcaacatatcttctgggaggataacagatggtgtgccatttagaacatcagtttctttattaaattaaagtctacaaaacacagattgtactcactttaaggtaagacctatttgaaaagtctcagaggttagatgtgacgttggttggtacatccatcatgggtttatgagtcatacagtcctcagtagtagttacaattgatttaaaagagaaaggcattgactaggctttagcagttgactaatcttttatttcaagtcttaagtagtgaagttcttttgtgagtcagagactgtgatgtgaaaagtttcagcactgagtgttctgtgtaaaccagggatcacttgacatttggtttcctatatctacaaaacaaaggagggcaattgtgcccatgaaaaagaaaggtattctcctctccttctttttttcttcttttaacaagccttttgtagtgaagagaactgttaacttttaatataagcttggaaaaagaattgcgggcattttatggtttgatatagaggttatgtgagatatgatggcccttcctgaattaagaaataaaacaatgataaagctgtgagaatgattttcttagatgatgttttgaacctaaaaagttcaaggtaagtatgagaaagcagtacattttgcttgtgttgtatggagaataaggaattagatgataactacacaggagtctccagattcttgaaaatgtgaaactggttgaattttggtgtaagtctagaaagagcacaaaattattgattactaagatgcttctttaagatcatataggtcttatgagtcctttattattctgagatatattttatccatcaaacatgatttatgaactctcaggagagcaattatctcttcatggatcacatgcttatgaaatactatgtacaatcctgacattataataaaaagaataattctaggagaaaacagttttatagaagattcccagtacaaaatggatattattttttcaagtcataggaaagaaaaacatcttgtttaaaatcatgtgaacaattatccttttgcaggctcatgaacaggtggaaaaaatgctttgccattcaattttataatagcaatttaaaaatcaaagatgttcttttaaaattataaaaaccagctgagatcttcctcagagaatcaaatatagagagccttatatttcactttacaaagaaaatacatgaagtatatatgcccctgatttcctgcccatcttcacatctgcagattacagataattgcttcttgctggagtgaataaggtgtcctcctcccctaggcttagcctatttgccatgctttggatttgatcctctctttttcctgagacacctggctccatcactaatgccttctcttttctaccttttagctttctcttcctattggttctttccctctgcatataaatatgttaagtctttctcattataaatgaagcaaagacacaaacaccctgagattttatcttcacctttcactgtcctgttttctgctactctttaatattctagcttcattttgaagaatattcatttttttaaataacaagattaacatatttccattgttagctatttaaattatacaaataaataaaaaatcagaaagtcaaaattaatcaaatgcctatcatctaaaatgaaccaaggttaatatattgttatgcataagggcatattataactacttctgaagcattttgtcatgaaataccttctatagaataattttaaaatggctaaatatatagtattttattaagtatatctaccatagtttctgtaaaaagtcttttaccattgtatacttagaaaattttgaatcattgtgttcttataaataaagaagtgaacatccttgcagctaaatcagtgacattttccttaagtttccatcctgtaagtagaattagtgctttcaagtgtgtgatatttttaaagcttgatagatttaaaaaaaggacttcaataaagtttgtgtcgatttatttttctattcagctgtgctctttcttacacctcaatacatttgattcataaagattctatctcattgttttaattaacctttcccttttcctgtttttgaacattttcttacatttagcggttatttgcatttattatttatgaatattatctacttatgttctttgccagtttttctactggagttgtgttttcagtagctagtttttttattgaatatattattttcttgtaaaatgtattatatttaatatactttcatatattttcatatttgtctttcgttatatttgatgcatagatgtttttcaaatattgaagctacatttagtaatattgcctttatttttactgcttgtgttttcaaacttagaaaggccttagcactttcatacaattgttttttaaagtaaaattttattaaagaatgatctatgtaaagtgcacacatgatacaagtaaagttctagtaataagtatccaagcactcagattaagaaacagatcatcaccagcatcccaaaagcacatcatgctctcttcttactgctattcccaccactaacattttttgaactttttgaacaatgaaatcatgcagcagtatacttttgtgtctggcttctttcactcaatcatttgtttgtgagattcatctcatgttattgcatgtagttctttattgatgcaggtcttccatgttgttataaatattcttgcacatatgctttgatgaacttatgtacagatttatgtttatcagctatcccagagtgaaatttctgtgtcacagagtttgtatattttcagtggtagaagattcagacactcaattttcaatgttgattgagccagtttgtctttttcattttagccatgctggtgtatataaaattgtttcaaattgtggtttaaattttcattttccataataccatgaaattgatcacttttttatgtacattgtccatttcaacttatcttttggggaatgcttgttcaaattttctacccatatttctgttggtttgactgccattttctttttttgtagattctttaaaagagaagtcttttctgtctctccctctgtcacacacacacacgtgaaactactaaatgtgtgtatatatgtgtgaatccactaattctacttataggatataaagaaaatgtcatatatatatgtgtgtgtatatatatgtgtgtgtgtgttttgtcatttgtttatggcacacatatacacgtgtgtgtgtctgttgagtgtgtgtcttgtgtgtgtctctgattaggaagttcttaattttaagaaagtctaatatgtcacatttttacctttataagcatcactttttgttttcttttaaaacatcttctcttagcttttttttgaactttattttttaatgtcacatttcaatgtatgattgaaataatttctatataattatctacttaatccagaaatatttattgaaaatacaatccttttttattagaactgcagtattatcactttaatattgttgtctatatagatggaaaactatggattctgtgttctacttatctatttttctctattaatttttcatcagatactatttcattatttgtttagtctttgtcctagaattcaaaatgcattcttgaattactatgttcagttatttctgaacatagtatttctccaaatactgctaaaacattaaaatcctttaattctatttatgcattttttgcttttttaattatacttaccatacactttaattctaaacataaacttcatcagtcattcctattctttctttttatagtccaaatttattgattttcacccatgtgtttgtattttctcgtatacttcacatgttgaagcaatgtagtggcttcctctgtaatcaataacctgcctatagaacttgatttagttagtatttgttttagtggaggcttgttggtgataaatcctttcaattttggtattttcattgatatagtcaaacatatttggcaaaacacatttgtatctcttctctatatgttatgaaatgaaaataaatactaaagaagagtggatattgtagacattttatctttttcctgaccttaatggaacttcctcctcttatatataaaatttactgttcattcgtgatttttatcttaataaagtctcattattttattgttttccaaaaaagtatttttaaataaaaataattatcaattgcatttatactatctagtatggtgaatctacttttttcttcttggaacaattactaagttggatgatagtaagattttccgaatttttaaatagaattaaaaagttctttctcctcaatagtttgtaacaccaatctaactttatttggaaaccaattctttactagatttttttcatctccttccacatacaaggggtaataagctattcatgatttatctcttttctttagttaacattgttgggtggttatattttgtcttaaaaggttgcgttatctggatgtttttattacaaaattttaaactctggcttggattaataaaatatagctatttattttttaatttaaggtggaaaatgggttatcctaaggaaataaaaagatttctttaaacattcaaacttgtgataaatatgtaaacttaaagtcgaatttgaattattattttaaagattgataaagaataagaaagtttcaattcagtatcatcaaatattgattcaatattataactgggtaaaatattgatccaatattataaaatatgatctttattgcatacttttattacatagaaactaccattttgaacgaaaaaagtagaagattcagttttttgttttatttgccagcaagaaaccacttaaggcttgcatttctataattttctctttatttctacttaactttacaagtaccttacaattagttaactatttttctgtttcatatataagatcttacatttttagttacgtcttattaagtcatcttatctcacattttaggaagttttgtatattttgcctgactgaaattttgcagaaaactactagtttgtagtggaacaggcaagggttttgaagtcaggcatgagcagattctactagtggctctatcacttgatagctatgtgatctttgaccagaggggtaattcctgtaaaataatgctattttggatggctttgaaggttcattgtgacctcaaatacttgttgagtgcttactctgtgacagccactctaaatgttttgtacatgctaacatttattctttattgcaattctatgcagtaacctcccttgtcattcttctttcagagatgaggcagctcagactgaggttttaagcaactgcccaaaattatacagatagcaattggcaaatccagaatgttaaacccggtctagctccaaataaatgttatatataagggtagagagtaaagaagaataccactgttcttctccacatacacagaaggaatctaggttagttctttacacccattagacacatataattattatccttttgcttaacataagtcaccaaagacttcaaatatattgagtgccatttcacaagttgattgttttagtaagtacacccttaaattggttaaaatccagaataagagaaatatttcaaatgaatatggtatcaaataatattttttatcttgttcctgaatgtaaatttgcctcacccctctagtctattctgagtcctaattcctcatagttagaggaattgttacaacattacgacttcttactaatttataataggtagtttgctaatagtatagtcacctgacattcatgtgtcaaaatatctttgatgaggtatgaattgctagatgtggaatagcttattcaagaaagtttaatttatgaatgactgtacggggagtacatggtgtgaaatttgaaaggaagaaagataaatgttctgcgtttttaaagtacttgtttcctaaggacagaggttggaggggattaggaatcagatgctccaccttttatttcattattcaaaccaacaatgattcttttggaggcaaaggcctcagttgggtcactcccagctaacgagagagcaatgatattagagagaaggaaggttgtgacaagagtgagggaactggaatgagacagagctggtggaaggtcacaaattgaagggacatattttaaaattatactctatggccaaaattatatactagttttattcattgattaaaggagttgcattgttttggagaggcatccttcataaatgtcaagtgtcttcttaaaagggacttagaataaagcaactagcaaaatgctaactctcttttctcgcaagtaagatgctgaaatttgcaaataatttgggcttttaacacaataaatgcacggtggctcactcctgtaaatcccaacaatttgggaggccaaggcaggcagatggcttgagcccaggagtttgagactagcctgggcaatatagtgaaaccccgactatacaaaaaatacaaaaattagctggaaatgatggcacacgcctgtagtctcaactactggggaggctgaggtgagaggatcacctgagcccaaggaggtcaaggctgcagtgggctgtgatcgctcctctgcactccagcctgggcaagtgagtgactgtcttaaaaaagaaaaaaaattgtttaaaagaattttgatttctgaatggagacggaatttaacacatttttttcaatgcttaattttatagtatatatcaatgaagaggattgattattctggaactgtttacaaattttgggggggataaatttcagtacttaagtcaagacctctctatacctaggccctaaaataagtaataactaaagaaaaaaagtccaaatcatatttgtatcatgttaaattttggcagcaatactaaggcaattttaccagtatggctgtggctaaaagagaatatcccaaagttcataaagtaagcacacaccccatgtacttaaatctctccctctctctctctctttctctctctcacacacacacacgcaaatgcacttgcacatatataaaagtacagaaaacttctgatattttctttatcttgtgaaaattatgtttattcttgtaaaatttatgatttttctctttctttttgccaggtggtatttttgaatatgtggaatctggcccaatgggagctgaggaacttgcattcagatttgctgtgaacacaattaacagaaacagaacattgctacccaatactacccttacctatgatacccagaagataaacctttatgatagttttgaagcatccaagaaaggtaattgatagatttttaacatctttgtttcctggaattcaaatttctaggtattcttaagagatttttttatttttcaacatacagttaataagttgttaggaatatttgcatgcaaagatttattttcaaaatgcatataaattttatcagagaagataaagtataattcctcttgcaaaaaatctgcttataacatgaaatacaattacatctgttagtgaaattttttttctattgatccttccatcttattatagaagcattcctatttttaagaacccacaaatataaaatttatatgagtggattttaccaattttgcaatccattcttacatctttatttgcattatctttcaatcccattatattattactgtggtctcaattgattggctaccttgaaagttatgtggttctaagtgacttcaaaatgtcagcatatattgaaacttaattggaaaattttaaacaaccattagtttatgtatattccatgctcatattttaaccatctaatatttctttttgtaactgaaaataaatggctgattatgtaaaaactgaattatataaggacataattagaatactttatgagttttattttcatgttataactgttgtaaatgtcaaaaatatagaaaaagaataaaaagaaaaataatttggtggaataaaaatttaatatttatatatgaaggaaggcaatagagaaaactattattaaagcatttattttaaccagacagctgtcagtagtaaatgtgtttgagaggtgcttctatagtcttatgtgggtgatcttttcttatatatgtagataatcttatagtaggtgatcttttcttttgcatagttagcatttatataataggaattaaattttataataaagatttttctcaaaggaaaaggcttataaagtgtttgttctaacattatattttaaaacaatgtttgcctttctgtaatgctaatatggttttactgtagctaccttatattggtggaaatgtacataattatttataattccaggttagtgcaaattgtttaagctcattaatattaatggtagctgacaaggtacagtatttctcgagatgaaagtatccttcttttcccccagcagctaagtagtgtttatcaaagccatactttgcatgccctttgaattcatatctttatgaatacaaataagtttccacatttcagagcctgtcaggtgatgaaaggttttgaagactgagaaaaaggttaaaggtaactgtgaaatattacatttgtcatcataattgcaaaataaatcattaattcaagactattacatttgattagtggcatagttcatgattgtttccattaggaagaagaagttctgcctctaatgaaagcattttgatcaaagaatatggagtatgagtgcagtatagataaaatattagtagatttcttaatggtgatttcaaatgaacagcataaaaaaacacaggttcggatgttctcacaacagagtactatcctgggaatgccctagcaaaattatgaattgataaagtcatgtggtttgaccaaaatattataagaaatttacaagctttgttacccaataaaaactcactgggaatcaaatccatcatttcactttggcttgaagctaggaaaagctgaaataagtgtatgaataactgtctttgtgaatgtcatggtttggattttatcttctgaatctcttgtttgttgagttattactgcttggaggacacagcaatacataaaaacataatataacagagccaatatttttttaactttatcaagaaatgtatatattgataatattgttaatgattaattataaaataactttagatattttaaaaatgtaattatttatccaatgcaagaaaataataataaatgagatgttaccttttgacattttatctaatttttttctgttatagttttaaagggtagtattgttctgctcaattaataaatactttgatgtattagagcttgaattattgtttgaatcatatatttttaaataactcttctgataaccgaaagctctaatcttgcttgaaacacacttagaaacattctaaataacttaattcagtgtttttagcttttcttggtttgtgatttgtcacaaacctggtgaaggaagatcatttatcttcagtatatatgaattaaaatctcatgttgagtgaaaaattctcaagtctagccaccatttatactaatttagaattccacatgttatttaaaaagtaagaatccatgtatttaaaaacaatttatttagatcatattgatttttaaagaatgtttaaacaagtgttctgacaataatttacttaattattaaatatttccatgcttaattcacgtataatattatattttatggagaaaactgagggaaaatagcagaaattttcacacggtagaataataaactatccattttggaggaattgagtctgaacacctaatttatgcctaaagctcagtaacaatccttctctgtcctttaaatatttgcagtgatgggcaaaccattgcctcttggggaagactatttcatttttcaacatggtttactttttttttgacacacagttttggtctggcacccaggtaggccaggagtggcaccatcatggctcactgcaacctcaatgtcccaggctcaagtgatcctcccacctcagcctgccaagtagctaggactataggcacacagcaccatgcccagctgaatttttttttgtttctttttgtttgtttgtttttgtttttctttttgttttagtagagaggaggtctcactgtgttgcccaggcaggtctcgaattcctcgtctcaagcgatcttcctgcattggcctcccgaagtgctgggattacaggtgtgaaccatggcatgaggccattatttagaattaaaaataatagccgggtgtggtggctcatgcctgtaatcccagcactttgggaggccgaggcgggtggatcacgaggtcaggagatcaagatcatcctggctaacatggtgaaaccctgtctctactaaaaatacaaaaaattacccaggcttggtggcatgtgcctgtagtcccagctactcgggaggctgaggcaggagaatcgcttgaacccgggaggcaaaggtcgcagtgagctgagatcacaccactgcactcaagcctgggcgacagactgagactctatatcaacaaaataaataataaataaataaataaataaataaataaataaatatgaagtgggtaaaaattcaggggaagcttctattttttttctaattcccctttgcccatcaagtgaaacaaacttaagcttctttcacatgccaggtcttcatatatttaaagataagttttgtgttcccaataattactcactttctaggcccaagctcgctatttgtgtcagtgtgccttatagaaagttcaggtcatggcacagtctattttaatctgaataccctctagtttgttcatgcctttcttaattactgtggttattattgatatgaataaaattttctgtgagtaaatacaaactttaaaaaatagaataatagaaaacacttatagcatccaaaagccaaatatataaagatgactgagtacttgtctaatgacttttctgtttttctactcagtgtgactgatccatatgaaatcactctctaagagctatagcaggttttgtgtggctgagtgttcgcataacccgacatgtatcatcagataggtggaaatgttcatctgtgtgtgagcatagctaattgcacgagtaaagggggaaccatgtggcttttgattaagaaatggaaaatgtaaaaactgttcagtgaatttgagaagctgcactattccctcattcccctcatataaactagtcttccaaaacaagcactgcccccttaaattaaaaaatattcatcctctctctccttgcctgtctccctcccctgacattatttatagaattatttgaacattgagctgcagggtgagttaattcccttgtaacaaacggaaagtgttcagagtcagacaaaattttaaattagtgaaaagtagatatatattttttaaaaacacaaatctttcttgagaatgatacctttgggtttaaaataataatgtggtatctgttggcacactggcacctctcctctcattattgacagacctttatctcctcttcagcctgtgatcagctgtctcttggggtggctgccatcttcgggccttcacacagctcatcagcaaacgcagtgcagtccatctgcaatgctctgggagttccccacatacagacccgctggaagcaccaggtgtcagacaacaaagattccttctatgtcagtctctacccagacttctcttcactcagccgtgccattttagacctggtgcagtttttcaagtggaaaaccgtcacggttgtgtatgatgacagcactggtaagaaaaatcagtatcttttggagctatgctttaaatatagataattttctgaagcccattccaggttcttattgtattcttatgtgctttattttgagttttgaaaattcagctaaggggtagaaagacagaatcaaacaccaatcctaatttcacatatccaaacaaagaatacctatgttgaatacttcttctctgtatttgtaaaataagcatttttttattcctgtgaaagatcagctagtttggtaggttggatgaaagatagatgtagtaaacaatattatagatagatagatagatacacacacacgtacacatacacatacacacacacatatgtatatatatatttagaattccagtcatttaaaaagtaagaatccatgtattcaaaaacaatttattcaaaaacaatatggtctaacaatttagatcatattgaataatgtgtgtgtgtgtgcgtgtgtgtgtctctgtgtgtgtgtgtgtgtgtgtgtgtgtgtgtgtacatagacagatagatagagtcactctgtcgcccaggctggcatacaagggtgcaatctcagcttactgcaacctctgcctcccaggttcaagcgattctcctgcctcagcttcccaagtagctgggattacaggcatacgccaccacttctggctaatttttgtatttttagtggagtcagggtttcatcatgttggccaggctggtctcgaactcctgaccttaaaagattcacctgccttggcttcccaaactgctgggattacaggtgtgagccactggacccattctgaaatatttatttaaagaatttttctgctatgaagtttttgctagggtagtttctcaaggcaaagccttgtgatgagtcagtgaaacttgccaagaaattcagaattatgccttactattttatctggctgtttatgtgcaaagaatgcatataaaacgtaacaaactttataaggcatgttaaggttagaaaagtttttactcatatgtggaacaatataatattcactgaaacactcaagtttgtggaactgcttttgtgtagatgtcatttagagacttagaaaatagaatttactaaatgatatttatttcagtgagttaaaggaatattttaataaatatttgctaactacaggttgtctgctttcttatgttaatgcattttattatttttgcatacaaatggttatcttgaattatcagttaaaaacaagtctcagagaaatacaataaagtaacaaaaatgaaattttaattttcattgaaagttacattggtgatgcagctgcatactattttgcttactatagagtgataattaattttactttaagatgtttatcaacaatataaacagtgctctttaaattagaacataaaaacattttattttaggacacttcgctatactttcataattacattgagattgaatttcatttgaatttaaattctctcaaagtatgccaggagcacattttgttcatgcatgcagtatatagaactctgtgcagaaatttgcccatttgccaataaaattggtcatctgcaaattgacagataagaactctttcaagggaataggaaactgggagctacaggattaaaaaaagggaaaataatttcaaaaacattttcaattagataagaaagagtgaaatgcatctagatacaaattagagtaattttgttttcttatttaaaatgtgaaatatttataaataattaaaaattaggaatacattattaagagtccttaaaaataagtatgtttgatctctgttagctcaaattaaacctattaaatttattatattgctttcttcctaaatcattacttctttgtcattggtaaagttctgtgttccaattttgaatgtcaggttctatatgaatgatttctgtgagtatgtgtaatcaaatgatccaagggatcctcagttgcaaattggtccacttatgtttatggatggtcatctacaaaactatataaatatagatacatgtgcattgttaatctgtggattgtttacttctccattccttcctgatgtaattcatgtataggttgtccaaacatcatatatccttataatgtatacattatatacatatgtgcatgcacacaggtatgtacatcatacatgtgatattttgtattaattatcatccttaaactcctcataggaagaagaaaattgacaagtattcaaaatgtctacagacatattaactttattcacaatcctacgtgtatgcacatgtgtggcatttttatttaatatatgtgggtcttaagtgattcactaaatagataatgggatttgcaatcaggtcctacaataatttggtaaaatacagcctcatgtatttgttctattcctgctttaaattatattctcaattatatcattgaggcaaatataaatagggacatatgtatagctagttgattatatacatttaatggagtcctgacctcaaatttattaaaatgcttactatttagttactcgttactatttaaaggaaactttgccactcccttggctttgaaggtgacatagacagttggatatttgaaaagtctgattagttaagtggtaatgctaacttagaattgttacagaattattcatagaataaatatgtcttgaaatcctctgaagaataaaacatattgctgttccattttatgcaacatttaattcaatgaattttgattatcaactgatacatgccagggagagttaaatgccacgaaaggaattatatgccactaaaggaaacaaaggcccagcccttgttgagcttctaatccctattgagggacatgtaataactcatatttttaatactatttgcaatgggataattgcacttgtaacagaccaattgttgcctcttactttacagcatttttgagaactttgattatttaatatgatagaactgactcgaaggcagaaaagtccctttgaaatgtatttataaatatatagtagactttttgtctttttgtttatgtgtcaaagtctcaaggtagaatttttttcaactttcattttaaaatcagggagtgcatgtgcaggtttgttacaaggctatattgcatgatgctgagcattgggtacaactgaaccaatcacccaatgaacagggtatccaatagatagtttttcaacccttaacctcttctctccctccccacgcttgtagtctccagtgtctattttttcctagatttatgtacgtatgtaccaaatgtttagctcctacttataaataagaacatgaagtatttggttttctgttcctctgtaattcacttaggataatggctttcagctacatccatgttgctgcaaagaacataattttgttcttttatatggctgcatagtattccatggtgtatatgtaccacattttctttattcaatccacaattgatgggcatcttggttgattccatgtctttgctgttgtgaatagtgctgcaatgaacatatgcatgcatgtgtctatttgatagaatcatgtattttcctttgtgtatatacccagtaatggtattgctgagtcaaatgtcgttctatgtttagctctttgaaaaatctccaaacttctttctacaatggctgaactaatttacattcccaccaaactgtacaagcattcctttttctctgcaacctcaccaacatttattgttttgacttcttaataatagccattcagactagtgtgaaatggtatctcattgaggttttgttttgcatttctctgatgattagtgatgctgaacgtttctttcatatgtttgttggctgcatgtacatcttcttttgaggagtatctgttcctgtcctttgcttacttttttaatggggttatttgttttttgcttgttgatttatttcagtttcttataggttctgggtattagacctttgcttgatgcatagtttgtgaatatttgcaaggtatagttttaatgatagaattcagcaaagagaatttgtcagcttctcaaaagagcaagatgactatttgatgatgtgataggaaatttactgtgaactgaaatgggaaaaactccacctcatacacaataaaataaacattactgtctttatgatggacttatgtatctgcttttactgcaaaacacacatgtgcttttttttttacatatttcctttttcctttccatatttatttattatgtatgctgttgctcccatttgtattcatttcttttttgttgtgttgtccagtttgatacatgataattatactttcatccagtctttgttcccacccccaaaacagatgggatgataaatgaaatatagtgctggaataggataaattcttaaaatgatgttaacaggagctatttattttttacgataattagcatttgttgttgtcatggatgaatgcttttaaacacgctgaaagtctgttatagctctgaatgatgtccaaaaatgatggaaaagaattggcttcagaaacaaagctgtgtttctgtcagtcattttggaacatatgattcattttaaatataaactaaaaataagttggctagatgacagcttgtaagcaattccagaataagttgttcatatttgctttaaaatccctgtgtttcatctttgtttatagatcagcagtccattaacaaaaaaactctggactggtaaacagaagcatgggattctattcccagttttgctactaaattactggtacaacttcagaaaatacaagaagggaatggaaatgcctgcagaaatgagctataatgcactatgaattgacattgtgttagttgctgtcacgtaaactatttcacttaatcttcaaaacaattctgtgtgtcccaaaggaaacaggtgatcatgacatcatacctgttatctccagtgactggctctcctgctcaccagagcctaaactagaaacatgaacatcttccttgattcttttctttttttggctcgacaacaatcggttgtcaattctatacttgtatgatctctcaaatcttttatttttttcctaccccctaccacttcttaggtcaaaatcacctccctctgtcagctggatgattaacagccttctaactggtctccctttttctagtctctccattgcagttagtgtaatttttttaaaaatgcaattctgatctgtttccctcttaatagcttctcattcctctaaggcatttttaagaagacttacaatgcttagtgtgatgtagcccctatacttgtccagtgatatttgagtccaaatcccccactaatttatttcaaattgagccagtagacaccttttagttgttgaaaataatcttctgtttacctgggaagctctctttctgatcctattcctcctagccatgaagtgcacacgtacatgtgcacatttgcacaaacacactcaggcataccatccggcttgggtgtcacaaagaaaggctgccctgacccctgctttcaagtctggaataggtctctccaaacacatcccaaaggaccatggaaacacccatgaccatccccacccccatgagaactcttatcacactctgaatggcttttcttgggtggatcttctactggatcaaccacacatctgagcagggtgaaccctaaggctgctcactgttttatcaccagcatctagaatgttgcctggttgtggaagtaccttaatacttcttaataataggaagatgtgttatatccatttttaagcaagataattccaatgagttaagtattctgccaaagtcaaatttggttaagtagcctttaactacttgccaaggaataaatagattcagccataattttcagatatatggacatgactcttttatgatttcaaaaattttataagaaagctcgagtgaattgtgtttctttgatttcaactgcagttaaacatatatatgtgagtatatacatatatatgtattcttatttgagcaattattaaatttctgtataccagctgctatcttaggcagaggggacaagaattatagataaaactttgaccttctccatgggctcagagtagagtaagttaggagagaataacactacactctagtgtaacaagtgcacagagaggcaagaaaacagcatcatgacatctcaggagaagaagggctcaggagaagaagctgcctggaaaggatggagaagagttttagagaaagtgacgttataaaattatcatgaaggataagtaaaatgctgcaactggagaagagtctacagtgtgcaacatgtgtaaatgtgaagatgactgagggagccagtttgtcaggaaattgcaagcacttcattatgactgagtaacagaaacaaggaagatgaggaatgatcaatggattttataaaaagctagcgtaggagagatcacagagagctttgtactaccaagtccaccttttcttgcccaccctgccctggaatctacatggttatagcaatatcagtgatgtttgtgtgatgtgagcctgctttcaaaccaccatggaatgcctcaaaaattggcatatatccattcacctttttcctggaaactcagaaaaagacatagagggccatctgtcagcctagactattgtggttactacggtctttggtatcaggacattctagactgaaatcctgaccctgtcgtgtagtttttagcaagggatttgaccactaacagtctgagagttgatgcatgtataaggtgaggataatatgtgtcatacttcacaggattgttgttgtgtaaagtgcctcatagaggaaacataacaagaatttaaaactttcaacaatataaatgctatgggccatgtgccatttttcttcactaaactctatgataaagaaattattaatctcacaatttttgaaattgatgcttgtttattataggaaattcaggaactacaataaagtttaataaaaataagataaaataatcaagattttttgctatcaagttaatcattttagatttctttccagtctgtttctctacaaatacacatacacatacacacaaagagcatatcatttagagttctgggaaagaaacagaagaaacacgtagcttgtaatcccactattttaatatgagaaaacttagatgcagtgagttgaagtaatttgcccaaggttacatacatagcacataagtgatagatctgggttttgaaactaggcagtcaactttagaatctactctgttaaatactgttacatgatgttagttgttgttttattttgtgggggttttttttggctctttttaaaaatcattattttaagcaagataatggcaagattagaactatttttggtaatggctttctgactgcagtgtggagaatgtgttggggatatgagatatggagagcaatagggcaacactggaagcaggggaattcctgaattagccaagttgaaaagagatgacagtttcaattaagaagattttgatggaataatgttgacatgaagaattctaagaggacttaggagatacagattgtagaatttagtaagtggttgccgggaaggagtgatgaagacaggaaataagaattactctatgttcctagttggggatactaatcagtggcacatttacctagaaggggaaaacaagaaaaacagcttcaagagagaagacggtgtctgcttcttaacatatgaagtttgaaacatctatgaaatattcacttgctatcattcagtggtattgtatatatcataaattcatcttaaaaataggaacttggtctgggcaggcatataatgcttccattggcattttgctgtgcccttcatttgaacttctttgtagtattaggaaatgaagaaaatcaacaaaaaacaatgaaataaaaatagggtgatagtacaaaagaaatgagttagtaggtgggcagccatggagataaatatagacatgagaagagcttacagacagaatgtacattcttttcattagtgaaggaaaagcagtaatatttttagaaatagtaatatttaccaaattgagcctagactaatttctatgatacgatcacaggaaaaaaaaaagccaaagcttttatcttaagcaaaaacacaaacactttcttaaaacactaactttattcatttggatgaagtatacttatagattgctttagatacatttttgtgtgcttttggagttagcataatataatggaaagtcaattaatagtgaaaactcattttattttatcttgcacgtatatttaaataggataaaataaaattaaagttaatataaaaatgtatattcctggaagacactaatttttgaataagataatttttatattatgaagcatacaatcaaataatttccattttattttagggagtggggtaatttggatctcagatgattatatgttgtacattttaaatacaagcttcaagtgctgtgttctctaattccaagtgcaaatacaattagcaattatgagttaaacttaattatttggatatacttgattacatagcttggtgtagtagtatttccacacagttggttatgcttgaacttatttttttattcctatttaagcaatcataaaaatttttttagaaaaaagttaactcaagatggattaaagacttaaacgtaagaccaaaaaccctaaaaaccctagaagaaaacctaggcaatacctttcaggacataggcatgggcaaagatttcatgactaaaacaccaaaagcaatggcaacagaagccaagattgactaatgggatctaattaaactaaacagcttctgcacagcaaaagaaactatcatcagagtgaacaggcaacctagagaatgggagaaaatttttgcaatctatccatctgaaaaagggctaatatccagaatctacaaggagcttaaccaaatttacaagaagaaaaaaccctatcaaaaagtgggtgaaggatatgaacagacatttctcaaaagaagacatttttgtggccaacaaacatatgaaaaaaagctcatcatcactggtcattagagaaatgcaaatcaaaaccacaatgagataccatctcacaccaattagaatagcaatcattaaaaagtcaggaaacaacagatgctggagaggatgtggagaaatagcaatgcttttacactgttggtaggagtgtaaattagttcaaccattgtggaagacagtgtggtgattcctcaaggatctagaaccagaaataccatttgacccagtaatcccgttactgggtatatacccaaaggattataaatcattctactataaagacacatgcacacgtatgtttattgcagaactgttcacaatagcaaagacagaatcaacccaaatgcccatcaataatagactggataaagaaaatgtggcacatataaactatggaatgctatgcagccataaaaaaaaggatgagttcatgtcctttgcagggtcatagatgaagctggaaaccatcattctcagcaaactaacacaagaacagaaaaccaaacaccgcatgttctcagtcataagtgggagttgaacgatgagaacacatggacacagagggggcacatcacacactggggcctgtcagggggtgagggagtaggagagggatagcattgggagaaactcctaaggtagatgacggcttgatgggtgcagcaaaccaccatggcacatgtatacctacgtaacatacctgcatgttctgcacatgtatcccataacttaaagtataataaaaaaaagaaaagaaaattatttcttgggttctgattaaataatagtgaatatttacaaatatgtttataggactaattctcaagttttaaaacctttaaaatatatgccaacacggaaagacaaaaatcaaattttgaatctgtagcaatcacacaattcatgtttctgtagatagtgaaataaatccacactagatctaaaaatgtagaaggagcaagtcttatactaaacctcaataatatttgcattttgggggggcggggaaatgtgaaggaagaataattctggtgatagtcaaacactgccattttttaatttacatttttctaaatttaagcatattggcatgcacatttttggtaggtactgccctcctgccccctacagcctttccttgttcttggctatcttcctttctatgtggtgaagtgggaaggatagttcttgtatcatctctctgaaacacttgaaaattttgaccattccttttttcagggcaaaaataaaaattattttgctttggcttctgcactgtcattctatctgtgttacctccttctttttggccatttattcccattgtcatactcttaaactcctttttcttttcctatttcttaactcatgatgttgttcaagattttattcccagtcttgttttctcattgtttacctcgttctccctaaaacctttcatttgactcgtgtttctgtacctgtatgctgtagactcaccaatctacattttcagttgtttgtactgacctccatattcacagttccagccatcactgatcatctttatttgaatgtctcataggtacatctaacgcaacataacaaaagccaaactcagtatctttgcccgaaatttgctttttactcctgaatttccctctttattgggttgcccacatcagatccctagtgatcattctagattctttcctctctctcaccctctattttcagttgatcatttagacttcccatttttatctcacatttctcaaatttactcctagcttctatccctgtcttagttaatatcatttagtgctgaaacaacgccctgcctgctactctatttaaatgtgtctacctgacgtagagaaaagggtctttttttgaaatgatagtctcatgaggtcattcccaagcttaaagctgttcatagtctccccagttcagagaaaaacgaattgttcctcggcatgacacatacagtgtccatcattgacactctcatgcctctctgattttaaatttctggtattccttctcttaatattgtgctgcagctttccttgaataattatagctctctcttaccaagcatgctatgctgtctcaatctctttgctgtgcacaagttgtcctctctgcctgatgtgtctttcccatttggtggcctattcatcacctgtaagatgtaccttaaaatagaatatcatttctaaatatttataaattatttctaaatattctaatatttagaatattatttcttgatgcaagagttactttagtagataaaatagttcatcttcatttctgtagtaagtcttatttttagcatcctcacataagtaatttagcaggagtgatgctgtcctggtcatggaagctctaaatatcttacaatttatttacctatttattcatttactgatttgtttgtttgttttattactttatttactccacaagtaattatcaagtatctagtatgtgtcagcactgttctaggtaccggagatatataagtaaacaaaatagataaaaattctttgccttatggagcttacattctaatgtaaggtgataaacaataacaaaataaatatgtgtacacaatagtatcaaacgtgataggtgttatgaagagaaataaagcaggagagatgtgtagggagtacatgggaagaaatattgcagtattaagaagggttgccagaaaataccttatttagaaaatggcatttgaactaagacttgaataaactaagcaattatgccatatctaaagaaaagtgtttcagaaaaagcaaggagaaaaaaatataaccacggggaaaatagattaagaattttgagctaaaggagccacgttttagttttgatgatgagttttgggaaaatctaaaaaccaaagaagactattgtgacatctgtcatttgttgtgtgtgtgtatgtagatctgtagatatatgatgacatatgtagatgtttcattactgttttagtaacaataatgtcatttcttttaaaatagctttgtgtaagcctgggcaacatagtgaaacctagtctctacagaaaaaaaaaaattaattagctaggtgtggtggcactcacctgtaaccccagctactcaggaggctgaggtgagatgattgcttgagcccaggaagttgaagctacagtgaaccatgattgcaccaccctactccagcctgagcaacaaagtcagattctgtttcaaacaaatacacaaacaaaaaatagttcagtgtaaggacttgtccacgtaaaagttcgtttttcttgttgttaagagggagtctcgctctgtcgccaggctggaatgcagtggcgcaatctcggctcactgcaacccccaccttccggattcaagctattctgcctcagcctcctgagtagctgagactacaggcacgtgccaccatgcccggctaattttagtattttttagtagagatgggatttcaccatgttggtcgggtcgcaaactcctgatatcaagtgatctgccctcctcggcctcccaaaatgctgggattacaggcgtgagccaccaagcacagccagataactgattttataagacagttatgttgacctagtgtatcacatgtatcaaacctaggtttaaatttaatccagataggatctagactttttagaggtatttctgatacagaatcacttatttttagttaagtattcaataaatgaccatgttagacttatttctcctctttatagttcagtgtaaggacttgtccacataaaaattgagtgccactgcaccccagtctgggcgagagagcgacactccatctcaatacatgcatacatacatacatacatacatacatacacacagttttctgttttctgggacctaatatttgctactcaacattctataaactttactttgttttaaatatatagtatatatggtatattcagagataacattatctaagcatctaactttttcagaatgcaagaaaataattaaaactcaaattctagacaggctaattgtccattccagagttcttccaagttagaagtggaacagtatccactaggatagtatttcagtgactcaaaaaggaaccaaacaaataatttttttgcatgaatgcattaaatgcgtactaataatatcttgttacaaacagaattctgactaacaaaccctaatgaaaatacaaagcctaacatatacctcttcttatccccaaagggattattttactattcataaatacttgtatttttgtaagcccagtaatctttcttttgagaaaacaaaacttattgtgtaacatatcttacagttataactcaaagcacttgtttttaaatttaattcataacacagaataaaatatctgggctactgttaaaactaaagattcctaggcaaatctctatgattcagtaactctagagttatattcaggggcttgcatttggaaacatagctaattgtagtaggcattcctcacatttaccaatatctctggttatcttcacttctaaacctcaaaaagttgcagtttccaaatccttgctgtggccaagaggattgctttagctgatgaaatgtgataagtggcattgttcacttccaggtggatgcatttaattgccttgctcttcctctccaactcattcatttcccaacatagcaattgtgctcaagttcaaagcatcctaaaataccgccaaaatatcaaagattgctaacctggagaattatctggacctacagcagacctggcttttatgagatatgaaatcttgttctgttaaatcactgtgatttgggaagggggatgatttttactatagtataacccagtcaagttgtcgttgaatttccatgtgtattaaaaacattaggaaggcttgataaaacactgcttgctagactgactcccagtttctgattttataggtatagttgtggcctaataatttctttttctaataagtttctgggtaatcgtgatgccattagtttagtaactccacttgagaatcactgatctagccaatcttgaccaatatacaaattttcatattttgaaacaaattgacattaagtcaaacttatcaatatgataaacaaaggcatcattttgtatgtaaaacaaatttaaaatgtttaaacaagcataattttttagtgatttaacactgacaaaattattaatcacttcttaaaaacacttaattgtctgaacttcaacactgagtagcaattattctgctaaatattcttgtccttaagagtattcaaaatggttttgaattagctttaatatgaaggaagaacagtcccctgtaaatacagtaaaaattgtgaagtataaattgagatttaaaacaatctgatattactagaatgttttataatatccatttcatataaatttaaaaatagttttactttttaacttttaaaaaatgtacaaaaagtactaattaattacatgtgcaatgattctgacttgtcatttaagtatttttttcaaattccccattccactctcacaatgaactttttatccaattgaaataattgagttggcattaaagaaagaaaattaagtcagctcttaaaatcttaacactaacttgttaattaccctattaataacacaatgaaaaatgacaagctgtaattccttttccaaaaatatggctgaaggtcagagagctgtcttgctggcatattgagagaccgaaaattacaaatgatgagcttttttttcttttaaatatcatcagatgccattagaaattcagcgaagagactagatcaatatttaaaatataattttaaacataattttcctattattaaagaaaacaactgctatatattaggaaataacctagcaaagatacttgtatttgtgtgttaagaagacaaatctaaagggtttccaaacattgtccaggtctgagcttttacactattgaaaaaggattccgtgtgcttttagcctacagcaaagatcaaaaagcattcacagagcctactggcaaaccagagataaatagaatggttttctctgccattaaacaataattcttgaaaatgacttttttcttttatgtggggtagagtaaatccaaattatgcaggacaaagtttacatgcacagtaagtgatctattgtggtattgtttgcatttttcttggtacagtttaatttattgttgtaactgcttcgctatttaggagaatagaattggttaccaaagacattgtaaaactgttctataatactgtagtactcatttaatatacatatataaatagttttactttttaatttaacttttaaagaattttgcaaaataaaacagaattctgtttcagagtagagacacttaaacatttgtagttttcttagaacatgtataacagtaccataatcttgtattcagatttttaaaatttgtaattgtggtaaaatacacatacaatttgccatcttaaccatttttaaatgtacaattcagtagtgttaaaaatattcacattgtagtgcaaccaatctccagaacttttttattttgcaaaactaaacttttgtatgcactaaacaaccattctccatttctctttccatagtctccagaaaccaccattctactttctgtttctatgaattaaatactctagatactcatagaaatcgattatacagtgtttgtctttttgtactggtttatttcacttaaaatagtattttcaaggttcatcgatgttgctgtgttgtaaagtgtcgaaattttctttgtttttaaggctcaattatattccattgtatgtatgtgtcacatattattcattcattcatcaaatacttgggttgcttccaccttttagctattataaataatgctgctatggacatgggtaaacaaatatctctttgaggccctgttctcaattcttttcagtatatacccagatgtggaattgctggatcatatattacttctctgttgaactttttgaggaaccatcatactgttttccataatggatataacatcattcctaccaacagtgcacaagagttctaacttatccgtatcctcactaacatatatatatattttaattgtactcatgttgatgggtgtaaggtgatatctaactgtggttttgatttgcatttccctcatgattaatgatgttaaacacatttctatattcttattgatcatttgaatattttatttggggaaatgtttaagttgtatgctgatttttttattttagctgtttgattcattggttgttgagtttcagtaattctttctatattctggatattaactgactatcagatatattatttgcaaatgttttcttctattccatgggttgctttttcacgttgttggttgtgtcctttgatgcaaatttttaaatttcataatccagtttatttttactttttttaaacctatacttttgctgtcatattcaataaatcattgccaaatctaatgtcatgaagattttcccctatgtttttttctaagggttgtatagttttagatcttacatttaggttttttatgttttttgaattaattttttttctatcttgaagagtaagagtccaactttattcttttgtatgtggatatccagtttccctatctctgtttattgaaaagactattcttttgtcatttattgaccacatatgttagagtttattgttgaaaatgaaaattattttaccacatatgtgagagtttatttctgagctctctattttattccattggtttatatgtctgcctttgtgccagtatcatactgttttaactagctttgtaataagtttgaaatcaggaactatgagatctccaactttgttcttttttaagattgttttggctagtcaggatttcttgagattctatatgaagttttagctgagtttttctgtttctgcaaaaaattttattggaattttgatagagagtacattaaatctatagatcactttgagtaatgtactcatatttttaaaaccaaggaaatttgagttatactaaaatatactttataaataaaacaacatttatttgtcaatttattagtctatttagtagccaatcaactaacatagattctttctatagcagtacatttgctgcttcagttagggtccatcacattctttaatttgagctcacttccttatttgtctgaaaattattttttctttataaactttatatactgatgacatatacaactatataaagtaatatcttatcaagcacttccttggccaaagaagaaccaaatgtgaataagatgttttgattctccaaatacttaaacactagtgttacaaataaattacagtacagtatgataaatgctaaaagagagttatataaaagtgttatggcaaactggaagttgaaatcaaggagatccagttggttggagaactaaacagagatgacatttaaactgggtctcaagtaatgttaagagtaggtaagataggaaatgcaagtgtacagagctgtgaaatggtatggtgaactggtagcatgatgaaacatctactgaggttgatacaccagacatcatctagagatgcccaagaataaagacaaatggatcaaaagagatcatgaagggactggcaagactgaaaatcagagcatataaccatataagactaaagtaggttagtcaccagcagccctgtagaagaggctgtggctggaatttgaaattattaaatatcactggacaggttggaggcataaataggttccaaagaacagtcttgatttaggcctcataatgctgcttaccaagaatcaattaactttttaggaaaaagtgatataatgaatttttgagtatggaatttttaattcatataatgtatttagaacattaaaaggttattaagttttgtagttattggtgctatttaccaaatatatctagctctggtctcaggcatagaacagaattgcattttctcaccctctttgaggttaggcaaagccatgtgattttcttttgccagtgaaatgtgagcaaagtactgaaatatttcttggtgactgtttcaaaagtcagttatcagtttgtcacattttcttctccatgctatagtaatgatgagaacatgattcttgatggaggtactggagtaactgtaaggtgcaaagccaccctaccaatccatgctagacaaacaataggaacggcaataaacttgcctgttgtttagcccctgagacatgtaaacataacttaccctatcctgactgtacaacaagtaagacataataatggctgtagaaagccttgataacagaataagaagaaaaaaaaaaaaactaaaatcaaccataatcttacccaaatgagtcattgtaactatttttatatttacctcttaaactatagtgttacaaagaagcttaattcatcatgtcaattatttacttaattgtgacagatgtttactctgctaaaggtatatgctgttgctctctctctcaggagattagcttccctgtcagtagctattgtgttataactagccatcatcaatttttctcttaagtgggaaactacaatacataacaaggttgttttgaatctcatatgagacaaggtatataaaataagtggcacatagtacgttaaacaataaagatgggagaggccgtttgtctttctaaaggtttgcttatcaaaattttaaaatacttgataccttcaaaatataaaccatttttgttcaacaaaactaaagcataatgtaataattctccatctcccttaagcaagtgtatgccatttgtcattttctttaaaaataaatgaacttgttcaattagttgaaaattttcttttatagatctgattttacaagttgatgggtttttattgcagcattatgtaaaaaagcttgaactttattgctcttgattagtccttatccttctaagaattttaatggtaatagaatattttaagatgcatcagtgcacatttatgttgaatgttagtatcctttctgctctttactgactaacactacagttaataataaaaatttatctttatttttgaaggcttattatgcatatatgatatttatacatttttggtgataaattctatcgccacctagtgctttggacaacattttatatttctgccatttctttttgcattacattaagatgtgtaaactgtgactgcccattcttctcataagacttttctctccccagtaagcttacttttctctccccagtaagctgttccacaagggcagagaatgcgttttctttagaactgtgtcctcacctcctggatcagggcatggcttgtagtagatgcttaatgcacatttggggagtgaactaatagataaatactatacagttcagagtccaataactatattctgacacaactacatcccctacttggattttaaaagagaaagtttttgtatcttcttgatgatctaattataatgctgtgcatctagtttagccaggacaagatttacatatgttgctgaatttagtaaattcttacttcctggacttcagataaggtaaaaagtaagcataattacaaagggcaggaaaaacccttagttatgaaaatatgtattatcttgactatggtaattatatcataatgtcaaagttaatcaaattttacactttaagtacatatattttagtttactttaattagaataaaattgaaaacaaaagccaaaaaagtaagaataacatattaaattgctttatattacaacagcaatatttctgtaaatattcttcctctacatttcaaaatttgcaaaagatatcaccacaggcaattgggcattacttttgagattctttgtcagtggaatacattaaatctcccgcctgatagagaaattaaaactgccacatttctgtctctgctagcatcatcttgaaatgttcatccctcaaacaggaatagatggaaaggagaggaaaggagagatgaacagagtttggagaggaaattacctcattactatgagcacagagaagagagacaagaaagagatataaaacatgagaggtaaacataataatcatcatgacaacaacagctattgaaagctcgctgcatgccagtaacagtctaaacacttagcatgcatttctcgtttttctgttttcatggcaactctgtttagtctccctatataaaaaaatgtaaaatctgagtcttaaagatgttatgaaacttttctgagggaaagtacaagtgtcagaataaggatttaaacccaaaatgttgaatctaatagtcaggttcttcactgaacgctatacctgttcataacagacacaaaatgtaaaaaacaaagaggtaaaacagaaagaaacaagcttctatgtgtattggtagatgaggagagactttgcagctgatgctaaacaagaggctagggtccacagctatctacacatctcctcaagacagagctccactgtagacagttaactccaggtagacagaagttaagacatgtggaaaacattaaatagaagcaattgtttgctataatctttgccacttttgcactgtatgcatttttgaagatccaaggccttctcccaggctatagaagtgcactttaagccaatattttgttttatgagatataagaaatcacagccatataaataaggcacaagcagagatgagtaaatggtatatagtgtctccagttttagaaaggatgcagattatatctgaaccagcataatgtcactacaagaaggatgcataatgtcataaaaatgtacttcatacgactcagttatttgtattttttatttatttgtttttaactaaagatgaatagcctctgccatattttaaaagggcaggcaatataaagttcaatattagaaaatgtacctaaatgactggaaaacacatcttatgaactagtatattaatcattcagtgtaggaagcagaaggcaacattacatatcactgtgatgtgctaagtgctagtctcaaatattcatggcttaggcaagagtttatcaaccttggtgctgtttagttgaagtcatggggggctattttttgtaaaatgtttaccagcatccctaacctttacccagtagatgttagtagtagttctcatccccagttgtgacaattaaaaatatctccagactttttgccaaatgtcccctagaggcaacatcacccctgatggatcactggcttcatttgagtatatttctaatcattatttttcattaaataattatgtttcagacttgcagtaaagatatgctgtaactttagatatgatttagaagtctatatcttagaaactactataaatagactcagtacaattggaagtggaattggactaccgatgattatattcattcacataaccatttgttaaatacacactaaatgcctgtcactgttccaggttctaggaatacaaaaataaaggacacatttgagatctgcattacaccaaaagtgatataaactgtttattgatccagattctccaagatctacttttgtattctattaatttaatcatcagaaaccatgaattgttaggccatattaccttacatctatgtagaaatatttttcctaagttatcatggtttctctgggaaatgaatataaaaatttcctttgaaatattttttagttttttttaaagtgatgagccaacataccatgcaccatgctattcactgtcttcaatccaaataacaatttacatgataaactaaagattgaattcaaagcataaagattgtttatcaacccttgatttcatttatttatcatttgagataacaattctactttttaaattatttatatcgttagagaattagagaagaaactatatgtattagtctgttctcatactgctaataaaaagatacctgagattgggtaatttataaaggaaagaggtttaatggactcacagttccacttggctggggaggcctcacaaacatggtggaagataaaggaaagacatgtcttacatggtggcaggcaagaaagcttgtgcaagggaattcctatttataaaaccatctgttcttgtgagacttattcactaccacaagaacagtatgggggaaactgccccatgactcaattatcttcacttggccacacccttgacacgtggagattattacaattcaaggtgagaatatgggtggggacacagccaaaccatatcactaaatgttctgagtacttaccagaatcattctctccggaagcttccttctaactgtgctctctcctctcttcctttcaagaaggtagtttaggtcctgggataaaaacaaaagacaaacaagtgacataatactagctccagaaactgtgatagcatattttatttccatcacctcaatcccctcaggaagtacagaaaactcacagagagcattgaagaagtaaagaagttatgcaacgtgcccaaggtcacacagtgcttggtacccatgtttgactcaatcttaagtccatgcttttgtcatgccactgcttttcctctggatcacgtgggttggagtaatattaaacatgtttaacaagtgatcttacagacagcaaccaacagctcgtacatcatagagatgtttactagctgataatcagctttcacccttctagaagacccagtctacatacaagtacaagccacatttaatttcctacctgtattctcataaattagtcgaactgagtcaccttcctaaactctggataccctccttataataatcttggagatttaagattatagcaaacaggtaaatgagtttataaaatgttcaaggcaccagcagtgttactgtgcttcagggtagagtcagggaaattagaccaggtgccagctaagagtaaagggagaaagcccagagtatgattctggatcactgacaactgatgctgtgggctgaggaagggaaaggtgcagaagggtgaaagtgggtggagtttggtaccaagtctgagcagaaactacacattaggactgcaaaggagatcagtaaaagccagatgatccctttttccatctctagatcttctagaagtaaatttcacacagttaaggctcattaagtgctcctagacaagctctttgcaacagggcttcctggggagtccagacaaattactgtttcctttgaccaaagcagcctgaaagcaggttggacctctttattagaatgaacttaggtacttaaattctcctttccctttcagagcacataggatttttctgaccataactaaagtgcaaaggtttaaaatactaataattccaagaaaggaaacattggaaaccaattagtaaggatatccatctaaatgaccagaaagatattttccactgtttggctagaaggagaggaaaaaggcgtgctgaccacttggtttctgaagcaccagaggggtcaccaatgtgaggaaaaggataagagaggggaatcttagagcaaagatcaactttaaccacctccttttcagtttaagtctccaaattcccctgtcaaagaatactcagtcgacaaagagaagctgtaccaaaaactgtttcatccataatcagctgtgcccagaaacagctgatgcagggagtgaggtgcattagcagaaagtcaggtcaagccccaagcaaaagtgatggttggtgagcccagggtctctttgaggagactccagcctgaatctcccattatctgccctccctctttgctccattagaaataatcactcctaagtggcccattatcaatgccagcatgattttttcacatttgctaaaagcttttccctttttcttttgtttctaaggaactattttaattccctctcccctttattttgcagttaactgacttgaaaaatatctgatttgaaatggggcttacagaccaatttcttctttccttcagtacatcccacgacccattccccaccccctagcacctagtaacagccatcgcatatgcattaaacaaaagacccattagtggagcattgttttgcacttctgcagacaaagaagaaagagacctccagttagaatgaactctttttgtatttctttctttttctttttttttttttttttttggcaacaaatagctttcttttaaattcagaaatgaaatggaattgagaccctaaattgctctcatctaaaatgtttcactctcatcttcactttcctagattatgatcaattttccccagaatgaataattcaaattgagcccagtcttctgaatccttagaaaaaacaatgccttagcattttgggtctattctactcacttatcacttggcacattttgtctggtactggcagatattctttttgtaacatataatttatttttccaaatggactacaagcttctgaagattaaagaccatttcattcattcattcattcattcaacaaatgtatttgagctcttaccatgtgttagacatgtgctaatcacttgcaatacagccaagaactaatcagacaaaaatccctgcctccctggagtttatattctagtggagggagacagagaataagaaatcagtgtcataaatatgtaaattgtagagtatgttagaaggcgataagtgcaacagaaaaaaatagagcaatgcaagaggaatctgaagcttaagggagggctacaattttaaatagggtggtcatgggggatgagagagtaagccatgtggataaacagaagaacattccaggcaaaggatatacattaaagtgagaacttaaaaaatggagttgccatcagctgactgggaaggctgtgtttggatatgttaagttttgggtgcctactaacgtctcactggagatctgatggagtaggcagttggatataggtgtctgaagatccagtagggtctgggatgaactattcatttgagagtagttttaaaaacatgaaattggatgagatcatcacagaagtgagtataaacaaagaagactcggagatgacaggaaatgatctctaagataagaagaaaactaaaaatgtggggtaccctgaaagtcaagtgaagaaatcatgacaaagaagcagagaataatactgctggtatgtcatgtaaatgaaggctgaaaattggctgtggaatttagcaatctggaggtcattggcaatcttgccaagaaaagtttccgtggagtgatggaggttaaaacttgattagagtgagcttaagtgagaatgcaaggtgcagtccaccagatgtttgtgttccccctaaattcatattgaaactctcatcccagtgttattgcacttagagatggggcctttgggaagtaattaggtcatgaaggtggagccctcatgaatggaattagtgtccttaccataagaggccagagagctagctcactctccttctatctgtgaggatacaaaaaggtggccctccacaactaagaagaagattctcaatagaacctgatgatacgggcatcctgacttcaaactttcagcctctagaactgtaggaaatatctgttgtgtataagccatccagtctatggtactttgttataccagcctgaactaattaaggcgggggcaaggatttgatgattatatatacagacaacaatttttagaatattttctacaaagaaaagcagagaaatgaagtgatagatggcaggggaattggtgtcaagataaaacttaattaaaattaaataaataacagtatgtttatattctgctgggaataaatcaggagagaaggaagacttaataatgcagtattgagagaattgtgaccaactgtaacaatacaaaggaaatgttattttttatagcaggtagcaaagcggtttcctcaaaggagagaccctatttgtgatttctttcataagcctgcttagtggataggcctccaggacttctttgtcagctggtgcttaagcttgaggagttgaaatgcgtttgtgtttgccataggaaagaggaagagaactggacaaggcatgaggggaagaagactacatatcacgtagccaagaagacagatgtggggagtgcattgtgacttgtgatataaaccttctcctctgtctctctatcttttcaccaaaatctacacttgtagttttgctaatggaaaatgtcaagacgtgctgaaagttgccttgaggttgtaaacagatttaaagagtgaaagtagagcctgcccatggaaggacaagtcatgggggttacagagtggactctctctgacagacttctgttattattgcttgccccaggcagctctcacttattttgtatcaaattatcccctcagaacgtcatacctgtctcattctacaaagtcttccctggcaacacacactctagactcctaacttacttagctacctggtcttgacctttggagctgtcatcctatgcctatataatggcccagcctctgcttactcctcacccccaccctgcgccctcactccccaccacctgatctctcactaccatgtttcctccttgatcaatgccaggcaaagtgaactatttgcagttccccaaactcgtcatgctgtctcattactaacgtctttgtgcattaagttccctctgcctgagtatttttctactctttcaagagtcaagccctcctctttgctgatttaactcagagtcctttaaaattttgtctaaaacatctttattttctttctttcttttttttttcctcacttgttgcccaggctggagtacagtggcactatctcagctcactgaaatctccacttcctaggttcaagcaattctgcctcagcctcctgagtagctgggattacagttgcctgccaccacgcctggctaaatttttgtagttttagtagagatggggtttcactatgtcggccaggctggtctcaaacacctgacctcaggtgaaccacctgcctcggcctttcaaagagctaggattgcaggcatgagccactgcacctggcactttaaatatctttctagtggaaaattataccggcttatgcacttctctcatggtaatacttttcataatgtaccacaactgatggtttattttctgtctcctcgtttaaactgtgaggtctctatcatcctggtattctttgtacctaggatagcatctacttcacagtagctgcctaataaatatttgctgaaaactgaataaacatctaatgtcaaaagttgtgaataccaggtaacttagcataagccttgaccccatatgagtggggcttagagttcatctgctgctctaaaatcaaggtcattgtatctagtagtgaccccctggtactcacaactatataaagatacaactgggatcgtgatgtttgttcctattttattttactttttttccccagtcctgtattagaactagaagctgattggtcctgaatcacaacgaatttgactggagtcctatccttcagattagttcttctgatgtctgcttctatacttccagctaatagagcctttcccaaggtcaggtagttggcctacattctctagagcctgaatggctaggagactgaggttgcacagcatctgctgctatttgactcttttctccctactcctctccccattctgtaatatgttcaataccagcaccagtctgtaataaggcaaattttatgactggatttaggatcccatttgggaagaagtattactgtactattgcattggttttctatctcaactaggctacttccaacttacacttcacccgtgtcccacccacccaagatgtcaggtacatctcacagctgagacctgggttattgttccactttaacctctatgccagatgtctacctgctgaaccattttgcatgctcaacccactctcctatccacctctgctctgaaatctttcccaattcccactcttcatcttgcatgtactactctcagctcttccttgtgttaacaacttagtgtcttttactgaaattaaaaattttgtcaggaagtttgcagatgacatatatatggggattgagtgtcctggtacaactaactttgacctttgaatactataaaactatagctgtggaactttgtatgacaaatcagtgattcttctagttctggttcccaaatgactaataaaaagttaacaattttccacatttctctgattttaaggtactcatttaatactcattcctatccctaaagctcaagttcataggtttcctccaactgtctaggaagattaaatcacatgtgtaaatgtgataagagtattttaggtttgaacacatggattgcagaatttgtatgctggccagaatttctggtggagtaagaattttttgtagaaatttattccacccatcatgtaaatggctaaattcttcttaaggcagatcattacctagatattttgacagatttggcaaaaagaaacaggacagcccaacctaattcaattaatcttaccacctattcttaagaacaattactcacaagaaaaatacagctgcaccaaagaataaaatccatacctgccacttattaaagtaattttcaatttgcttaagtctctgtgcctcattttcctgtacgaagaaaaaaaaccacttcctcgtagtaagttgtcataaatattatcaaatatcattctcaaaaatcctgagttgcattaaagcaaaaataaatcatgaatggtatatttttattttctttttaaaatgtagaataaaacacaatggaccatagacatgtacttagggtaccaaccagtggacatgacaagataacataatgttgatagggaataggagtagggaacaatgtataactatctaaatgtgcatgggaaggggtgctaactagccctagtttttaggagttccctacagaattacaaggaccactgcttaatatcagttatgagagaggctgtggtatgcatcagcttattgtttgggaagagcttagtatgagatggacccttctctcatcttattaggactgaaaaattaagttagttgatttacgggaaagtggtaaagatttgaaaagtgatagatatgataaatggcaggctgggcatggtggctcatgcccaaaatcccagcactttgggaggccaaggtgggtggatcacttgaggtcaggagtttgagaccagcttggccaaaatggggagaccccatctctactaaaaatatgaaaattagctgggtgtggtggcaggtgctcataatcccagctacttgggaggctgaggcaggagaatcgcttgaacctgggaggcagaggttgcagtgagctgagattgcaccattgtactccagcctgggtaacaagagagagactccatccaaaaaaaaaaaaaagaaaaaagaaatgataaatgacaataagaaaggcataagagaaaaatattcaagacaatagcaatgaagaaaatatttaaatgttctaaaaatattttggaataggtgtttagaaattaaaaaaaatgatttatgcttaaatacaaggctagacttttcatttcagcaaataggataattctactgcccaaacatataggtagataatattcaacctttaccacaaatttagtagccattgtcattgttaagggcaacagtaaagtattttggaaacatttggaatttaaatcgccctttgatagttaaactgtgaaattaacacataatgaatatctatgaaaagttgcaaagctaccttaaaaaacacagaaagcttcccagttaaggctgtattacatctttactgaaggtaccaatataaccaaagaaagaagaaagaaaatgtccatcagaaagaggacttaagtcagacatttaagtttcttaaaagcagaggcttgcagaggaaaccaaacacaacacttctccaaaaattgttaacgggaaatagatccttaacatttactaccaataaggccagttatattgcactctggaggcaaagactaagtactatatttggagaaagacttccagggtttaaatctggctttgccatttaatagccatgggcctttcaaaataatatcccagatatcagtgttttaacttcatctgcaggtggggctgacaatatttcttcttcatagagttcatgtggataaaatacacactatcaataaatgttatctatgattattacatttactgagtgatattgataggctttgtgtcctcacccaaatctcatcttgaattgtaatctccttaattctcatgtgtctgggcagagacctggtggaaggggtactttgccttatggtgttcttgtgatagtgagttctcacaagatctgatatttttacaaggggctcttccccctttgctcctcacacttctctgtcctgccgccatgtaagatgtgcctcttttccttccaacatgattgtaagtttcctgaggcctcctcagccatggggaacttaaagtcaattaaacctctttcctttataaattacgcagtcttgggtggtatctttatagcagtgtgagaacagactgatacattgagccaattccctttgccctgatttcaaattaacattaagcaaccttcagattatgatatggtttcttgtataactcaagaaagcaatggccaatttgagtattggcacgcctggaacaggttttgtatttttattataaattaatggattgaatttctcctgttatattccagtcttatgatcttgattattatgagtctattatgttagcaatgtggcatatgtttgatagcaacccaaaggtcttttgagctaatgtcaagattcaaaaattcaacacaggttgcctcagttaagggtgtaaatttttttttcataagaaattctatttccagggaaataaataatagagaatgcatatagatacatggtagggcatcagtcaaatctaggatgagggggagtatagagagaattatccctgttcttctttcacttatgctgatagaggctaaaatgcaagataatctcctttctattagtaacttggactatttcaatataccctagtttaccaacccatccttagatatgcaaccaaagtgatctcttttttaaaatttattaatttatttattttattatactttaagttctgggatacatgtgcagaatatgtaggtttgttaaataggtatacacaagccatggtggtttgctgcatccatcaacccattgtctacatgaggtacttctcctaatactatccctcccctagtccctcacccccaacagaccctggtgtgtgatgttctccctctgtgtccatgtgttcttattgttcaactcccacttatgactaagaacatgcagtgtttggtattctgttcttgtgttagtttgctgagaatgatggtttccagcttcatccttgtcccagcaaagaacatgaactcatccttttttatggctgcatagtattccgtagtgtgtatgtgccacattctctttatccagtctatcattgatgggcatttgggttggttccaagtcttagctattgtgaatagtgccacaataaacatacgtgtgcatgtgtctttatagtagaatgatttataatcctttgggtatatactcagtagtgggattgctggatcaaatggtatttctgtttcttgatccttgaggaatcaccactctgtcttccaccaacagtgtaaaagcattgctatttcccacatcctctccagcatctgtcatttcctgactttttaatgatctccattctaactggcatgagatggtatctcactgtggttttgatttgcatttctctaatgaacagtgatgatgagctttttttcatatatttgttggctgcaaaaatatcttcttttgagaagtgtctgttcatatcctttgcccattttttgatgaggttgtttgctttttcctgcaaatttgtttaacttccttgtagattctggatattagccctttgtcagatagatagatagcaaaaattttctcccattctataggttgcctgttcactctgattatagtttctgtttctgggcagaagctgtttagtttaattagatcccatttgtcaattttggcttttgttgccattgcttttggtgttttagacatgaagtctttgctctgaatcatattgcctaggttttcttctaaggtttttatggttttaaatcttatgtttaagtctttaatccatcttgagttaattttgtataaagaataaggaagggatccagattcagttttctgcatatgaccagccagttttcccaacaccatttattaaatagggaatcctttccttactgcttgttttttgtcaggtttgtccagatagttgcttgcagatgtgtgatgttatttctgaggcctcgttctgttccattggtctgtatatctgttttggtaccagtaccgtgctcttttggttactgtagccttttagtatagtttgaagtcaggtagcagtatgccatcagctttgttctttttgcttacattttaatattgttatgtgtgaatttgatctcgtcattatgatgttagctggttattttgcccattagttgatgcactttcttcatagtgtcgatggtctttacaatttgttatgttcttgcagtagctggtactagtttttcctttccatatttagtgcttccttcaggagctcttgtaagacaggcctagtggtgacaaaatgtctcagcatttgcttgtctgtaaaggattttatttctcttttgcttatgaagcttagtttggctggatatgaaattctggatgaaaattcttttctttaagaatgctgaatattggcccccactctcttctggcttgtagggcttctgaagagagatacactgttagtctgatgggctttcctttgtgggtaaccagatctttctctctggctgcccttaacattttttccttcatttcaaccttggtgaatctgacgattatgtgtctttggggttgctcttctcgaagagtatctttgtggtgttctctgtgtttcctgaatttgaatgttggcctctcttgctaggttggggaagttctccttgataatatcctgaagaatattttccaacttggttccattctccccatcactttcagacacactaatcaaacataagtttggttttctcacattgttccatatttcttggaggctttgttcattccttttcattcttttttctctaatcttgtcttcacatttttttttattaagttgatcttcaatctctgatatcatttcttccacttgtttgattcagctattgatacttgtgtatgcttcatgaaattctcgtgctgtgtttttcagctccatcaggtcatttatgttcttttctaaactggttattctaattagcaattcctctaacctttttttaaggttcttagtttccttgcattgggttagaacatgctcctttagatcggaggagtttgttattacccaccttctgaagcctacttctgtcaattcatcaaactcattctcttccagttttattcccttgctggtgaggagttgtgatcctttgcgggagaagagacatcctggtatttggaattttcagcatttttgtgctggtttttccttatcttagatgatttatctacctttggtgtctgatgttggtgaccttctgatggagtttttgtgtggacctcctttttgtcaatgttgatgccattcctttctgtttgttagttttccttctaacagtcaggcccctctgctgcaggtcttctggagtttgctggaggtccactccagaccctttttgcttgggtgtcaccagtggaggctgcagaacagtaaagattgctgccagttcattcctctggaagcttcatcccagatgggcatctgccagatgccagctggagctctcctgtatgaggtgtctgttgaccgctgctgggaggtgtctcccagtcaggaggcatggggatcagggacccacttgaggaggcattctgttccttagcagagctcgaatgctatgctgggagatctgctgctctcttcagagccagcaggcaggaatgtttaagtctgctgaatctgtgcccacagctgccccttccctcaggtgctctgtctaggaagacagatgttttatctataagccctgactggggctgctgcctttctttcagagatgccctgctcagagaggaggaatctagaggggcgatctggccactgtggctttgctgagctgcagtgggctccagccagttcaaacttctcagcggctttgtttacactgtgaggggaaaattgcctactcaagcctcagtaatagcagacgctcctcctgcccccaagctcaagcatcccaggttgacttcagatggctgtgctagcagcaagaatttcaagccagtggatcttagcttgctgggctcggtgggggtgagatacgctgagctagaccacttggctccctgacttcagcccccttgccaggggagtgaacggttctgtcttgctggcattgcaggtgtcactgtggtaagaaaaaacactcctgcagctagctcagtgtctgctcaaatggctgcccagttttgtgcttgaaacccagggccctggtggtgtaggaacctgaggaatctcctggtctggtggttgtgaagactgtgggaaaagcatagtatcttggctggaatgcacttttcctcacagcacagtctctcatggcttcccttggctaggggagggagttccccaaccccttgcacttcccgtgtgaggcgatgccccaccatgatttggcttgccctccgtggactgcacccactgtctaactagtcccaatgagatgagctgggtacctcagttggaaatgcagtgccttctgcattgatctctctgggagctgcagaccggagctgttcctattcggccatcttcccagttaccaaagtgatcttataacaagaaaatttgtttatatcattcttaatttcttcagtgatttcacagtgggcagggtaagtatttacctaactcacagaatactccagcttcctcaccctcagaggtaaggcccaggcagtaatgttcatacattaaagtaaatctatgcccctggctgcagttgattataccaagggttaaaacagctgggccaattatattctttcttctagaaatttggaattgtgatgaagaaagattagtctcttccaattgctggactcagtagttgaatgatggctatgtcttctgtgtgaactgtgaagcagagaaagctggtctagttagaaagaaaataatgaaacagaaacactaagaagaacagaagtgaaagaaggtgacatcttcataggctcgcttctccttgtttctgtttctaaggacttactgaattgccacacttgagtttcaagaaactgcctagatttttctgtttaagtcaaattattttttagcttaatcctgaattatgttttaactgattgcaactatgaaactccttctcttggaaagtgcagtctaacatgatacccttcataagtgttttttaccagctactggtcagcctcaccttctactgtcacagcttctgcttgattccccatctctccaccaaacaccacagaagacattttaactttttatgttctcataccatggtgttttctatatgctattttctatttctacagtaatcacccatccttgtccacttgctaaatggttacccattctgaacacttctatcgtgctttggagattctcacattattgtacataagtcattgaagaaaaatgatttgcatatctgtctcaccaccaccaccctataatctcacaggtggtgaacatataccatttatattttttaatttcacttctgtattctcaattcaaaatacacaatatgtgctgtcatgtattcctgatacatttacatcttttaatcattcataagataacatgtatgttcaataagcacaactactaaagactttggggttgatgatattatttctgggacaagaagataaaataaaacctgagattctaaagagttacgttctacttggcattcccaccaggacataaaagttctgataattgttagtcatgagcccagcaacataaaacatcataagctctttcatcaatgtcaacgttaaatcatatttgatgtattaagtgccagtataaaaccaataacagcagcatcctgggacatagccagaataagagctgtgaaggatcatttgccgttcataactgcattgacttgagcacaagtggggattaaagaacagcaggctacctaatcagccgctgtctggagagctgaagttgggttatcacaagctgagagggcagtgagagcgacagtaagacaggcgtacatctgaacaggttgtcaggagacaaaagtgcctgtgaagtggccatcagaattgaacaatgaagtgtgttggtcccactgagggtgagtcagtcacaccgccaggatagcagatgatgaagtatggtgaagtaggagaagaaatatacaggagaagaaatatacaggatgcttctggattatgcttgttgtctttgtttaattattaagcaactacctctgtgtcttcttttaaaaagatgcccgtttggtgaaaaataagagtgactgattataaacaaccattaaatcaaaatattaccaaattctgcacacagaccaaagttacaataatcctgttaaagagtttctaaaacattgctgtgatgcatttctgggttgtgtttgtgtaggtgtctgtgtgcccagaatccctttgagggaatcttcgcagtccatgtagttcaggcgaggctgcttcagtcacccactgatgccattcggtaggcatctaacctaactgcaactctctactcccaccaaatcacaccagtctgggacagaggccttcctaggatactgacagaacttttgaggaaaatatctttttatgagtgtgaaattctgattgtcatctgtgttataaaatgggaaaaagggaaggagtaattaaggtaacagaggaaaagagaacagagaaacaaagaattccttgtttcaaccatgcctggagtttattctcagttatgggagacaatgagttacctttttgctcagtgtagtgtgaattgggcctgcacatattaccaagatagtcctgacaaatacaactgctttttcactaaactgtccaactttttatctgccccatctcattataccaaatataagcccatgtgcagcagctgtacaaacaggacaaaaaagaaatagataataggatgggtctaggctttggtcagcaaagaactaagccactgtccatgactggtgctccagcaagcacagctcttatatcagtcgctaatgtgcttatttctctcacgattgagatgcaagcaaattttaatagcaataagcaaagagatagaattaaaatgcaacattaattttactggcttctcacaaactgaaatattctgaagagaaaattgaaattagcatatactgagcttagaccctaaagtgttagaagccaaaaggttttagccttggcatggccaaaagcactgcttactttttgataatggcataattgctttttttcatatcagtgaaagcagaaacagaaacagcatattgactttataagtcataatcaggctggcagcctgtattagtctgttcccacactgctaataaagacatacccaagactgggccatttctaaagagaaagaggtttaatggactcacagatgactggggaggcctcacaatcatggtagaaggttaaggaggagcaaaggcacatcttacatggtggcaggcaagagaggatgctcaagggaacagcccttttataaaaaacaacaacaaaaaatcagttcttgtgagacttactaacatgagaacagtatagaaaaacccacccccatgattcaattacctcccactgggcccctcgcatggcatgtggagatcaggaaagctacaattctggatgagatttgcgtggggacacagctaaatatcttagcccttgccttccttaacatttctctgctggaatcacagatacactccatataacacctcagtttagccctggctatgaccaggtaggtgctccttggcattgttatagggctagtcttgcatattgggcccagcctcaatcatatgatgggagttctggcactctctgtccacttcattttccttaaccctactgcttcccccatccagaacctgaaacttctggttatatctaagacaccacctagtaggactgcattctgttctccatgctgtttactatacaattttctatgaaaagactggttgtttggaatcacagtaactccctccacctggccaagagaagcacagccactgtcatagtgtatgtctgctttggagttcattgtatattgagtcaaatctaaaattttatattctagtagacactgaatatggtttcacctaggtgatttcatgtgtttaatactgcatcaaaacatccttggcaagttcctgccttctttattcccacctttctgtcactaagttctctatattttaaaaataaaccttaaaggttatgaattgctgttggatatacaaatatataggagcaatactagttaggaggcttttgttagaatccatttgagagactatgttagtttagtccagtatgttagaagaggtaagagttggtcattttctaggtatttttgaaggtagatctgatgggattttctaaaatgttggatatgggttgtgccagaaagaatgccatcaaaggtgacacctctattttttatttgagtaactggaaaggtgagttgctgttatcctacttagagatgattgagggaggagcagctttggagggtacagagatggagaactagtttgggaatactgtttgtagtatctattaatcatcaaaatagagacgtagcattatttaggcaccctgaaggccaccctcactttaacaccagctgaaaagttcaagggcctccaaggccaccttcacttctgacaccagttgcaatttcaggggtcccaaagattactctcaagtttgataatttgctagaatgagtcacagagtggactgaaagctgttatactcatggatacaatttatagcagcaaaacaatgtaggttaaaattggccaacggaaggagtgcatagggaagagtccaggagaggtccgtgcccagacttttcagttgttctttcccagtggatttgtggacagtgctcacttcttcaggcaatgacctgtaacaatgtgcatgtagtattgccaactaggcaagctcactagagcttgaatgtcttaagtgtttattagggtttaatcatgtagacatgactggccacccacttggctgacctgtagtctccaacccctccagaacttgagctgatgccacatagctcaaagcctctaccatgaatcacattgtttgactaatcacattgttagcccaaggtgcccaaataaacaaaagcactcttgttagataggacatggcaaaggcttagagagtgtctcccaggagctaatggcaaaggccggatctctctttaggtaaaattaattctttattacacagatgccaaatagaaaagtgaatttaaaagtctagagtttgagaaagtggactggtaagagatatgccagcgtacagacagtgtattagagtcctagcagaaagtaaaattcacttagatggttttaatgaaaacattttgataaagataccccttacaggactgcaggcaagattttgagatcaagtagggcctgttgagacacatatataccatcctgggatccaaaggaaaagcagttaacagaaccaatgaaaagggttaacatgtgccaagcacagtgctaagtgatttgttcatttgatttttcctatatggtaataattattattatcaaatgcttataagggagaaaactaaagtttaaaacatttaaatacctttgtctatatttgttcaggagagagttaatgacctgggattcagcctgaatctgcctgccacgggctgccatgccacttatatgattctaaaatttgacattgttatgccacatataagatcatcctgtgggtttcagccgctctccatgacttacctacaaaagggtgtctagttagtgactctcccacttaggctttcctgagaggcttctgctttgctagatcagggttgtgagcatttctggtatggaagtttacaaatgggagtggagtagaaaaaacaaaaacataatggccgaattctcctgtggaaggaagttagggaagaggtaaactagacttccaggaaaacagaagcaaaggaagtatgtatgtgtatgattctaagtgtgtacacacatacacatgtacatgtattaagtgtcaaagtgtgttttcaggatttgggtgtgtttgagaagagaaaaaaatacaggattttagttgcaactgactataaatttgtacacttttaaaatgttttcatgggattgtaaaggtctgaattcctgctggaattctatttatttgaatgtatcatggttcaaggttatcaagtgtgtcctggcttcgaagagaacatagtgcctagaatgtatcatctatactgtattattattatgatttttgttacaaagcgtggaagggctttgccattaataaaacaatataatggatatgatttaatatcattaaaaataatcaagagattttaatatggggataaccattatataatcccaccatgcctatcccaccacctgggtcagatcccgtattgaaacatgcccctagacacagaactggactcagaaagattcttggcacagtgcttcatttagctacaaataatcaattatccctgacatgcaagttaaaactcatttgccacttggtttataatgtatcaagctaaaatgttttaacatgttctgggtcttcaatttactaggttatatcataattttaaaataaagaaaatttcaaagaaagaaggcaatatctctgtaaaattagcattcagacttgagtatgtcccaaggagactagccctccaattctattttgtatagctttcttttcctcctctgagaaggtgaaaaactctttgaagatttcctttcatttccttttctcttctctcttatttctctaagccccaattatctctgttttcaatgttctctgtacagaaaaaatccgcatcaccacccacctccagaaggagagaatggctgataaaaaattggagattggattttgtttcagtgccaatctactacttgtgtcaaaccattttaaattttctcattatagttagctctcttctctatttttacagcattgccacacattacaaaatccatagctggtacatatgcactatttagttagctttaaaacatttctgtagcccacatacattctaataaaattaattctttgaaaggccatactttggcttctgaataaattattatcttttctcaactgaaaaaaaaaagatgatgatgaaacatggaatatagatgaatcatttttgtgtagcttataatacaatgcattttgggttgagtctgagcttgcataaagactgactgaaatgataaataggcctgatgattaagccaggtggcaaatcactagtttgtgtagctgccaaaatggatacctgggtatgggaggaaacctgggactcccttcctggggatagggtagtcgaggcctgccgtagaagtggtgtgattaatctctttagaagagagtgccagctgcagtgtgcataaatgtctcctcctggattctccttaaaagctaaattgatgacagtctcttaaaagagcagctcagccctctgtccctgtaagataaagacaaaccttgatttcagctactactgaaataagtaaaagtagaaaaaggttaaaaaaaaataacagtactgtactcttagtgaaggaattagaggtaatagaatgttactcatctaccaaaatataaggataattgcaatgtggtacccttttttgttagaaggttttgtggagcccatctgtgcagattgtttgttttttactatcattacatcaattaattacattagggaagaaggggacactttaattaaaaggctgttttaaggagttataattctactctgtcattaaataatttaacaatttaaataggcaccaaatttgttagtaaagaataattctgaaaatgtttgtttgtaaattatttatattaaccacattttcagcaaaattaattttgcctttttatttcatcaaatcaaagcgtccattgatttcttcattttgaccaatggactgtaggataggaagacatataaaccatctcaattattttgagagacttattttttcctaaaagagaaaaacctctcattttaccaagtatgcatatttgcttgtgtgtgatatgtctgattagggtaatcttttctgcaattggcatttttagaacatgatgagttgcaaagagaagacatggctggtgaaaagatggatatagacccacagaaataaatatatagccaataatgtaatttaaaaacattgctgctacttaagtccatacttctttggataaaaaccttcatccacataagttatactacaggaatgcctttgtgtatttcacataaaatgggtggataaacatctattttttggatgtcttgaatgcatctttctttttgtcaaccatcttccatttttctagagtgtgctaaataatggaattcagagacttgtatctaaatgtcagggaataaggaaagcaaaggattaagaatgaaaataaatatggaaatatgagaaataatatcatgggacagaacaagagaggcttagaagctaagagaagattctaagcaactcctggtgcaggagttgatggaaagtgagaatttaaaaataatgattctgcattctgtatttaaactgttctctagactgtttctgtctgattgaaatagtaagccattttttttaaaacattgaatgtgaaaagcattatagaaactgcttttgtacttaaaaaaaatgccagagtcaaactgtatctcatgcagttgaagactgaataagtaatattattccagtcattatatttatctaggatcagtgtcttacacatagtggatgtgcaaaaaatatatgtggaatgaatgaatgaagataacattttactcaaatttttaagtaggagacggcaggtcctactagtagtgaggtttttatctttttttcactcttcaatgttattccccagggaaactggcaaactgaaatctgttacattaatgccagcagagatgtatgagtgtgaagagaataagtaaacatttattgtacctgatggctcaatggactatcaacatgagctcttaagagacttgaaaatacttggcagtgtttatccttaggatgaactctacaaaaactatttgtggacattattttcagaaaatttctattttggggtcagctgagctttttcaattcaaaacttatgagctaatatgtaactatataacgcctttcctttggcaatgagttaatttcttaatgttttttaattctaatgttaggttttctatctaaatcagtgtcaaaatatcatccaaaaatagagatagtagctagtacatttttaatacaatattttcccatgttacccaatataaacataatgacaaacagccatttactgagagtctaatatatgccagtttatttttcagagttttacatgttaaaccatagatgattttaccttcttatagagaaaaatatatcaaagctgagagtaacatagtgccttgcacaaagccacacggattgtaaaattttgaactgagattcaaacccaacaccccagctataatagactaaatcccccaaatttacatttgacgctcacaaaatcttgtgaggtaagtagggcaaaagcaatttttattttctttattcacctagggttgttatttgattattctgcatttatggaaataattttgtgagaatgatagaaatttaaaatgggaacaatttaggggtaatctaaattagcaattcttagacattttcgttttagtaccactttacatccttaataattattgaataactctaaaagtatttgaaatatgtgctatattccttgataccatattagcaataaaaattggaacattaaattcattattagttatttaataacaatagtaaactacctcttcacataaatattatatttttatgataagtacctagatgttccaaaacaaaaaaaaaagtgagaagggtagcattattttatatacttataagtctctttactatttagtttaatgggaggcagctagattttcacatctgcttcctcattcaatctgttgtaacatcacatgtcctgtaacgtctggaacactccactgcacatgtgtgagagaatggaagttaaaaaaacaaagaagggctgggcacggtggctcacgactgtaatcccagcactttgggaggccaaggcgggtggatcgtgaggtcaggagttcgagaccagtctggccaacagggtgaaaccccatctctactaaaaatacaaaaattatccgggtgtgatggtgggcacctgtaatcccagctactcgggaggctgaggcaggagaattgtttgaacccaggaggcggaggttgtagtgagccaagatcgcgcaattgcactccagcctgggtgagagtctgagactatatcaaaaacaacaacaaaaactacttagtattatttaaaaatagctagacttcagggacccttctgaagggtacaggtgtctgtggagccacttcgagagctgctgatctagataaaactttcatttagaagacatggaaattaaggtgtctcatggatctgctactgatgatcgattagagaggggctgatactttcctacaagggtattagatatggctaggatggatgctcaaactatcttatggaaatatatgaaggtgattttgagtggcggtttgtattttacctccctcccactgatgacacaacaaccaacccgcacaacccttctgaaactacccttgcctggaacagcaatgatcttgttaaattcaataatcattttttaaaaagtgcttactgagatttgtttgttagcaacccttgacatggctgatcactcccttcattttgactcaattgtatggtcctcccatgatctcacactcagtgaaagcaccctctctctccagatgcccaaccagaagtcagaaacttcccagactctgatctcttcctcaccaagtgatctcaatcatcttttcttataaatatctcagtattccatccacattttttctgcctgatattttgccctgactatgcatcttacctctcttacattatcactactatcttctaacgatttgattttattccttatttttatgtgtttttttttccaaattttattttagtttccaggtgtacatgtgcaggtttgttacatgggtaaattttgtgttgtgggggtttggtgtacacataattttgtcacccaagtaatcagcataataccaataggcagtttttcagtcattagttcacttcaaataatgaactccagctctgtctgtgttgttgcaaaggccatggtctcatttttatggctgtgtagcattccatggtgtatatgtaccacattttctggtatctaggttgatttcacatctttactatcatgaatagtgctgcgatgaacatacacatgcatgttttttaatggtagagttatattcctttgggtatatcccattaatgggattgctgagttgaatggtgttttaaattctttaagaaatctccagactgctttccagagtggctgaactaatttacattcccaccttttctccacaacttcaccagcatgttactttttgactttttaataatagtcattctgaatggaaaatatttgcacactatatctctgacaaaggtctcatttccagaatctacaaggaactcaagtccgcaagcaaaaaataatcaacctcatttaaaaatgggcaaaagacatgaaaagacacttccaaaagaagacatatatgtggccaacaaacatatgaaccaatgctcaatatcactaatcattagggaaatgcaaattaaaaccacaatgagataccatctcacactagccagcatgggttttattaaaaatccaactatttctttccccggttcttctcatcggtcctccataatctgagcaattcttttgaactacagattccaagtgggcacttttcacagctcttaggttaaagccccaattctttcaagtattttacaaaagcttctgaagcagccccgtgcttgcatctacagctgggcttgtcactgattcttctttgcttcataagattctctgacctgctccctcacttccatgacagtatataaaaactgtttattcttctatatgcattcctttgactctttctctttttattcatgtattaacttggatgtcacctcctttggaataatttcccctgagtcctcccactctgagttagattatcctgtatatgattcctcaatgatgtgttctttccaaccaaaatattatttgccagtcttcatttgtagttacttgcttaatatcattttcccctgtatacttttagtattgtatgcacagaaacttcatctgattttgtctttctatagtgaaagaataaccccattaaaaaatgggcaaatgacatgaaaagacacttctcagaattgttctacccaatgttgagaacaatgttggacttacagtaagaagattataagtcatacacatttgttagatgcattattaaatgaatattttttctcttttttctgcagttagttgtatttatggttttctgactcacctttatgaagttgagaatcttgctttgaattaattattttattgtcctgttagtataatatagttactatcctgtatgactgctatgccaaagtggttcaaagactggctctcgtatgacacctaaaaccaggtgaaaccaggcctatatttggaaattggcctcattcttttatgaccaagaaggtcatctgggaagattggttaaaatatgcatgcatgagttctaccctctgaagattctaaattggttgtttagattgtaagcagctccacagattactgccacacctttcaaagtgtaggaactactgacttactgcaagaatactctggtttatttataaaaagtagttaaagagttaccttgtaaaatgtactctaatttagtagcagagcactcccatgttcaaagaaatatatagttttctgaatgtatagttttctgtacatatatgtttggaaggacgtcatagccgaacattaaactctagcaggtattacaagttcaagtacctatttttgtttctttacagctcaatgttaacacctgtactcattaaacacatcttacttctctagaacttattgtagtatgtttaatggatgcatttaatatcaatttttatgtagtatttatttaaatagcattagtaaatatttaactttgcaaaacaaaatgtggtaatactattttaccatgcaatttttgcagctgttatgtgtagaagctgttaggtgtagaagctgtataacttacagtgaagcaactttatggggccatgtgtttttaaaacaaaatataccaagtatatttgtgaattcacattttttattgttaattgatacataataattttgcatatttatggagtataatgtaatgttttgacatatgtatatatgtactgatgacattagagtaattagcatatccattaccttgaacatttatcatttatttgtgataagaacagacaaaatcttctagctattttgaagtaaataaaaccttattgttaactatagtaatccttctaagcaacaggacaccagcatttattcttcctttctaattgtaactttgtacccactgaccatcccctctccatccctctcttccctctaccctccatttatttttatttatatttactcctgttttcaaaaaggttaagtaacaggtatgtatacatacatacagacagtacatgtacgcacacgcgcacgcacacgcagacacacacacaccacacacacacacacacacactcgagaaacagagagaaggaaaaagagacagtttctgattatttacaaatattttgctttatcattgtttgtcatactgtattgatgaaggtagtttttcagggaaaatagaaatagatactagtatagagatgagatttttaaaagataagaagaaagagtagaaggagaaaagaaaattgcttcatttgatccaagctgcaatggaattggatgatctttttttcttttcacactcttttatatagtggatcttttgtgtcagctctttaatgtgtttcattacttgaagactgtataaaggaatacattcaataatttttctcttattttaaaatgcatcacagttatatgacttattggaaatatattcattaatgtgatatatttttaatttaattatcaggtacttctctaggagaatgcttactttacaaatgtgtgcaggtatatttactttttaatttaatgttgttaactagaaaacaatacaaaaattgttagcattattttttaaaataattatggttcaggctatttaaaatctattttattaaggaaagttatttcactgttacatatacaccaacttgagtttccaggttattcaccagaacattacatgttactgacgatgaaaaccaagtaaccaaagtttctaataatagggaatagttacataaattaggtgcgtgataaaacacagtgttcattaaaggcaatctagaataataatcactgacttacaaggccctctaaggcattatcacaaaacaattattaatgtaaaatacaatacaaacaaagctatgtgtgtacacgtgtaaacgcacagaacgtgttatggaaaaacagtatttcaagcctttaatagtgacagcctgcaggggagtagaactggggtataaagggaaactattttactctatgtctttttatacatttaagttatttatattaacttttagtcatgtgtttcttttataacttgaaaaatgtcttaaagaatttgagaaatgtttattttaacaaaaataacagaggatatggaattgttttgaaacaggaatttcaagttgcaccattaaatacacttatacatggtcaagaaaattatgcgttcttggccgtatcaaactatctcatgtagtttataatatacaaacctatgtaaccacaaaaattaaaatgaaataagaagaaaattatacattctaatgagtgttttctgattctttgccctactctattttttatctctaatattcttttttttttttccattttaattaaaggtctcattcgtttgcaagagctcatcaaagctccatcaaggtataatcttcgactcaaaattcgtcagttacctgctgatacaaaggatgcaaaacccttactaaaagaaatgaaaagaggcaaggagtttcatgtaatctttgattgtagccatgaaatggcagcaggcattttaaaacaggtaacctttaaattacttcaattcttgttttcttcataaacttgcacttacaatatgatcttcttttaaatcaaaatattattgttatgcaatcagttataataaccttgatgtaattttatgatagaaagtctgacaattgcttttaattaattgtcttaaaagaaaagtaatgtaaacattgatgatcttcaaaacgggttgttggaagtttggaggttattttcaaatgactgcaatgctgttggttaatgagatagttgattaatgagatagttatttctttttgttttgaaatgagggaaggaactaagagtcaaccagttgagcagctcactcattacaatcagccagtaggaaaaagatgtaatagatttaccatttacctgatatttactgtaagagactttatatatttgatcttatttcatcatcactacaacaaaaagaagtagggactatctctactttacagacaaactgagtcccaaaatgaacaagtaacttgaccaatgtcaagtagcaagaacatagcagagggattgatatccaacctaatgatgttaacaagtattcattccagaataaagcattgcctgacaaaaaccaaccaaccaaccaaacaaacaaacaaaaccttctaaatcaatcaaacaaaacaatttgtagctgtgaaatcttttagtattatgtcagcattattcagacctaacagcaaactggaaaacagaaattattatcagtccatatcttacagatgaaggaactgaagttgggagttaaatggccagaacaaggccctacacttactatgtagtagagcctggatttgaacacaaatttttggattttgtttcttaaactcttttatgcacactgagctgacacctttgtagcttggaactagtcagtcatttagaaacctctcatgtataggacaaaatatttctactggagagttacgcagattcagatgtcaaattatatcccgttaaatataactgccaatagtaaatgcctgttatagcatggttaatttattaagcagatgtttatccaatattccaatataaatgttgattttcacagtaaaatatttactttgatttgaaaaattgctatagttttatctttggataatgaagcatatgagagtttttgggtttttttggcaacaaataaaacaacgcactaagattactactgaactctagagtcaagatttatttcacataattcccaaacaattcctgatcatggtttgaatacacaggcttggaaaagagacctttcctttactcctggagtgagtggcactaagctatttcagtgacagagctttggctgctttctctaggcttctagtaagtatgtaaatgatcagctgtcttttctctaaagaactaactctcactattttgctatctggaaggtgagaagcctgtcacctttaaatttgaacttgctttctgacttctattagatatatttattattttatacttgttttcttatgtgttctttgcaaacatgctttgtttgcaaaaggaaaacagaaataatagaatatttaaatacatataacagaaaaatgtaattttaacaaggtcagtagatgaaaaattagaaaataggtaaaatgagaatatgaaagttgagatgaatccagagcgacattattatacagtatgcatcctctgaggtcctataccagaagaccacaaatatggtggtgttatttttaactttgtctcacatttgaattttccagttattctagtaaccaagaagaaagtgaatagcttctaggaaattcagcagtgcatttaatagggtcctattttgtgatttgtgaaatttttctgagattcctgaacattcactgatgttggaactcctaagacatggtataggagttgaagagcaaaaatagatgagctttcagctagtctggcttcatccaagaatgaataataggactatgcagaaaaataaatggccttaatcagtttactcttgtgcgtttgtttgtgtaatttatttaatttatttatttaaactgattgagcttttactaggtattgaacaacagtgaatttgaagttttcctgctagaaagctttaaaagtgagtggagcttgcggttgagtagatttcctctgaggcaagttgagtacactaattggcatgcatgcctccatagcagatgattctacctccatccagatttatcaaagaaaataccctagggcagagccaagatcctctgaagtaaaacctcacaaggacattctatcacagggaaaaaatagtaatcaggaacttcaaagtttagatcagagagtgtgaaataaaaacttttagcctggaaaaaatgtaaaagaaaatgctaataaaatcctacagtggtgtgaagtaaaataaagtaaaaattgaagaaatgtgtataggcccccctcatattgttgaccttgagcaatatgatttctggatcttacctgaaaaataaactggttgcatattatctgcctagataactgcatgtgttaattcatcatatagcatagcactacaccagcttaatgttggggtttctaataatattttgactttagaaaatttaatctgtagtatttcttttaggagagatgatatgacaaccgcttttatgttgaggcaattattatattatttgtgcataaaaacatactgattttattctctctaatatgtttgaagtgtgcatacaattcactcaaaagtagcagtaagacatgctataattaaaaccagatccagagcaagttatttaaaaaaaaattctactggaaattattaactaatcttttaagagagtattcctgttgttcattctttttgagtaaggttacaatgtaggtacttaatcaaaaataactactatttctacctccaattttgtttgtttgtttgtttgatggagtctggctctgtcgcccaggctaaagtgcaatggtgcgatctcggctcactgcaacctctaccttctgggttcaagcaattctctgcctcggcctcctgagtagccggtattacaggcagctgccaccacgcccagcgtattttttgtatttttagtagagacaggctttcaccatcttggccaggctggtcttgaaatcctgacctcgtgatccacctgccttggcctcccaaagtgctgggattacaggcatgagccaccgcgcctggcctcccagcgttttctacgtcatatatcacagcacattaactgatccttgttttcaaaatcaaaagctgagagaaggtcaatgaaagccagaaacagactccaattaccctcatagatttcttctcaaggtgatgaagaaaaacctgtagccattggaaatacatatgtcagaacaaatcatcttcttctccaccatctcctcaacaacttcccctacaccaaagcagaatttgatgcacttgcctgagacgtccatgttttcaaattttcaaggaaggaacaggcaaaaattttagaatgcatggagtcaaaaattgttctacaactttgagaatatgaaatataccactttagaaaatgacatagattccaaactccacattagagacctggagtccatgtttactcactgtctcactttgttggacagtttattcattcttttcatgtcctagtttccttacccataaaatgaacataatagtaggactgacttctagggtttttatgaggcttaaatatgtaatgtgcttagaatagtatctgacaaattttaagcattatataagtattatttttagttatacatctgaatcgttatttctttcaattacctttatctctagttctatacctacagagttgataaagtaaaaaaaattgccaagcataatattgagctgtcattgaatggtactggagatagggagccatctgaacatatccatcaggagcaatgaatgccttctacaaatatgatcttgtaaatttgtatttaataagggaaattctgtcttattttgcttgagatgaaattttaatccgaatattattggtttatataagtattacccactgaagaaatattatttggtaatttgatacctaaatttcctgtgctcaattctttgatgccacctttcattaaccaatgtttctccctttttaaatatatttgatacattccaaatttttcacaaatatctattccttcttaaagaattcatgttgcagaactacaaattctatcctacctaactggttaatgctgatttatgagcatgatgcttttcttatttttattttttatttttaattgttgtgggtacatagtaggtgtacatatttatgaggtatatgggatattttgatacaggcatacaacgtgtaataattacatcagggtaaatgggatatccatcacctcaagtatttatccctgttttttgtttgtttgttttgtaatggggtgttgctctgtcactgcagcctcgactttgggagctcacgtgaccctctcaacctcagcttctcgagtagttgggactaaaggcatgtgccaccatgcctggctatttttcttttctatttttttttttttttttttgtagagatggggtcttgttatgttaccaaggctggtcttgggctcaaccagtcctcctgccttggtttcccgaagtccagggattacaggtgtgagacactgcacccagccagcatttatcctttatgttacaaacaatccatttatactcttttggttattttaaaatatacaattaaattattattgactatagtcaacctattgtgctatcaaatactagatcttattccttctattttttaacccattaatttctatatgcagaatgtagttgaggcagctacttcataaatgagtttttgtagttagtggcttttggaaggctattagatgtacctgagaataattgtttcctactaagaactcttcattcaactaaaaatgcattgttttttaattatccttgccaactgctgttcattgataagcagttatttcaaaagcattctcttatttttggagagaaaatgacatggacacttgttataactaaaagttctaacccaaaagtccttgtttttaagattgacagtctaaaattgatgaggactgtagaagagtgaaataaaacacagtaatttgtgactagtttattaataacaacaaaaacatttctttaattatatgtaatttttaaataagagtggtaatttacatttccttcattaatgctatggaaatgtctctaaagagctaaaataaatgcctgttggcattgtgttttgcagcacttttttcctaattcagtaatattgttcattaaaataaaatggtgttcctcattggagtatttgtagtgaagacgttacgaatgtaacaaattaagatgtgctaatttcaggttttgtgtcaaatttaatgccttctttaatgtgttaagccatagctttacaattgcaaacattcagctaatagcttttctatctagagaattgcttcagaaattccttcagtaaccactaatctttaactactgggaaaagatttagtttaacctaattgtatgtaacatgaatattgtaggttgattctttatcacatcctactatattttgttctcacttgaattactgacatactgtctttcctgaaatatgtaccttcagtaatttttttttttccttaggcattagctatgggaatgatgacagaatactatcattatatctttaccactctggtaagtacttcattaaaacaaaatgttctgaattttattattatgactttttcagatgaaaaataggttttttagtaagaagtattatgactgattcctttgtagttatattttaatttgataagactccaccaaaattattatcagagaggacaactcttaatagaagctgatgattttgaaataatatcatttcagatatcaattcaaaatattgcatatcttatttttatgttgctttagagaactttcagaatataatggatcttgaaattagtttcctgagaaatcagtgctttagaaaagcgcaaattcagccgggcacagtggctcatttctgtaatcccagcactttggtaggccggggcagaaggatcacctgaggtcaggaattcaagaacagcatgaccaatatggtgaaacccatctctactaaaaatacaaaaattagccgggcatggtggtgggtgcctgtagtcacagctactcgggagcctgagacaggagaattgcttggacctgggaggcggaggttgcagtgagccaacagtgccactgcactccagcctgggcgacagagctagactccatctagaaaaaaaaaaaaagaaaagaataagacaagaaaagcacaaattcttatgttatctcagctgtattcactttttgaaaatcagatgtattgaagctgtcctttcagtagattacattttctattctgcttttgcctgtatttagttagattttttaaaaagtcaatatactttaatttgccatcagcaaattgaatgttacctttatattttgttttcacatacccatcacacaattttcccttataatgtatgaaaatctgactttaacctgtatcaaacttactgttagctccattttgttatcaatacattatcctgacctttctttctctgtaaaacagctgtctctttactaattctttcttccacatgtcccaaatatgagtatctccaagtttggacttcatccaatcttattttctcttcaattattttcttcagaactggtttgtatttagagcctcagttaacatcttcgttcgaatgaggtctaaatgttctatgtaatatttatgaattactgtatactgtaaaacacttttaattgttgtgccattagataatttcgaaatatttaaactttagtgtcctctgaattgacgtctcttctgattatcttaaaaatttcaacttttgttgactcctgtatcaccaacaaaattttactgatttttcctttgtagtgtctctagcatctatcttctccattcccataacaaccagtctaaccaaagttttcttcattaacttgaaattcttccagttagtctccttgcttctagaagtcttgaagctgccagatcagattattaaaatttaattgattgcaatagcttcctgtgatgacaactcttacctccaaaggagattattcatgcagtaggatgtattttacttaaaaatagcaaagctggctctggcatatctctatattatttcctagcagacaactttttgcagcttgtaagaaacttagtggtgggggtggagaggaagtgagagcattccctcatcagcaaattatatttcagtgctgttacaactcagcataagcgtaagattttggggaaatcaaaagtatctctcaatagggaaaataaatgaaacaactagtttaggatacatagaactcataggcctacatttgaaggccttttatactttgatcctaatcgaactttcccatttccttttgctactattctcctttaggaattctcatttatagctgaactgatgtggatcagtctcctgaataggttttatatcttctaatttttgtgtctccactcacactttgaattctctttttgtcaatcatcagcccggtctttctttaatggcagctgtaggggagaaaagatttcttttcctcacacttcatgaggttcaaggctgagatctctataacaaaagagaggttgacaagagaaacacctaaaaatgtatttaatataaattttatgtgacacaaaagccatcagaaatgaagactcaaagaaatgggaaaatctggattttttttttttttttgctttggtttgataaagagtagatagttatgtaggaaaattattggacaaagggaggttatgatctaatggcaataaatccagaaaacttagcaaggccaaattgttgagattcttcttgacctccaggtatagggctggatccctctggaatgagagtcttatgacctcctttctgtgggggtaggtcagagaattcttttatggtccacttcaggggagaaaggtgggataaggtcacagagtgaccttcctgcttctgtgtcttctcaatttcctatagccaagtaccatatttgggggtagcatgttctgagcctcatcacagctaagatcccatctgctctgtgaagtttttcttgaccatacaaattgaaaataacttgtcttgcttctgacttcttttgcatttatgatttctactcttttaccacttggcatatattgccatcctttatttattcacctctttcctatctccttggctagattgtaaacattaaaaaataaaaacctaaagattcctatgtttttcatagcacagactagagctcaggccaatgccagctgctttccactgaattgtattcttattatctagcctgtgtagctgtatgagtctgaggcaagctgttcacagaaccaatggcattaatcttgccttgattctcaatattgtccataagttcgagggttagctatgccaactagaaagagggcaaaactccacatgctggatgttttcatggtggcatccatttccatgatagctttggcctcatatctcctgggacaactaaagggcagagcaagaaagttcactatatacagactagaaagggcaacaggcataaagtgtttattggaaacttatagtgaagttcctaggtgtgagacatgagatgaaggaactgtattgtttctgcaaccaaaaaggctagtcttggccttagcatttttttcacacctttcatacagttttcattagttagaagctgtattttgtgacttgctttctaaaaacaacaatcaaacaaagaaacactgacaaaaaaaaaattaaaaacagcaataaccaggcgaggaagcaggacacagaaaaaattaaagcaaaatattaacacataaaataagggcaagctatcctaaacagagagaagaaagctattgcaaatcttagatgtgagttgtagaagagcccattgtttcactggcggatttagaataaaatatatacatagatttttacatacggagcatgtatctctgcaatgccaaagcatgaggacagtctatttgaatcttggtgatttgtgatgtttaacgtcacttgacacaaaggtgttaagtgacctaaaaaaaacaaaaaaagtgactatttcagtaatacatgcctgtgaagatactctgtccataataacaacacaataacatttgtctttcaggacctctttgctcttgatgttgagccctaccgatacagtggtgttaacatgacagggttcagaatattaaatacagaaaatacccaagtctcctccatcattgaaaagtggtcgatggaacgattgcaggcacctccgaaacccgattcaggtttgctggatggatttatgacggtatgaatacccacttaaagatcagtttgtgtgtttctaaatagtattgcatacatatgaacttctgggtttatatgcatacatataaacttcagtttaattgtttgacattaaaagcaaaatatcagagctacaatgcaaatacttgtattaacaatttttttaaatcaattttatatgaaaagcttatgcttccatccaagtatctcaaaaggcattacaactatcaccagggtactacaacataggaatttctgtaaagttaattagtgccctacatgggagaaatgagagactgaaagaagacatacatctggtagttatccttctgatcttacctatcaatatacgaatactcttcaacatgatgatttctggtatctggtgttatataaatgacttatgtcacacaaaacacacaaaattctcgcatgagcttactcactctttaaggctgaagactaatcaataatcacatttgtcattttcaagtcccagtttaaacccagaagcggcactattgcataaactatgaaagaagggtatattcttatataacttagttgtttatgccaaacaactttagttgtttataccaatgcttacaataaaaatctaatggcaaggcatacataattttaagttttcttatactgtgtcctccaaaagataggtaaaaatcagtgtttgtttaagctactatgtaaaaatattatttttaaataagtaatcaatataaaaattatgacttcagacattttatattttttatactaaatccttgaaagatggtatgtatttgacatcatgcatattaattcagagtagtcacatttcagtcatatttactctgtagtagccaaatgtggctagtgtctaccttgtcagacttggtaggtatgtgtcatgttatttttgaaaattataaatgcctgatgttttcttattaaatcatttttctacagactaaagtatcactataattaaggaaatagcttagcagtggggtgatatttacatttcataggaaattaccatctgcttttaatgagtattagtctaaatggagaatttataaacaaaaacatcctctatccttacatgtatgtagaaaagctttttctattatgcttgtaatttttccattaattacttcaatagcttcaaagcttgtttttgatactgtagggataaaaggaaaatttgatttttttatccttagaaggttttgtaatacaaattgagtgccttcatagagactatgaagaagaaatggttagcctaaaggcatcaactttctgatggaacaaaaaatacatttgttttcagtttgtgagaaaaatcacctactagaatttcaaaatatatccgtatgaatttgttttaaaagaaacactatagggaaattgtacttcgttgcataaagagatagttgaacagttctagtagtttagttttaacttatgtttgagaatttttattgagaggaaaatacctaaataacttaaaaattaaaatattttccttcaaagtggagccagatttaaaataaaatgcaaactagaaaaaattataaatgttatattttattaccagtttaaagatggtgaatcaaacttttgaaacttaagacaatgtgattttttaatattataatgtatgctatcctttaaattgttgttatgatcatgtgaatatttttatataatatataaaaatatttattatataaaaatatatattatataaaaatatttaaatattatataaaaatatttatatattataatagctttctttacaattctttgatttcaggatgaatgtcttattatttattttcaatagcactattaaatggttttaagaaaagtaaatcagtagatatcagcacaattttacacttttatatatttacttccacagataaataagtccaatgactaatgtgccccttcatgtatcagaatcataaaaattattcaattttactttggtacactctgtatagctatgtgagtccctctgtgactttacacatcatctcccgaaatgaagtaatccctaatttgtggcaacttatgtaaactattgaaagacagataagtacaaagaatgatgtattaatttccaaggtagaagctcttggagagaattaacctctacaatatggaaaaagagagaggatattaggagaattacaaatttgcattctctctttctagcacgagtctattcctcttctgcttttccctgttgaactggcagatgatttcttggaaggggaaaaatgttaaaatgaaaatggactgatgaaaaaatgtgtctattaaaaatcctgggcattatatataaaccatggattctgagttatttagaagaattttccatgcaattctctttcctttggtatagttcttaaatataaagtagatatgaagtttgtcattaaaataaaggtttctttcaaaatagatgcagattgattttgtttttacaatttcccttttggaaaattaatatattttaaaatcctttcatcatataacattgtaccaaaattttaaaaaaatacataaaatattttcattatgtaacattaattcttaattataaaatagcatatggttattaaaataaaaccaattgagttctgtattaaaatgtgggcatatttatgtcttacataagtattctttttcttttcaatttaaaattgtaagcattttcacaagtcattaaatgtttaggaaaagaaattaataagctgtttccaccatgaatatagtcagcaaattaagaggattctagttagaaaaaagagaaaaaagaattatagcctggcattgtggcattggcaacattcccttcagtcaattcatgagatctcagtgtttatgtatctctttttctttttatcccctatagtcccataaagaaatgggattatcagcaaagtttctagtgcttggagcaagacctattattatcagtatcataatcatttgccattgtgtaagatcatagtgctcagactttgacatcctttcttcatgtttgagctataaaaggaaacagtaaattggattcataagagtttttctagttgagttaggattttaattggcctttgagatgactgtttatcagttaaatgactactgaatacaaaaccacttcgcttgccattgtagtttctttctctgcagtctagggtcatcatattaaagatgttaatgttagtaactcagtaaaatttttagtttcacttggtataaacccaaccaaggaaccaactcacacagtacttccaagcctgatctagttaaggaggaagaaataaagctcaacactcttcttttacacatgagggttttcttttaacatatgatatcccacttttctccattcccacacaatgccatccagttagtgctctgaacttcccagacataaaccccttattgtaaaactctttccatactctgcattctgtattgtgttcccatcttttcatgctcctagaggtgtgcaaatacctttcaatgagcgttactactgttctttattgcaaaatcagataacatcttccccagtcctctgaccagacattgtctgcctttatgtagcacatttactataggatgagaattcacttttgaaccagtgccaatcagagcccgacaatggtgatacttgttattgatttattgagtttacagcaatttcaggtaaagacaaacacctcagagtacattttaaacagtctagctatatcccagaaatccttcccagtggttctaatatacatatgcatattaataccaatgtacctgtaatccattcagtagcttaatttaattatcagtattttttttcttgtgctgatagataataccacatatttccttgataatataaatgtattacacaaatcaataataatcatattgatagactatatcatttgggtttctatagggatattactgttttagaagtttaaaccctggacaccaaccgctatctccatttcctttcacctcaaaaatcattaagcactgtcaattttactgtatcaatatttttcttaactacattcatcttttcaacccagaactttatcttagttatgatcattccctggctttcctaataatcccctcactgaagtcctactcctaacatctctctcctacattcaccttctttctagtatgatttttttcagaactttgctcatggctcctcatcatttactaggtgtaacttgagctcatttgccaagcctaaaaagccttctatggtctggctctttccaatttgtccagcctcatatttgcttgctccctgttccaccaagccaccctctcatctcacctttgatgtgttgtcactcatcatgtatcacctattccagcataggatacttcattatttaaaccacttacctttttttgaatgtttggcatattcctactcatactctaattttcaggttttctgttaccttttagattgaatgtgctgagtcctccagatattttatatgtgtggtcctttatttatgcactttatgtataactccatgttgaaagttaactctagtgctttagtttctttttacatcactttttcaatagactgttagctcttttgaagcaagaagtagatattgtaatctttgaagtccctatacctagtttaatgcctggtgtaaaacaggagctcataatgagagagtgactgcctgattgaataaatgcatttgttaatttattttaatcatattacatctgtgttctaatcattagttcctctaatttccccaaatatatgttggagagcattttatttgccctcttgtactttattatcaatatatctaatcatttagaagatgtaattaggctagtctcaatgacagaagcttagaaatacttttttttcttttttttttttttgagacagagtctcgctctgccacccaggctggagtgcaatgacagtctctgctcactgcaacctctgcctccccagattgcagagattcttgcgcctcagcctccgagtagctgggattacaggcgcacaccaccacgcctggctaatttttgtatttttgctaaagatgggttttcaccatgttggccaggctggtctccaactcctgacctcaagtgatccacccaccttggcctcccaaagtgctgggattatttataggtatgagccactgcgctcggccattagaaatacttttgattaaatagtgaaagtatagtaagttagaagagtagttcccattctttttacaaaggaagagataatgtttatgagaggtgagtctttatgtgttttaattctaaagccctaacagttatttctttataataacagaccacagaccccagactttataatttccttttttatttgagtatcttaaaataaaaatgagcatcttgtatatacatcttacagcaggaatttagctcatccactaaggtgacacaagtaatcatttgttactgtataaagatttacttgtatagctgggtgtggtggggcaggcctgtagtcagctatgtgggaggctgaggtgggaggatcacttgagcctgggaagttgaggctgcagtgaacagtgttcacccagctaaactccaacgtaacaccccgtctcaaaaaaaaaaaaaaaaaaaaaaaaaaaagcaatggaaatagaaccatagagaaataaagtatgaacagaacagacaggctttttcatttactgctagaacaactgcaagcccacctttgctgctatttgcttgtcttaattaattttagctgtttttctttaattcatttgaaatgaatataaatataaggttttggcaagtaatggatcaaaccaactcaacattttttaaattggtgaagcattttgaaaaagttggcttcatcttatattgcactaaatcaccaaaataaaagaataaagagtagcaacataatgaattgatgaattaactttttaaaaatcaattttaatactgtgtattgtatgcagcacacaggatttgataccaggcactcaggatttggtaatcaagacaatacctctatttcatcaaataactaagggaattgataaaatcagaagatagtaactgtttttctgatcacttcacaatctttgttgatataacaattatgttcaaaatgtgatgttgattgcttcttaattttgtatttttggatcttctttcctgtcttcctgaaaattcttgttaaaatttcctgttttccgtaatcatttatgatagcaagagacacacatatatttaccaagaatttaacataacttcttagtattttgtcgaaaaatgtgtaacatttcacaaaatttattaacataaatgttataactactagccttattcttgttgttaccacagaaaaaacattttggggtccataatataataaaatatggcagaaatacttgtatatttcagagtatgtaatgaagtcataagtacaacatttgttacatttatatatgcttgatttaatgaatggtaaaaggacatggagcatggaatgtgaataacagaatggcactatatttctttattttatgtacatattaatcttctaagatgcactaagctacaagttaaatctaaatacaaataattgagatgacctaaaaacctccattgttttattaacatagaacatttcgtctaattgccttttctcatccacagattaaataagcagcatttaagcatctaaaattgatggatatggaatttctattttaagtaattgttttttacatgaaaaatggcagttgcagtgaagcattatctttatggtcatattatttttataggtcaattttcaaacttttcacttgggaaaagtaagggtaaatcaagagagattttttccccttcaccctgaagagcaaaatttatcttcaaagcattgatataatattatgtgacaccaacttataaaggataaatacatttctgcacacaattttcttcagtctcttattttatatttaaaaatgtaggggagaaaaaaaaaaaactttacctgtcttaggtttgttcattgtctgggacctctgacagaagacagactaacatgaaaaaataactgaagttcattgttgtatgcagcacctactcacactgaagaactcagatgggaatagctcaaggggtggttagaacgtggacttattagcctcttaacaaagaaagatatctttttagaaaagtgccaatacaaaggaaaagtgatttaggcttttaggggtggcaaattgtgagcagatagatatatacatataacattatataaaaataaaaaattatatatatctaatatggcacttgtaggatcatatgcatatatatgtgactatatcatatatatgtatatgatcatgtacagatatcatgtgatatgattatatcatatgtatatgtatatgatccaacaagtggcatattttggggtggcatatcctgaactccttcaacagctatatggttttacgtggatatgacgaatcaccaatgatatgaggaagtctagctagacagaaatttgtgacgttcaggaaggagggcccctcaaggacagtcaatgtcaaggacacccagaagaggtgatgcccaatgccctgacaagagcatgaagtccaactttgcagagtctgagaactgacaacattctgagatttaagactccacatctgcatctggactgtggcatcaaggtagaattaataaaagcaatgaatgtgaccttgaaaaacaaaaatgccaagctggttattgaggtaacaaggcattgaacttgagaaagcaagtacagggcacaaagtaaaggaaatacaacatggtcaagaaaatagagaatggattatttcactggggtcggcactcagattctaacctgagaatgaagttaacagcaagtttgacataatgttcaatgctgtaagttaaaggagtggattgggaaacagtgggatataaatctgggataatgttttttcacgctaattaattaaaagataattataaatattctacatttaacatagaaaatcaaaataattaaaaagcatcaaatactggttgaaattattaaagaagagagagtaagagatggaattgaggcctacaaataagaaatcttattattcaaatattcataatatcctacagcaaagttctggctaaggaagtttattactgtaactatagtgcactctcatcatagaaggaagagtggatctatttttaaaatgtatagaatatgttttctggctactagtttgcattcagggtaaaaatacaccaaactaaactatatgttgtatttgggatgaactaagatggagtagactggtggtaattatcaaagctataggttttcccatattatttcagttttatgaataatctttggaatttgtttttggctcctccccccaaaaatttaaaaccaatgccatataaaaaaataccttggcctcatcccagtctttaaaatttgcatttagttgaatacttacatttatatatgattttatataaatataaataatataaaataagagggaaatatataaaaatatataattcttatttatatctaaattcatattatcatattatcttaggtaatatcttaatacgtttgtgctgctctgacagaatacctaagactagataattaataaaaaacagaaatttatctcacaattctggtggccaaaaagcccagatcaaggtattggcaggattggtgtctggtgaaagcaactgtctgcttccaagacggcaccctcttatattctccagaggggaggaacactgtgtcctcacatggtgggagaaaccaaagggcaagagagtggtcctttcagcctggagctcttttataatgttgctaatctctttcatgagtgcttaatgcagtgatgatgacttaatcatctctcaaaagccacaccttttaattctgttttattggggattaagtttcaacatgaattttggaagggggcactgtcaaaccatagcacgcacttttgtgaatagtaagcaatattcatatttatctatttaatcatattcatacctatatttatctatgtactaaactatactatttatacatatctatatctatttactagaaagacagtgtcactggtcacagtattaataggataagcatttataatacatggacttggtacactcagtatatgcaaatgctctttgacttatgacaggattgcatgtttataaacccatcataagttgaaaatatcataagtcagaaatgcacttaatacacctaacctacctaacatgatagcttagcctcacctaccttaaacatgttcagaatacttacattaagtaagtattacttacctacatttggacaaaatcatttaacacaaagcctattttaaaacaaattgttgaatctctaatggaatttattgaatgctgtactgaaagtgaaacacagaattgttgtatgggtacttgaagtacaatttctactttttgcatatggcttttgcaacatcataaaataaaaaaaatcacaagctgcaccatcgttaagtaggggatcaattgtgtgtatcagattttggtatatttttgttattaaatattagctataaactattaaaatattaaaaaacaaatgacacacgtaactgtagattgcatcaattttagaatcaatatgtctgtaagaaatttaacaattttccctgctgtgatttataatgaacacattgcagctttttttagtcatgttcaattttagaggaattttatttaaaaatagagattctaaaaactatcataaatatagaacttggcatataataaaatttatattatatataatgcacaataatcctacctctgatgttttaatataaatatatacctcagtagatatttccatttcttttgttttaaattacctacctctggatcccaccagtgtagaatttctcctgcctaattgatccaaaaaagtactcaactctgttattagaaataagagtatatgcatatataaagaatatgaattttaaggatgttaggatgtatacagtggccctaggaatagtgacccaaacaatgactttatacaaattctgagtctagctaccagcgaatgttactatttgtatttgacatctaatataaataacctaaattgtgaattgtatttaatgcttactgcattttactgctgtttctgccttattaactcaagacatcatggggcagttatcatcttcattttatagattcagaaacatagaataggcaggttatatatagaaagaaagatccctaaactattgtcagaagcaaatataaaagaatccttaagcatctaaaggaaaaagttgagcatgatgaattagaaaccaggaaaaaaaaattactttagatgtgcagccagattttttgcttcatttttaaccttatagaatttcacaccagttttgggtaaggtggtagctagttggtctactaaaccctgttatttctttccttacagactaaactcatacatagaggtcacaagccatatctgaatctcattcccaaacctctctaatgctattactttaggcaagttacctaatctctttgagcctcactcgtcaaatagaaataataaattttagtgggttgtcataaggatcaaaagggataatgaattcacatataagatgatgaaaacctacctggctttttataattatgagttatattattgcctcctcttaaaggccctgtgacttataacatagaatttgacagagtgcttgtggtttaattaactgattcattatttcagcattaattatcatctgttgtatgcaaaatcactgtagtagatacttagggtgtacgtgtgtgtgtgtgtgtgtgtgtgtgtgtgtgtgtgtgtgtgttggatacaatcataagaagctttcatacagaatctgcttaaaacttgaatccagtagtcttctttttaaaatgagcccaattacaatgatttaaaatgtgctattacaataacatatccctatttaacagatatttaagtctaggtagaagtttatgaaaatgatatgtatcattttttctcaatgtcagatcatttcgtttttaagttaaaaagatggcttgttggacacagaattaaaggatggatttttggttaggtttttcatgcctgtagtagaagactattaaatatattctatttccatctgagagcaagagttttgtaatctaaatcacctaactcttgaaaacagtctgcttattccttcctttgtaaacttctgctaacagtttaatatttctgagcctcagttgccttagctattcgatgaaaccagcctacatcacagtgtcactctaaagattgaatacataactctggcaccacttgaagacagtgtctggccagtagttgatcctccataagtgatatccatttgtttcaagataaatgccctttcttcactttagtgcagatgctactatgttctgagtacagttcatcattctcaaaggatcttttgatccctgtttatacaaaagcgacaactgaataagaatgcaactgtgtaaatatttacttacttttaaatttaagagtaggtagttgcttattttaatgctctgggtgagattaactaaatgaatgaacatgacatagctagtttaatatcaaattgttgatgcttttttttcatgacactatctgagtaattatatttacattagaaaggcaaattttaaaaaatgtagcctatgcagttttgtgatataaaggcctaagaaatggtcaagaatctactctgatgcactaatttccaagatatgcttggccaatactttttaaatccacattaataaatcagaagaatgtttcagacaaaaatgaaatgaagagttttagggtgaatttgcctaacggatattaggaattctcctgctttattatgcagaggaaatattatgttgatctttcatttgcctttctaaaagaactcatacatattttattcattaatcttcagaatgccctgtgaccaaattgaaccagaaggggaaagtgaagttagtaaacagacacagatgttgaaatggtaccaaatcgatccttcataaaaaacctcctatgtattgctattcattcattcattctccaaatatttactgaacatctactctatgcaatgtatggtattatatcatgtgaaggataagaaaaatataaataaatagatagattacatgatgtttgcacttgaagaattatcagtttaataagacaagtgaaacgtagccttaaatcattggaaaaaatatgctggcatgcagtgagaaatgtatatagaaaacagtgcatttagatgagcatttatctactttttgtttaggatataactataactttacataaagacacaacttgagaatgttatgtgcccaattaacatgaagaatggttcactccctttgtagttacctcactggacttggataaaattctacattcctgtgataagtcaaagaaactcagaaacttgatcaggttgagcagactggttgatggaaccacaggtttcattgtaagatgctcagcacatatgtactctattcaagctagagaatttcatagctgctgccaggtttgaagtactccagaaagtgctaccacagtgctagagttactgccagacctggggtcctggtatttctgctgaaaatatggcagtcaaatggttatctctgtttatcctttcttccattgccttgagtgttgaaggccatttttgccaattgtctcctcacatcctgtctggtcactcatcactagtactagagctcaaatttactctcaaattgacctggactcccactattccagctgtttagttatctggttctttatgcaacaaaaggcacctctgagtctgcccatagtggctgagttaggacccccatatcagtcaaaagctatttccagatccagctcttctctgagactatcaggccttgtctacactgtacttactttcagctgagaatgtgttctctcacctaactccacttgagcatcctcagtccctcaaaggtaccctggattgtggtcttgattgtttttctcctaggagtttctttgattctttgtaaatttttccactttctttctagcaactttcaagccctgggtactactaaggagtgaaggacagagcagtgtctataaatccatgtatatagttgcaatttaagaaacagaggagagagtagtctcagtaaagccaaatatacatggctaccagagagaaggtgcaaagttgactttaatctatttaaaagaaaaaagtcactaaatgaatccattcacaatatgaaaacctacaccaaagccgggcttggtggctcctgcctgtaatcccagcactttgggaggccaaggtgagaggactgcttgatctcaggagttcacgaccagcatagacaacatactgagactccgtttctacaaacaaaatggaaaaaattagcctggcatagtttcacacgcatgtagtcccagctctttggcagtctgaggtgggaagatcacttgatcctgagaggtcgaagctgcagtgagccgtgatcatgcaactgcactccagcctcagtgacagagagagactctgtctcacaaaacaaacaaacaaacaaaaatccctatacaaagagaatttgatatttctatcttttcacatagaactaaattaataataataataataattgttattgttattattttagcatcactaagtacaggacacccctgctataaacgttataaaaatttgacagtttgatgttattggaaaaggaatttgggggaagatagggctcaaactgaatctcaagtataaatataaacataaaatagcattttgataaaaatagatgagagtaggaaggccatttaggaagaagataatggaaagccattaaagatgttagaacaggagagtgcaataaaagtaatatcatttaccatgccttgctaaatatcatgcaatttgtggtgattatataaagatatgtttgccttacactaactctaagtctcacaaaaatgctgtaggatgagcattatttctcacttacagatgatgggactgaggtgccaatatatttagcatgttgctcaaggacatttgattagtaaggttaaggctgagcgtttaagatcagtcccttctaacttgataacttgtgcttttcctgccctatcctgcttccaggaaggcatatctggtggctctgtgtgaatgcataagacacactccagcaggtagcaggcttcctgcaattcaagcctgagttaataaggactggtatagagcccagggggctcaaaggaatgattgaatgggaagatctttttgagatagggaaggatagtacggagacaaaagaggccttagagctttgcagcttaggtgactaggaagactctagtgcttttcaccgaagtggggctattgcaaaagcagggagcttgaaaaggagatggtattgattgcaaacaggaaaatttgagatgatggtaataccttaaaggaagagaggtccaacaaaaagctggaagctgaaaaattgtttctcatttctataatgactcagttttctgtttgtttcagaaatggagaaaaaaatttcagacttttgggagcatatgtttacaatccttcagagaaaaagacttagtcaacctatttggccacctagactaagtgactccagaagctgagagaatttaagtagtgttgaatgtcaaagaattactgcatactttagtgcccttgtttctcagtagtcatgccggaacagcctgtgccttcgtagtacctgtgtcaggggtcttacgaataatgccttgggagaagagatgttaatttgaattctggttccggctttcaagcaaaatattactcttgctaatgttgtctatcaaataaacttctcagatttcattcgcagccttcaaatatttattcctatttccaatttttttactaaatcaaaaggaaaagggaagtgaataagtgataaattaaagactgtgagatgtctttaaaatatgaacttctctagcccctaaggcaggtgcacatgaatttaactgacaaaaattatgcacagttttcttgatttgaaagtctcacttaagtgttattttaactaaaatttgaaacaatcaaaatctcaaggtaaatatagatattactcacttttaaaacatcataatttgaacatttactattacatagatattatgtactgtagcaaatttgtaagctataaaaatatgtggaagacaattacaattttccatttattaacataccaagcaaagaaaatgacaattatcattttaaggaccagtagaagttctcttaacccaccttcccctaaccgatttgtaagagtaaccaaagctctgtatccactggttaaaatatactgattgacatccacagaagtgagaaaactcaccatcaggaggctactatcatgtttctgtattttgactccgtggtttggtattcttatttttctataaccagtttattcttgttgtacctactaattcataattcaattaaacattacataaaacagttaaataaaagtgcaagcataacattgtttctatgaaaactcaaatgactgcatgaaaaaaattgataaaggtactttgcaagtatctctttattcttgtttcacttaaaagaaacaagttgaaaatcatggataatccattatgtttggagcttatgcaaaacagaagaggaaattcaatcagcagacccatgaaaaaggtcttggctctacattaatacatttaggaatacatttacagttagatgttgtacattaacatagaaattttgaagtatatatgccttaactgtttaactggccaaatgttagctttgattactttggaaaattatttataataaattttctgtgcccttgtacatatttcattaaaagtaggatcttatggtatacacagcttgcttaatgttttcttaagttaatttaacatttatttaaaatttgctatgtctcaagcactgtttttggaatagagctatagtggtgacttagatggagttcaccttctatgtggtacatagaaaatataaacaatgaaagaaaacaaattaggataagaagatggagagtgatttaggtgtggggaaggccctttagctagggttatgggagaaaaatatatgtggagtaagtcctaaaggataagaaataggtagccatacaaatattgatcagaaaagcatcctaggcagaaggaacaattgcaaacttcttgagatggaaacaagcaaggtgcatctgagggaaagaaaaggtaacccagcacactgataggttgcctttctttcataatttgtgatgagaaaaatcaagggtatccttttgatgcattatatttgaattgcctattagatatccaagcaggaatatgcagttttgtttactagtgtattatttgagcctctaacagtatttggcacattaataggcattcaatcaatatttgttgagtgaaggaaggaattattttgggaaggaataattttgagatgggtaatgttttacgagtttgaaactcaggtgaaaggattgtagaataaatttgtgagtcattagcacatagataatatttacagctaagaaactggttaagattatccaagggtatagtgtgaatagaggagtgccaaagagtgatcttagaagtcaagaagagaaagagaagcaaaggtgattgaagatgtgcagtaaggtagaagaaaaacaaaaagagtctaatttcaggaagactagagaagaaagtgttttgagaaggacatggtcaattgtgtcaaatcaagctatgagaactgcttaattttggtaagcttgaagaactaatcattttgatttgacacgaaagcattgttagcgacctcaatactattgtctgcttggaatgttggggacaaaagctaagctggactgtattgagggaatgtgaggtgagagagaagaggtatcaagtctaactagttatttcaatggggtttcaatttaggataccatagaaatgaacctgaagagatacataaagtcacataaattttttttaaacattgaattaaggcatgtttatataggtataaatattccagtagagaaggaaaaaataatgttgcaggaaagagtgaagatacttgcaaagctgaaatctaaggaagggacacttagagggagttagtcttagatagaagcagggattgtttattgcattataaaaaaaaaaagaagacagagtgtggaaattcagatgcaggtgggtggatgaatttgggcaggacagcagagtagttcttgactcattttctccattttattagtgaaaaatgaagtgagtataccagcagaaatggaattgaattggaagagaaatttagaaggtttaagaaggggcaataggagcaaaattatctttttggaaagtgggaaagtgaatattctggggaaatatggaacattttctgggtttatggcccacttgagattaggggccataaatgttaagtgatttcagttaactgcatcctactaaacccagaaggacagttaagtcagcaaatagttaaatttaatgagtttaatttctctaagagaccatgatggagaataagacctaaaagagttgccagtatttataaacaaataattataataccaaatcatagaagttagaatggaagtaagggaatgtgtgaggtgctggacagtgaaaatgtggattgaagttctccaagggggtgaaaattaggtggaatagggtcatttgagtcactgggctgggaggataggggatttgttaaaattaaaagatgcatgcaaaaattaaaagatacaattaaattttattaagcaattctaaattgtcttctaaaattgctgaactaatttatacactctccaatgtgtaccatactattattcattatgtttttaaatcaataataattcttagaaagttatttagacttatttgtttaacaatttaaatagaattgaatctcgccattattttgtgggctagtcttttttcagaatatgtagcctcctcccttctccccaccccccgaaaaaaacccatgtaacagaaatagtaatagtaaaggaggttctttccatgaaacaaatgtggaatttttaaatatgagcctctaatattttatcagacataatttctttacacttcaaagatatcaagtgttttattataactaaacaaggaaacattgagttctatcatcttcatttttaaactattaagtttctctcaacagccaaaattgataataattataaattggcctttattttttatatataaaatgtatctatatccacatttctaactttcatatatatttatattatatatttatatattatattacatatatttatatttatatattatattacatatatttatatttatatatttatgaatgttaaaatgtaatatagatttttgtagaattttatctccttctgagaaaccatgtcataaatttttaagtttagattacttttcttttaacttggtttttaatttggaagcaggagcttggcattaatgtgtataacataacctgaactattttttcttttcttgagaaatgtagccttgtcttgcttgcttagtaaagtaatgcaccttaattcagctttgttatccttcttcttcttcttcttttttttaactgtagcctatttggtagttcctttttcctgtgaaacatgtataaagttctacaaaaataccaaaagtttaccatatttattgctaagatgcaggtatactacattacttatcctcacatcattagacgaaatgcatatgaactctccttacaactgggtattgaacttcactggtcattggttattagaacattttcttttaatgactgtatctttttgtaagatacaagtgttactttggagagaggtaggaatagctctatggaaaatgtacatgtacatgtggtggaatttttcctgaaattaaaggaaacatgcagtttggtcaaatgcatcaaataaattaaaatagtgacggttactgcaaccgaatctgctgtcttaatatgctatcaatgtaaaacagcaatcatttataattgtcatcaaatgacaaagttaagtgtgataagaatattttgcacaccaattaatttttctatcagttttgatactttaaaatgttgaacatacagttctttaaactgcattgtttcttttttagctgtttaaaataaattctttaagaagtgcaacaataaaaaaacaaatcagcaatgttaaaaaatatgtaaggagacatgcagattttaatcttcttgttgctactgtattaaatattttgtccttatcaaaatgtatgcacaaaaactggacagaatatgcttctgtgatctttagcagctctgtattgccccataaatgactcagctacaaatcagtgaatgtgcttcaggctttgatttttgttattagttcaaagatgaacatcatgaggacatcactcagagacagatttatcatgttttgtttcagatctcatagtgaaagctgaattttcttgtctttgttctaccaaatacattgctatatacatgatagtttaaaaaaattaaacctttttgaatatgctagagaatattaaccaatgcataataaaattaaatcaagtaggtgccatcacagtctaaaaatataacacccgatatatgtctgttgacatatttgttattcaaattcaaattttctttctcatattgttgtatatttacaaatgtgtatctatactatgcaaacattgatggctttttaaaatttattttatattatgagtatataataggtgtatatatcatcaaatattgtatctgtttttctccttcatgaaacaaatgacaagatgagattagatgcacaacagatttattggcagatatgcctgtgaaagataaacaggcaggaggttagaatagacagttttcagaccgtgctataggtctgaaacctgtaaaaggagagagggaagacaggattggatagaaaaagtctcagacaactatgccaaaattcttagccaggccaatggggattcctagagccacagcttttcattagaggaattttgtacaggaatggtcttgttctagcaaggctgccaagctcaatcactggctggaagcagcctatctgaagagcagcctgctgaacacagtggtgtatgcaaaggtgcagatgctagaggctgtccttcagttatgttcctagtagcagtttcagcagagcttcttcatagtcatcaaatatatgtattttgggcctttcagtgaagttgttgctaagaagatatggattttctttcttaattttcttagttaatatgttcaccctaataggccatgtcctataagtgtataagtgttattaggtaagagaatgaagatggattctgtggctgcatcataggctctgaatttaaaaagcaacaacaaaaaccttactaaatcaaatctcaaaacatatatcctgattgtggggcagtgtgggcttatagatgtttgcaaatgaataagcacatattctaatttgactcataatgctgttaagaaacaaattcataaatgtaagatagttattgcatttcaatgaggcatgccagcaatgttcaacaaaataggggaagaaacttataagcaagtatggaaaataatacagtcagtcagcaaggtacataggtttaataactgagttaagaatatccatatgacttatgtgtgcagtatacatatataaatatattcttttatatacattatcacaattcttttatatatattatatataatatataaatatatatataaattcttttatatatgtaatagaattgtgaaaatatatatgtgtgtatatatgtatatatgtgtatatatatgtatatatgtgtatgtgtgtgtgtgtgtgtgtatatatgtgtgtatatatatatatatatatatgaattgtgataatagtcccccagaaagtaaaattctgcaagcgggaaaagagtgacaaggcactcatactcagtgagctctggaaaggtgctcaacttactttacctgaattaatagatcataatttagcatttgatgtatagtctttgattctcaccaaaaaaatcagaaagattgcaagatctctcagtagttctagatgagaattcattgttatttttcgttatcattgatcagtaatatagatgaaagctcaataacgggttacagtgaatgttcattgaatgccaagcactgtgtttggtactgctgatacaaaggcaagtaaatcaagtgttacctcttcccttgttaattagttaaaattgcattcattcactccttaagcaaaaataatatatggttcccaattgcttttctgggcattggggatacaacagtaaataaatgttacagacaaaataaatgaatgaaaaaataaacaagtcccaaaatacaactggatagcagctgtggaatttttcttagtagatggaatcttttattccgtatttaacactattaaattccttaatagactacaccataaactctacaatatagagctcaacttgagatacagaatgtttaaaagagaataaaaacttctctgaagaattccattgtttaaagaaatggaaatcagcattattcaacatttcttactttatatatttaaaattatcttagttgctttttgtgatactacattattattttaataaaatatataaagttggatgatgataatataactcttcaaagatacttctgttagtggtttgatatatattttttcataatttttagtgagtaaatccatctacacatacatttttacataaatttaatttcatgcccattgtcactctttaaaatttaccttcttttaaaattactacaatatatgggcatatgctaatttactgataaatatgttgattgtcttccgttacttaataaacaattttaagaagaatctgtttttatatatatgaatctccataagagtatttatattttcttaggatagattcttagcaagggtacacttgatcaaaatttctacatattttaatttttgacatatattttcaaatggctattcaaaccttgtctaacagttttccagtttttcctctgctataggttgaattatgtcaccaacaaagatatgttgaaatccttacccccaggtacctatgaatgtgatttcaattggaaatagggtctttgaagatgtaatcatgtcaagatcagctcattagggtcggccctaatccaatataattgatttccttgtatatattattacattactttgtaccccataaatatattgaccaccatagttagtcaatttaaaatttaaaaataaatattaacgataatttaaaaataatttttaaaacagaagagggaaattggaacacaggcacacacacaaggagagcaccctgtgaagaacagacaaacagggagaacacaaggtaaaatggaggcagagattccattttcactgcaagccaatgagtagtagctggcaaaacaccagaaactatgagaaagatataaaacagatagaccgtggccctgcaggaaccttagtttggacttcttgcctccagacctgagaaaataaatgtctgtgttttaagccatcctagtttgtagtaatttgttaaggcagtccaggaaaactaaaacccacctctaacattttagagtgcttctttaccctcatagtcaccaaattgagcattctcactactttattactctgtctattagaaaagtaaaattacaaagatacctaatacatttaaaactaaatgaatctcattagataaaaggcagagaagtttcacatttgtcatatatatgcatgtttgtctatttaccaacatacttacctgttatcctttactttgttttataaaaggatttaagcagctattctctagttaatatagaaaaaaaatgctttaaaatggaaggaaaagaatcttccattaaagaaatagataggtgtcatcctcccagccaaataactgggctttgcgcggggtaggtatttaagtttatggctatagcagtatctggattgcagggttcaaatcatatgtttctattttctggctaacctcttatctctcagcttcagggtttggcatagacctaggatggcacagaatcatctaccatttctatgagatagaagcctgagaattcttgccattaacgttcagcctttctctcataggggtttgccgtgctgctgaaatacgcagttggtctagatggaaaatagctttctgacagtgtcaattcaaggatgttctgagtttattattaactctgggaattatatcataagaggcaaatactcctacaaaacattgatcaatgccactgttagagatacttggtcttaggttgatttgatcagaattacatttactatgttttaagtacaagaagagccctctgatgttcctcattgtggagttcttttcaaatagaatgcattgtaaatgtcatctcctgtgatgacaaggcagttgtagagtgtaaggcagtaaaggtgagatggaagaacaggggattggcagtcagaagcctgcattctagttgtggctttgctgcttactggctgtgggcctttggaatggtgagttgaacttctgtgttctcatcagtcaaatgggctttgaagtatacctcaaaaggtgattgtgaagatcaaatgtgaccatgtttatgcaagtattttggaaacatctagcgttaaatatatgtaaaatgttttcagttgcagaaattttagtttgaatcaagagtggtgggactttgaaacctctattctctcttttgtaaatatttttgtcatatttaatctaaagataaaaacaaaacactttataataactaaaggtttgtttatttggggctggctgtaagcaagagagtattatcactgagggttgttcatagccactcctgtagctcatccactgtttcaatcctacagtttccttcctttccgcgtaggctgtcttcacctggggtcacaagacgtcctcatgctcagcaccatgctttgttgaagcaccagggtggaaatattattatattttctgtggaaaaagtgagggaaattgagataaaaaggggaaaagttatttaaataagtatgttcatatctggtttataagccttaagataatttttatgaagagctatcttgttttactcagattatttttattttggttgactttggcacctatctgcagtattagtagcattgaagttgttattcagtggatgaaaccttgctgaagtggctgtgtggataccctaaaatagccacttctcccttgatgagtgtcgcattaagattccatggaagttcacaagggaaaaacaccttttctgtgttggcttttgttattgcacccctctatcccaattaacatttactgttttttacattggtaacttaattggctgctaaattttagaagataaactctgaatgtttatgactaaaattagaaatacttaaaaacattatttaaaacaaatgcaatgtaatgatgaaattcactgactgtatagtaaatatgttgccaaatatatagaaatgcccacaaaataatattttaaaaatattctaagtttactcttcatctgtattctaaatttgattccataatttgagatacaaaaattcatgattttaatataaaatctgaagagtaatattcatgaccatatacttacatatgatctctctaaatatatagtagtaatattaactattaataaactctataatgcaatacttcgtattaaagaggatgattgagtttaaatagctttgttcttacttatactttacttccttgggaaacaagtgaccttatatccaaaccctctgaagcaaagcattgaaataaaatgtttttaatgctgtgatgagaatttaaatgtcacagagtgctattgacatacatgtaagatcaaaagaggaagtgtgttatgacagataaatcaagatagtagaaaattctgttaaggtctaaactgaaagtatcataactaaaaacatgtagtggcattttcatgtattctgggcacacaaatcagctacaattggccaaaatgttacataatgaaagccagtaaataacatttttttcctcaaaaatagtagactgtggcattatacgtgacatttagaaaaggttcttattgtagctgtttctatcaatattcctataacaattgatttaaagattgtatttattttgtacttcaaacttccttcaactggtaaaatagaaactataaaagatcccctacctatgggtcaaattacttaccccaaatgattgagtaaatttgcaaccaagctgaaattagaacttttaattataatttaaaagatatttgaaattgaatggaaccaatcatagaaaattttatatttagctcctcaacacactaaagttccctttttgggccataggatcatagctgactgctatcttttagaaccttgctaccctgtgtgtggtccactgagcagcagcatcaacatccatgcagaaatacagaatctcaggctctagcccatacttactgaatcagtttgccttctaacaagatcctcagtgatttatatgcccattggaattggagaagcacgatttcaaacatcattatatatttcctcagttttttttcttacaggcaataggtgtgaactacttactaaggtggactgcaataaaaaatattaactttgtcataaaatgtcgaatattcattagtgtatttatacatgtatgagtctgagaaagccagactccaaagagtgaactatgcaatacgtattttatttttttctaataaggtattgatttttgttacagataaagatttaaaactatccaaatactgcattaaagtggcaaagtgcttatgagaaagaagatatcagagctgaatttctacttttatcaccattgagggatacagcattctcaaatgcatccagtatcattatctgactagaaaattcttgctcaaatcattgttcaacagaatactgtttagatcttatttacagtttccaattggactttaggcaagaagctcttgtaggctttaaattccacacaaaggcacaatcacataatcatgactcttcttcctcaaatattttacatgcttcctcataaaaagtagagctcttcaaaaggttaggcctatctccctaccagtattggattgagtgtacagacaaaaacatacctcaaatatgtttggtaaagatcagaaaaaaactctaatttttcattttacaatgtagacttgtcacaaagaataaagaataagagaatagctggaagcagtacctctttcaaagcgtaggagggcaggctgtcagcaaaccaatgggactatgacgaaaggccagcatccactgtcttttagtttgtggaaaccatttattattttaaaaaattataccattaataaacttagaggcatggtatctgtcatcattactgatttgtatgcatgaaaaaacctcctgaccttttcttttttaaattttataactcatgtgaattcggtttccttaaggacttgttaaacagtactatggctttcttggtcatcctgaatgctaattttcttcaggtaattcggttcgtgaagactgaaagtcattatttgtttatgacctaatgtcattcattagttctgtttcattaaaaaaatggatattactgaagaaatatgtttatcaaagaaaagattcaaggtgggctttattatcttcaagcatgtggtctattaagcaaaataagatattcagcaaaagactatgataaatcagtttctctttattgaagaagctactttgacatttccattccagctcagtctaagtctgcatgacaaacaactgtttcttgctagcttctgtattaatgtttaaactctctttggtaatcaggacttttaaacattttttataatgatttggatagaaatagtcaaatttataattacatttgtgacagaaaggtgaaccttctaacagtagtatttttaaacatatctctatactgaagcaaaaagaacaacctagcatcctttgccttatcatcttctattctataaaatatgaaaatgggataaaagtgaagtatacactgtgttttcaccctacgcttgaattaagaattgctttctttccttcatattagagtaagttaaaattagaacactttttatttaaattgtcaggtaaaatgtgttgctttcaaaatatgctttctttttagtaaaataaagatccacctttctttcttatattaaaatgcaaagaaatgtatattttagagtaacatatgcatttattatttgcaggggtcatacagaatagaggtaggctaccagagtgcttctccagagctgatcaagcacgttagcatttgtaaagttcttttttttgtcaggagaaccaaaaagacatacttccaaaattaaaatgtaaatcatatgttcaaaactaaaatgaattaatgagttaagtcttacaatacctgttggaaacactttccacaagacttttgtgatcttttatttgatgggccatgagcaaccagaaatgagtatgtttttagattcctggactgccatgcttcaaatatattgatgtatcttactttacatctctttctctaagaggattattcagttaccacttttgagcttaaaaaaaatagactttaatgttgtattccagataaattcttttaaaattctggtatcaacttttaaaatattatcttctgaattatccactggatttttctccctggaggctcactttagagatgttcacacacaactgctggtttgctttagataaagcacttgttctcacgttctcatgtaagttttatcacaaacaatgtctaacttcacttttatcatttcgcttcttaattcctttctctttgtcacaagtcctgtgctttgtagctgttttccttatttttgtttttaatgtggcttacctttgcagttaaaattcttagaaattattgttactttgaatttcaaatcagaggaattaatttttttaaagtctataatgcaaacaaattattatgatattgaatacactaaaaatctgaagcatttttccagtttaaatgataattataatataaacaaatacactcttataaaatgtgagtaaaattaatattaagagagaatttgaatagcttcaatattaactctaatattatttcatatacaaacgttttacaatttatttccaggatcagaaaaggaaccatataaaataccacaaaaaaaaatataggctttgcctgaagtgttataagtaaaatttagaaatgttcataaagattataaagtttcttctcaatttgtttaagttcagaaacgtcattaaaatgtttatatttgctcacctttttggtaggcacaggctaattcaagataaaataatgtaatgtttttctgggtgctatgaccccacataaacagtcctgaagacaaataatgtcattcaggatgctaagtgcttacctagatacaggacatgatagggacagatcccccacctgaactgaagcaagtcaaagaggacttgaggctaacctgagacttggaagatgaagagttccctggcagacaggaggaaagaaagacaagactaatggggagtgttgtagggaaagaaactggcttatccaaagtcatggggacacataacagcacagacacataaactgtcagtattttagtttggtctacgtctagggacttaaagatcaaaccaacatctttaactataccaagaatataatatagtccaaacaacggcccataaatgttctaggtatgtgggagtttttatggcagtcttcattaatcccatgttatgaaaaagaattatttctgatgttcctgacaaatcagcagagttgcaagtgaaggaaggaaagtggaagaagtttggaaataaatgaccgtgatttaatatggaagaatcacagcaagagaaccctgatattttggttctaactccagtttagtttataaacctgcttcgtattctaaacaagtcatcactgaccctatattttctaaatacaggataatgtttggcctaaatatgttgtttgtgttttaacaaaactctgttagtcaagagacaaaaacacagtgtcattgttggaaatgctgaaagaaatcttgaaattcaacctccttcatcctatagcttcctccacttccaccttctacctgcttccccttctatcttccttttcctgtttctacattttctaccttcctatgttagctcctgagcgtctatgaataaacctaaagcttcataaaatactgtggaaattagtgtccagataacttcttatgttctttcagaccatatttctccatctctgaatggtgtttaattaataatcaattaatagtcaaagggaaaaggggaaatctgagggcctgtgataataaataataaatatagttaggttaattggtggaatctaatgaagaggaaaggtatactataatgaaagaaggcaataaataaaatctggaactaaaatagtaattgtaaatactatctatgaattccttagtgtcagatattttaaatatttagtcttgtttaaatttccaaccatcctggagtagctatactgtttcctgtttatacagaaaagtacatgagttaaacaggttaaaagaatagtttcttatggactccactgacaacctatggagagacaatgcttttgtactgggcccttataggtgttgagcttaatcttcagagcctcctgtcctggggtggggggaggggggagggatagcattaggtgaaatacctaatgtaaatgaccagttaatgggtgcagcacaccaacatggcacatgtatacatatgtaacaaacctgcatgttgtgcacacgtacccaagaacttaaagaataataataaaacaaagcaaaacaaaacaaataacaaccacaaccacaacaaaaggtttaaagtaagcatattcccattttatagctaaaaacctgagattccaaaaggttaaattaattgctcaacctgaggccatctggctcctcttccagtgcccattcctctacatactttattgcttccttaatctccacaggaatcatttccccttttctatcagccttcaaaagcttgttgattgctctctaattacaaatacttggagaaaagtgtgtaaattgatatgcaaatgatcttttccccttagcaaattagcactttacttccatctaattaagtagctttgtgaaggaaatggatttctgaaagaagaatggaaagtgtttggatttgttctgggggtgtttctggtttagcaagccttgtaaatgaggtatataaaaaggagtcaagagtaggagcaaacaatgaaagcagagaaaaaacgaagggggttggatgaaaaaatttaagtataatgactgacaaaccttcaggagaaagtaaactgcctttcatctttcattctttctccaataataacacttttttttaaagtaaaataaaactttaagaaagttctgatttctctcagacatcggtgttaacgctgacaatatatttatcaaaaatggatatattcaagcctaaactactaatttttgttgtatctagaatttacaggacattctcttaattgggaagaaattaattccttgagtatgttacaagaattttccttaggaaagagtcacttgttgcaataggaattaagatatggctttgccattatatatatttagtggaattaggggcaagacatgtatgtactagcttcttccataataggactgaagcagttgcctgaatgttatctttaattattgccagtgaatagtaattcggtactgaatatgtactgaattgaacatgtaactacctgaagtaaaaggtgtcaatttaaatttttcattgaaaatatggcaactgagattcacaataatatattaaatctttatcctctagcaatctgtttttatgaatttaacaaaatgtctgtatgtaagcagtttagttgtatgtgcttggggaaagcctttagtctttattaaattatactacccaggtccataaatagctagttcctataagttacacaatgccatattaagttatattagccattcttcttaataatgaaaacatatttaataataaaatattatttacccttctacctatgtttctttgccaggtattatactcttgtctataccaccaaattattttttggatttacaatgtttatttttatattttattcattaaaatgtaataaaaaataattgaaaactgatgctaattgaataccttaggaaggatcaactctgctgttggcaatttcacttatcttattctagttgccctttaagaaaaataaagagaaatcatattggctgttttccaggagattataacacattggagaagggagaatctttgtagcaaaaaataactagaaaaccattgggtgccagatacaaattatgatgtaaattataagaaccattttattataaacacttctatggaaaaagtgacaaatatcacatatcagagaaaaggtcagacattcagatcttaatttgtatacaaaaaatctttttactgttactgaatactgatatcccaagagtaattgaagaagtatgcaagtactataaattgcctccaagctacaatattcttttgaaggagaaaagattaaaagattataaattccatattcccaaccaccatcatccctccattatctagactgtgtcccttccagtgtattgtgaaaaatcttcgagagatcatgctgccaatatgtcaaggattctacttttttgtaacaggtgagggcctttgatatcaaacagttcaccacctttattcttacaggaagacactgaggcccagagaggtcacttgggtttgtcctgttgtgttcttagaggtgaagatttgataccaaatctgacatgtgatcctcaaccaagcaagggtttcaaccttgacttggtatcttcatgctctgaatagtcatcactttattgtgcaatttatctaataacacaattgtgtctgtaaagaaaatacaaatggagaaaagtttctgcaattattaagcagaatataaacctaaggatatataaagcatatatttatctcaatatttccatcttctctttctcaaatccaaggttttcttactctactttcaaagaacaatatatatgatgttttaaatttgaatataaagaagccatttaaatgtattttctgaaatgtgcaacaggctgcaagggttttttttttttttttttttttttttttttttttttttgatgaatacataattgtcctaggcatttttaatttgttgcatggcagatttcctgaatcaaatagcagctgtttggggaaagtagcaagcacattttctgcaggcccattggttgctgttttgctttcatattctctcaccattaactatacagcagctagagcagaggagttgttaacaaaatatactttcactgctagccaaactatatacatgacttagtggtaatatttgattttatgtcatttacttatgtctctgtatgtcttacaccaagggactaacacccaatgggagaaagaaaaaaagggaaaattaactaagtatctgtgaaccatcaaataggctcagataaaataatgagccttcaacaagctggaatataataacattaggactttggagttcagtgggcagttagatgcactaatggcactgctgtgctgggaaaacatatattttatttggaatttttgtgtggaggtgattgcacattatatgaatagctgtgctaaatgcatgaaggttttctgccagcataggaggcgattaaggccccctctgccagataacagctcactggagggaagtaatggtggcaaagtaaaatctgaaaacagatgatttcccatttaatagtccattgactctcctcctacagccactgtggtgatggtgctgctctttattttcatttcacaaagaagcacaaggtattctgagattttttaggtcatacattttctttcaaaaagaaagagagagaaaaaagatgagagagaaagagaaaaggagagaaaaaacaccaagtattgcattaaagaaaaatgcaattgattcactcattcattttaagaaaaaaagatacttatttttgtgtttattgaatgttcattgtagttcaggatgatttcgtttttttttctttctcccctgcaccccctcgtttgtgtcactcatcctctagggagctgtatcaaacttacaaaaaagggtactgcattttgaatgtatatccaacatgattatgagacagacccagcccacactgtcagaaaaaaataaaaaatgtgtttgtccgttcaaactgtgatttggatataaaatagccaatatacttttaccatttaaaacattttcccattaattattttttctcttctttatcttttatgtgttctatattctcataccatatatgttgaatatgcttatctcatttcaccatttgtttaagcatagcagttaatttgtttcttcttaaatattcatcaaacagaattttgattaatttagatttaaattaaaatgtgtaagtgtagtattgtctattaataattcctggtatttctgccataggtcttgaaagtaccttggtccattctggactatttgtctttatttactaacatcattttctgtcataccacatctatttttatgtacttttgaaaataagacaaataatgattcagtcatccaagatttgcttaggtatggaaatatcaattttcaaatagtcttacagtaaaacaaatttaaaaggtcctagaaggaaaaaaaaagttttagttaaactcacttatttgcaaactactaaaaaaataaaataaaatgcaaaactgtacttcacctttattttattgctggatgaaattttttgttttcagaattattttcagacaatactgtaaatttttatggccagaatcttagcatttgcattttttatgccagatatgcattattttgatgtctaggttccttcatcttaaaaatacagttcatgccaagttttgggagattgatcattaagcaagctggcgattaagcatagcaacactgaatgtatggatgtaaccattcagataggtggttctatctaatatgtccatttgttttttagaatgataaatttttaataatttttacaattcctttaatcaggcagcttcttctataggtactcaggacagtttagtttattgattgttgcttcactttttgctgtcagaacttgtggatgtctcttttctattctaaaaggcagtttttacagcaacaaatagcatgcaagtaaactataaaaatgtattcagcaaggtagggtgactcagcctgcaatcccaacattttgggaggccgagatgggcagatcacttgaacccaggagttcgaaaccagactgggcaacatagagagactctgttctctacaaaaataaaaataaaaattagctgggagtggtggtgtgttcctgtagtcccagctacttgggaggctgagatgggaggatcacctgagcccagggaggtagaggctacaatgagccatgattgtacccctgcactccagggatacataataccctgcagtgcactccaagtgcaccctgcagcctgggcaacagagtaagatcttgtctgaaaaatacataaataaataataaatatgtttttatttttactgcatattctcttctttaataagttgttctacatttcatttttctttattacctcttttaaaactataccactttctctggtctttctgttgtttgcatttcatgcctttgacttttcttaaccctatggaattctgacatacttacatggaacacatatattatttaattcactacatgtatatatcatttattttacttgcctttaagaaattacttctcacaaaaaaaagaaattacttcttaatttcaatatgtttcatgcttttcaaggaactcaatattttcacttaggcctttttttccgatttatttttgtaagaaagttaaatctatgtcaactctaaaaatactttaatccatttgtgctttaataacctcattaaagggggaaggagtaatgaagtgatgtttctacttcattaaatatactagtagtgagaactacatatggtggttttataattgttattattcacaactacatcctgaacatttctgaaagatttatagtgattagcaatattcttcttttcaagagagaaaaattatggtatgaagagattagtaattacctaaagattttattggttacttataccaggagtaggctagaactgatatctactaaatctttctattaggtagtccattaaaaacaaacaaacaacaacaaaaaaatttctgtaatttgaccttatagtgctatattgaattgtactaattatgatggctttatcttcctttgactttcagatccaagtaatacctgtgcatttgaatctacatgatctaattgtgtttatacttacgtctttcacaatttttactactattgaggttgtttgtataaatacggtaaatagatctgataacaactcatagctcaggaatttatatatggtgttaatgagcacaagattagtgattcaaactacattttagttccattttataaggcttcaccttcttctcaaccagacagtgtatctggactgtatacaaagagggatggatgccaactgtgaaacccagttttgaaatgtgtttttgttaggcaagatgaggaccaaaggaataaaatattatgagatggtggggaggagataaatgtctaattcctagtctaaggaaatatgtaagatggtggaaccagagtcagaatccaaggaagtctggggccaaagctgacagaagaaacaaataagatgcaaaagcaaaggatttaagatgtgatcagcatggaataatctgggagaggatgctgtcatttttactgccagtccttttaagggtccaatccttcttatcagggatacatctgcccattttaaaaacatcatatttagaaattgcattctgataccagacatcttatagaaagttgtgcttagtcatgcctggagtaggtgagacagaaagaatgagtagttagagtccatgctcacttttagaaaaaagaattcaaagcatatgcactactttgagtgagtcagtattgtcgtcttcaaatgcaaaggataacaagtaatttctccatggccagggttgataaaaagtgactcatgtcaaagatttatcttttttttctccaggcatagtgtttcacaaaaaataaatctatataaactgcaaaagtaaaatgttcatatatggacaactaaaagacagtgtttatccattccattatagacattgtacaactatgagtcatagtggcaaaatgacaagttttccactgtagcatctaagatttaaaaataaaagaaaattagaaatctcaaaaataatagtagattgcaaaataccttgcaacattttttgagtcagccaattactagaaactggaacatatgtttatctgagaaatacctttcagctgccttcctccatggctgtaagatacattttgcactacactgcaatacctataattataggactataattttaggattggaaggaaccttattgatcagttagttaatcccttcttttcacagctgaagaatctaacaactaaactggttaatgaataaatagtaagtgaagtctaataaaacatgtttgaaggctaatagcatctatataataaagactaaatagatacacattcaaaatatgacttcactgttgggcaacataagacagctagtggagaatttagatttctctctttctaactgattgtcatgtcttatggaggaaattctcaaagataatgttaacatatgttgggataaaccctttctgctttacctcttcttgttatctttttcttattttagattgtgtagtgttacagatatatttgtataaccagtggtatattttatgtactctatgaaatttctcttctctcaagaaagttgtagactagccatatttatcttaggttgaagatcatatgttctgttttgccctggacatttctggttgtcatagggtagtagttaataataccctctttcacttttcaaaatacctcagtttgaatgataagttatatgtccacccttgccttaggtatagtctttataaaaaaaaaaatttaacttttattttagattcagggggtacatggacaggtttgttatatgggaatattgtgtgatgctaaggtgtggagtttacgttatcccatcacccagatagtaaacatagtatccaataggtagtttttcagcccttgtgtccctccctctcttccccttctggtagtttcctgtatcgatcgtgcccatttttatgcccacgtgtacccaatgcttaactcccacttataagtgagaacatgtggtactcggttttctgtttttgagtaaatttgcttaggataatgacctctagctgcatcctgttgctccaaaggacatgattttgtcctttttcatggctatctaggattccatggtgtacatgtaacacattttgtttactccatccactattgatagacacctatgtacagtctttattcactatttaaaatagatttatgggattcatcaactgtgcataagagcatttgggtaggtgaggaggcattaatgaaagatggtccagacacaattccaatatttagaaattggtatctggttggggagagaataaatactttaaatgattaagacaacacctaattcagtgacagaataagtgatatgcctgaaaaatctaagagttctgagaaataggaggtttgagggctgaaatgatgagcattttccatcttctctccactctgtttaacatttccttaccccatgggtatctcactgaaggactcctgtgacctgaacctgccttttctgtctctttttcactttattgctctctgtaagttagtgtgtctgctatgttcccattgcctccaacattaaactctcataaaagttttattttcttttactttgtgaattcaataaatctactagttactttgccacagtgatccgggcttatggctttacacgggtaataatcattcatatattaagtggctgcccttatactcagcaaatctgttccttcaaagtgaacttttgcagctattgatttctttccctagttcttgtaccttttaccaaaaagttggatttcccaagagcaacaccattgggaaaacattttagtaattgattgcgatatattttgaaggctatgtgatcttagttctgtgggattccaaaaatgttaattatagagtcctctctattgtaatttctgaagtatcttctctaaactacctccactgaatctgaattcacattgtcttatagtagaagaagatattattcaaatgtttaggaaatttctcaggaaacgataatttaaccatctgtatttgccttgtatatctgtgggacaatagacacattgatttagtatttttcactgttttttgtatagaagacatttttcttttatgttcttgagtaaatcatctcagaaaagatgtaatatttttatgttacaggtagcatcaccataagaatggctcactgattagttttgacttaaatacatgtttaccttagctatgctaagattaagtgtacaattttaatcttcaatatctgtaggcttccaggtttctggacagaattcaagagagtatcattttgtactggtcactgacagtccaaagactgtcgttaactctgatgtttttcaaatgacatattgtgttcacctgaatgtttgacccaacaaggaaaatgaatatttattccatacatccttaaagaagggaatttttcttttgcttttcataatgtaaattacatgatgattgcataaagttttcattgagattagtttataacaatttttttctataaatttaattaataaaaatatctaaatcttaaagtcaaacaattaattttaaatacagccattgacttttcaggacttttaaaacctcataaagattaaaaactgcacttatatatataacagtgctaagataggtcttaggtaattgtaattttctctttataggagatttgaagaataatcttcctatgttggataacgctttatgcaaacagtgtccagagaaaagatataatcctcattaaaagtggttgtgcttgcttagcctctatgtttaatagaaaatcaagacttgctagtgcaaagatagtgtctgttgattcagaagattatagcagtgattttccagaagctaatgaaaggtactaaaatgaattgataatctaactggtgcattttaaaacgcttaaagagaacttaatatataatgtcttcatgaattgcttctagttctgttttaataataaactcgtaactcagatatgcatacaaacaggaatcaattgggacagcaatgagcataaacatttataatcacttgcttttataggaactaaacctatgacagttatatcgatgattagagtacctacacatgaagacaggtagaaagtagaacatacatccaaagtaacatactgtcaaaaatatccaagcaatgattgcatatttgaacaatgtatattaaaagattataaaattatgtgagcagtatgtatttttagcattttatatgcacaactatcttctgtttggtcaaattacgtgtcttttatacacgctaaaaactgaaaacaacatggacaatgcaaaagaataagtttatgtttctaaataaaaacctgtacttgttaatcattttgttttttataacatctccacaacataggaatcaagtcatgaaagcagacaaagtgatactatattctgaagttattatgctgttggcctgactgacatctgtagacataaactctctacctgtttgaaagtattacagatattaatttttaacaatatttgccctaacttgcatttttctctttgtttttagtatctgacattttatatgtctcagattaaatattattttgtggtggtaaaatgtaaacattatttttatgaattcattctcatatatatacaatcacttaaatatgtattgaataccaggaaataagctatatttaacaagtgaacacattaatttcccaggatatgtttattgaaccttatgagactattaattctgatttatgtgctccttatgtttgatacacagaaataggcaaccctttggagaacaaaaaattagaagaaaatagatgctataattcatatttcaagtagtactgtccccagtaatacagagctagtgaaaatagcgcaggatgcttgatactggagtgtactttaaacaataaattattggagggcatagaaacctcatcaagacagcaagtctgcaaagactccatgtgggcaacctggccttgctctcctgtgctgctggtcaacttcctacagctcagctggcattgctcaccagacaagtacatgataggcatatcacttgttgtacattatctttcaactttttatcttttaataattttctggctcattgttacatttcctgtgagaaaaatggagttatttgaaagtttagtttcagtggtttttcttgtggctataattagggtgcagtccacttcccattgatctgtgcacagaatacaaaatacataagagaagaggtgataatgtgaagtgagaagttaaggggaaaatggccatgcggcttctattatagaaatgagggcttaaacacatacaatgacatagcctatatataattgagagttatctatgtgcatgagaagcaatgtgtatgtatgcatatatattagcggtgggaactgtacacaggctaatgtttagcacaaaaaatgataaaataattatttttattaattaaatgcatcaaagcctaattaaggaatgactcatgtgcagatgattatgaataaattgccaaatagaacctgtccaaatgcagaaaaaattgattttaaaataattcatataattattttattgagataatcaaaaatatctaatttgaaagcaaaatgaagatatttgaaataatttggttaacttatcacatataattattttattgaggtaatagcaagtatttaatttggaagcaaaatgaagacatttgaaactagtttggttaacttatcacagctatggtataatttgagtcagaaaactgacatcaactaagtaacaatagtatatcaaaccattgagtatatactatgtgctaaataaaacatgtatgttatgtcattaaattctatcagtaacactgcatggtagatacttgcatttccgtttgatacaagagaaaacacaacttacccacatcacagtagagtgccacagccaaaatttgcagctgtatctctgacatcgtgacatttattttaaaaagagaaaatgaaattagttatttatttaacttaatagagtggttgaaagcatgggctctaaagaaaaccagatggttttaaattctgacaggcactcatatactagctgtgtagtcttggttacttaccttattggagcctggattatctaatttataacatggagataacaatacacagagtaagcactcagtgttgttattattaagatatacatgttgccttaattgactgaaatatctatgacaagtgtaattctgttgatatttatctggatattttaaggtatgttttatttgtcttccaatcaggaacatggtaaccataacctgcccaaccccaaactaataactgaggctataaaaagtaagagtcacttaccatttcattctatgcagtttcctgccttgaaataggtgtcttatggctttggttggcaatactgttaatggaatatagttgtattaaaagcaatttttttttgacaattctttgttagcagtcagcaactaaatatattaagaagccttgttttgcacactcttccaaccacagaacactaaagatgtatatgttataattacaattatcctttctcttcattgtcctgctgaggaatgcactgtaattctggcagctagagtagagttggcttgctttccttggattgcagatgtctaattgcaggcaaccatttcatttaaaatggctcattaaagtaaaaaccatttagcatcagtaacatggatcagcatccatgattatgcatttaattagagagaagtatgttttctcctcttttctaatttttctatctatagatctacctatgtatcaatctatgcatctacccacacacatacacatagatgcacacatgcagatttatacaaagcttgccttagacattaattttatcattttgccatcattgcaactccttggctaattgttccatggagtatgtatagaacgtactaattatgaaattatagaatatattgttactcaatattagtaaattgcatattgcacatataggaattttctgttttgtaggcttttctagatatgttatattttaccttagtaaatgtccttatttactaactgaaatattacttgtttattatcattccaaagaagcgtcatatcctgaacgctttagtttactgatcactgaaataagaccgtggtgtgggaagagagagagagagagagaattccaatttttctcattctcatgcataaaagatcaatcatagaagcatagttttgatgtgatgatatgtcctgttatttgtattgtgaaaatagatttgtctaacaatatttgttcggaaatagaacatttggactttttaagcattacttttaacaatatttttaaaaatagtcaaaaaccacaggcattatctatatcataattctactaaacagcagtgatgagtggcaattagttgtttattgagtcactgtttacataattatttgtaagttatttgtaaatggccttaggttttttagatctataaatttcagtgaataaaatataatttaaaggctttcataatattaaataagaatgaaccaggctgtcttttattagcttatttttcatttcattagagaaaaacacagtttactttggcagaatctagatatgttgatgtactttatcatgtccaaattcgaggcagtaaataattttctgtagagagcccctagtccttaaagagtagactaaatcaacaaaggatccagaagtaaaagtcagaagctaaagtatatttgtgcatttctgtgtcagtaagaaagaagttaagactgagatataaattaagaatacattatataaaacctgctccagtcctgtcctgtaagacagccaggggatagcctcaagagttcaaggttaatgggtctctatgggaagtatttactttctcactggatttttaaattacattcccttttttccccaccagtactactgaagtaaaaagagaaacaaatgaacaaaaacagtgctggcaggtatgctatttattgcccaatggaaaagttataaaatcattgttattactgctgtataataattgatacatactgcttgatatgtgccattgttttatgctggtcacctttcacccttttttgtttttttttgtcacattcttgatatagatcataagcaagaaaagagacaagtgaaagtggaaggggaggaaatagagaaaagataaagagataatagagaaaagaaagagagaggaacttcaagaagagagaaacatacttcacagctgggcaagattcagatttttttttaaaaatgagaggatcaaccatgatttgagagaataaggatacaaagttagtgtttaaaaagagtgaagagagaggggaaagagttgttttgagtttgaagtgttagtaaactatgcttctcacacactgcgatttacttgaatgttagtcgtcaaagtgatatcaaatcttatcactgcattgaaatgcaaaatagatgattgattactattcatagttcttcaactttctttctaagcaaattttcaagtacttctatgcagttgcagtccaagtagctaagtcttagaaattatctgagcagtgaagaaagtattactcatctttaggaaggaatacatttaaactgaaagtgaaattgtgtctctttgatcaatggacaattccaccctaacccagttgctaaagaaactgttttgatgcctttatttttcatgcctgccctcagttactctattgtttttatgctgagtgctacaaagggaacgaccatcaaaatctctttgtactaagaactttaggaaggagtgaaaataatgtataaacaaagcttctgccctagttcattataattgggaaaataaggtaaatgcgattatacaatttcaaagactatataatgaaatagagtgtaagttttagaataaaaacctggagaatcaaatgacaaaaacatttgcacatagggtttcttttagggagtttggaggcaaataacctataccatacctattatataaggcacagaatagataatagtgtttaaataaaaagctataaattgttactcttatacagatataaaaatgaacacattttaaatgttttatttaactcacatgggaaccaggaaaatgttgtaatctattcaaaaaagaatctaaggaacagacacatgtatagactaggaatatgcaaatggcatcaaaatattttccacaaaaaagagtatgaaagtcacttaaaacctctaacagacaagacagaattcataggtatgtcagttacctacaatttacagaatcttaaactgtatcccatagaaccataatcttggcctgccaagaccaagagtgctataaataatacatagttttcctaggaattacaaatcttttctcaaaaatagtaagggcaaaaacctagagaaccataataacactcatttcatcattttcaaatgagtagtgaacagcgtatcttgaacattacaaaagatagaaatcctaaacacaaaaattattatataatacatttgtcagttctttgtgtttatatgcacacacacacacaccttttttttcctagtgtgataattgctttatattttggttattccttttacatcaaacttaatatttcacataatctaatcaattgatctagtcctttgggatgatgtcttgtctttgttctacagatgagacaatcaacttcctatttggattttaaagaaatacgtaagggtttgattaatgatagagttcctgggtagaggaaatgatatttttaaaaaattaattagattatatttttaggaaacattactttattgagatttttacattaagtgataacaatcatattttttttagttttcaaaagagaaaagacttggttgttttctactactattttaagggttagttttttcatcaaagcaatatatatctttatttcatggttcatttttataaaactcgattacaaataatgcgctgtggaatttttcccaaggcaaaagatcaaatatagagaactggccaaatatttatactttgcctctgtgttttcattaatggaatttttattagaacttaatatttgtttatttttgcattttggaaagaagcgtgtctaaatccaaacctttctcttacattacccttttaaaaagccaagtaaatctgagcattcactttcctgctcaaaaccttgcaatcatctcctttactgaagtccaccagcctctgcttgatctgccctatgcagactcatcctccctatctcctcaccccactccttgctttcttcttggcttgcaaacagctgcctcttgctgggttctcccatactggagagaaagagagagcaaggtctctagaattgcctcttatgaggataataatcctatcatgagagtcccactctcaggatcatatataataaatcaaatgactttccaaagtccctaactctacatactaccacattgggaaattaaggcttcaacatatgaattttgagaagactcaagtcagtcaatagcattctgcccctgacaccccaaaattcatgtcctcacatacaaaatacgttcatttcacccaaatacccaaagtattaacttgttccagcagcaactctaaagttcagagtctcatctaaatactatctaaatcagatatgggtgagactcaaagtattactctttcctgagaaaaatttcctttttatatgaacctgtgaagtcagacaaattatatgctttcagaatacaatggtggaacaggtataggataaacatccccattccaaatagaaaaatagaaaagaataaaggggtgggagtcccaaacaagcccaaatcctaacaaggcaaatttaggcctccttcattctgtcttttttactatgttccttttagttcaaaactggcagtgttgctggcataatcctgtctttattcctggactctgctggaatggctgattaacttcatcacagtcattcatgatttctttattaaagttttagccacatctttaatgttctcttcagaacaagctttctctctctctctggtaatatgaataggctgagaattttccaaatcttcaaggtctggttcttttttgcttgacaaattcctgatttaattcctctttcttttttttttttttttttttttttgtattttattataagcagtcaggaggaatcaaattagctgcttcttcaatactttgcttagaaatctcctcagctaattatctagtttcattgttcgtagtccttccttccacaagacactaaaacatagttcagccaaatcccttgctaatttgtaacaagaatcacatttcctccagtttctgatatgtcctcatttccatctgacacatcaccagaattgcccttaacactcatatttttatgtttctttaaaatttgttttaacttcctattatcaccacttaattaatgcccatatttttagtatgcacttcaaattcctacagcctccacccactactgagttccaaagctgcttccacatatgcaggtatttgttacagcagcaccacactcttgttaccaaaatctgtattagtcaaagttccccaaagaaacagtaccaacagataatatagtacaagaaactgactcaagcaattatggagactaagaagttccaagatctgaagttggtatgctggagacccagaagagttaatgttatagttccagtctaaaagccagcagactcaaaacctaaaaagagacaatattgtagcttgagtcagaaagcaggaaaacattaatgtctaacctcagggcagtcaggcaggagaagttctctgttcagcacatgagggtcagccctttttctctatccaggccttcaaatgattggataaggcccacctataatacattagggaggacaattactcagtccactaattcaagtgttaatctcatataaagacatacccacagacacaccaagaatcatgtttgtcaaagtatttgggtacccatgaccctgtcaagttgacacatataattaaccatcacagggagcctagaggtaaagaccttgggtggggggaattatagaaagaggctggagcagatcctacagggccctgaaggacacattaaagaattgggaacttgtcctaaggaaaatgacaacccattggtgatttttaaggaggtaaataaggtaatctgattactattattattttttaaaaggacatgaggaagtttgggttgttgagaggaaaggcagagagaaaggtggtactgtagttagaaattgtggtttgatctcaacttgtcttcatggagaagaaagtggagttccagcttgatccagcttgtcttcattgagaatgggagagttttgaaatatagtgagagattgatttgatatgaggagagaataaaagggagggatcaataatggtggccagtggctagatttagcaaatatatttgtagtgtgtgatttaccacaaatgaagaaagaaggaagttttataggaagaggatgactttagttttaggtttatgaagtttaagtggtgcaggtctgaggtccagaggtgtagtctgggatagacttacatgttgtaacaggccaagatttcctaggtagagaatgtaaaaaatgtagcgataaaggatctgatgaaaaggcacccagtatttgatggatagaggaagggaagccctggaggtaccatcaacttttttttggctcctattgtattcaatatgttgacatttatacaatatctcagaaataacagggtttagaaaacatactgtattagtccgctttcaggctgctgataaaggcatatccaaaagtgggcaatttacaaaagaaagaagtgtaatggacttacagctctgcatggctggagaggcctcacaatcatggcagaaggcaaggaggagcaagtcacatcttaggtggatggcagcaggcagagagagagagcttgtgtagggaaacttccatttttaaaaacatcagacctcgtgagacttattcactatcatgaaaacaatatgtgaaagacccatccctattattcagttatctcccaccagattcctcctataacacatgggaattatgagagctataagatgagatttgagtgaggacacagagccaaaccatatcattcctccccaggcccctcctaaatctcatgccctcacatttcaaaaccaatcatgccttcccaacagtccctcaaagtcttaactcatttcagcactaactcaaaagttcacaatcgaaagtctcatctgagataaggcaagttctttaggcctatgagcctgtaacatcaaaagcaagtttgttacttcatagataaaatggtggtacaggcattgggtaaatacagtcattccaaaagggagaaatcggcccaaaacaaaggggctacaggccccatgcaagtccaaaatctggtggggcagtcaaagctccaaaatgatctttttttactccatgtctcacatccaggtcatgttgatgtaagatgtgggttcccatggtcttaggtagctctgcccctgtggctttgcagagtacagcctccctcatgactgctttcatgggctggtgttgaatgtctgcagcttttctaagtgcacagtacaaactgtcagtggatctatcattctggggtctggaggatggtggcccttttctcacagctccactaggcagtgccccagtaggggctctgtgtggatgttccgacccaacatctccctttcacactgccctagcagagtttctccacgagggccccatccctgcagcaaacttctgcttgggcatccaggtgtttccatacatcttctgaaatctaggcagaggttcccaaaccgcatttcctgacttctgtgcactcacaggcttaacaccacatggaagctgccaaggcttggggcttgcaccctctgaagccacagcctgagctctacattggcccctttcagccgtggctagagcagctgggatgcagggcacaatgtccctagactacacacagcatggggaccctgggcccggcccacaaaaccagtttttcttcctaggcctctgggcctgtgatgggagggactgctgcaaagacctctgacatgccctggaaacattttccccattgtcttggggattaatattcagctccttgttacttattcaaatttctgtagtcagcttgaatttatgctcagaatatggaattttcttttctattgcattgtcagactggctgcaaatttttcagacttttatgctctgcttcccttattaacagcaccccagtcacctcttgaatgctttgctgcttagaaatgtcttccaccagataccctaaatcatctctctcaagttcaaagttccacatatctttaggtcaggggcaaaatgccaccagtctctttgctaaaagaatcaccttttctccagttcccaacaagttccttatctccacccgagaccacctcagccttgatttcattgtccatatcattatcaggattttggttaaagccattcaacaagtctctagggagttccaaactttcccacattttcctgtcttcttctgagccctccaatctgttccaccctctgtctgttaccaagttccaaagttgcttccacattttcagtattttttcagcagcaccccactctactagttccaatttacagtattagtttgttttcatgttgctgataaagacatacctaaggctggtcaatttacaaaagaaagaagtgtaatggacttatagttccacatggctggggagcctcacaatcatggcagaaggcaaggaggagcaaatcatatcttatgtggatggtggcaggcaaaaagagagagcttgtgtagggaaacttaatttttgaagtcatcagatcttatgagacctattcactatcacaagaacagcaggagagagactcgccccaatgatttgatgatctctcaccaggtccctccacaacatgtggcaattatgggagctacaagatgagatttgggtggggacacagatccaaacaatatcacatggtatcatggtgaaaaatgtaatgaaaccatgactacatttgatctttaggtttgcactatgttttaatgagcgtttcaacttttattgcttttatgttgatttttacatctgtctacaaagtgattttttataggcttttggtttttttggctgtagatgtgaaagagaatggtgcattgtgaaagaaaaggttgaacaaaaatcaattcatgtcagaattgattaaaatcaggaaacattttcaatgtcaacaggatatttaggatgagaataattaaatgagctctggaggcaaatgaattattgactacttacaaatatcaggcctaagaagatagagattgagacatatgtcttcttttttttcttagtgaagagaaacagacaaaactcttctaatatgtaacttggtattaaaccattgtgaggaataattaggaaattatcctaacataggaaaaaatatacaattgacacattaaatgtcaattgtaattgacaattgtcaaatgtcaattgtaattgacaattgtcaaatgtcaattgtaattgacaattgtcaaatgtcaattgtaattgacaattgtcaaatgtcaattgtaattgtaattgtcaattgtaattgtaattgtcaactacatgtatatatgtatatatactcctgaaaataatctctctctttaattcttttcagaagcagcttaaagttacatggagaaaattcttaagtagttgatattacaatgtcaacttttgcctattttcagactttgtacttagatactatatgcaaattgcagttttgtatttttcccctgaggattgttctagtgttcccacctgccctatcttcacagctttttttatcccattcctactttatcctttgagacactggtctcattcattcactcatccattcattcatttatatggtaaatattaagcaagagtccctattttcacaaatctgacattgttgaccagggtttctcaaccttggcactactgacaatttggctagataactctttgctgtgggggactgtcctatgtaatgttggatgtttagtgacatccctgttctctacctaatatacgctgatagggcccaaataaatgtctcttgggtggcaaaatcaccctgtgtaaagaaccacagtttgagagagaagaaagacaataaagaaaaataacataacacaatattagtgatgataagtgctgtgaagtaaaatagaaaacgggactgtggtaagagtggcagcaggagcaagggttctaaagctttctcaaggacagcagtctgcatagcgcacagatgtagaagccttgtttctcttttaacagatgtctatcattcactctaaacctgtctatggaattgctaattaaggcaagagcctgatgtattacttacatgattaaattatttctggttcttgactatttacaaaatgtcacagtcacagtaagatttttttgaatatgtcaagtttctcaactgaatagaacattaataacttcaaatggactatcgcatgctattgattttactctcttgtttctgccactggagaacacgaacatcaataaatcacataggccctcagtgggtgattggagggtatatttatttaaaactcttccattaatttttgtttattacattattcaatctatcttatagctggtctgccatttttgtgggtttcagaattgtgaggactcttaatgggaaatgctgtgacactgtgataaatgaaagagcagtggacggtgagtagcacacttgggttctcgttcaggctctgttattgactggctcaaggaccctgggcaaagtacttcacctctgggcagcttctcttaaataaggactagtctaccttcttaatttatttcattgtttttaatgaagaaatgatatagcaaatgtaagataatcttttaaaatgttatattttttctttaaaaaattaggtaattataaggaagatttatatttctcagatattcttgaagttgaggagccacaattgtgactgtttccatcacttgatgtttcttctcctctaacctacttaaaaattgcaggcccctgtgctatcctggtaaatctccctccagtttgccagtatgtgtcatgtttcactgcaaacctcacacaattttctgtaagacatggcctaacccgaaaagtataaggaggctgttaaatctgtggttttggagcagggattttttttttcatgatcatcccccaccctcaaagagcctttatagacattgttttcgtagttgctcacctatgaaatgctaacatcacagatttatcccctgccctccgcagaatcaactttgctctctgggaatgatatggtggagaaagggaaagcgattgcctgagttgagaattcatgtttgactcaaagttaagttggagtctaaattcccagcagctttttggcagatccaacccagtccaaatctgctgtggctgtatagtgtgggacactggctcagctggccggatctggtgttaaatccctgctctctgcactggcttatccttcccaaatactccatgtttctgagtggttctttggctataaaatagcattgtatttcctgttcctgaggttgttgtgaggactaattgaagtaacatataggaaggttgttaacagtgcatggcagatgaaaaacagaaatgttcattattatttatacccaataacagcaatttttaaaaggaaaagggggagaggagaactaatgcttttaagtccacaactgcattctacatttgtgtagtggttattttcactttatttttaagctatgttcagaacgtaacttttgctcttgtttttctttgttaggtttgaccccatgtttaaacatacgtattagtctgttttgtgtttttataaaggaataccttaggctaggtaatttataaagaaaagaggcttctttggttcacagttctgcaggctgtacaagaagcttggctccagccagcctctgcttcttgtgaggacctctggaaactttcaatcatggcagaaaaggaaggggagccggctggcaagaaaggaagcaagagggggtggtgccaggttctttttaacctctagctctcctgttaactaatagagcaagaacttactcattagcatgggtaaagcacgaagccattcatgagggttctgcccactgacccaaacacctcccactagatcccactccaacattagggatcacatttcaccatgagatttttgaggggacaattatccaatctatatcagcctgacatctgcaaatttaattggcttttatgcttctcactcaaggtaaaaaacagaaacaataaacaaataaaatacaaccactactttgaggaggacaaggtcagggaaagccacaagcatgcaagtatgcaactaggaaatttccctgaggacactggttgtcaaccttgactgtataatttggactgaggtatggcctaagtgttggaattttaaataattcaccaaatgattctaatgggaaatagggtcaagaactaccaaatattcaataataaggaatccactcaaatagaccaactattactagagttttcttaagttctctgttgaaatccagatacacttgtctgcagaattcatctgttaggaagaaacttttcctctatgatcttaggttcaaatggttggggtcctgagagttaactgacgatagatagattagcagaataaaagacagtgtttatgtatatgtacattgcaaaccctcaggagtactcagtgatgagtaactcactgaatcctcaaaattaacattttatataccattttaacaaaatgtatttttttaaaagggcatcagtggaaacgtatggaaagtttattgggctttttgatgctaatgagaataggaagcctgtctccatggcagctgaattcacaggaaattccttgcaggggagttaatgggagctatattttcaggacattctgctttaatcagataagggatgttcagataagatttctttttcattttctgtagctcaaatgttttcacttgaaaataatctttatgctaaaccgtgatctctttacatgtgataactcttaaaatgagaaaatgacacacaactacaccaaaaaagcaaataatttaagcatggcattactgagtgctcattatgtcccagttttatttaccagggccaagtaatgtgtccaaagttaacagctaataaatagcaaagctgggagtatgcccaggtttacctgactccaaggtcaacactctgttataccacactgttcttaatatgccctagtggtaacagcctctctttagacttctactgaggttaataagctatcatacaattctgcttaagaagattatcagaatatacttttttctatttttggaaaaagcaaatgtatatctttttaatagtttttagcttcctagcagtgacagtgaaccaggcctggtgtgcctgttacgcagtatgccaatcactaaggtgacaagtttgcagcagagaaagagtttattcatgaggcagccaggtgaggaggtgagaggacaggtctcaaatctgcctcctgaagatgtggtttagggatatttgtgggataaagaatcagggtggactaaggtgtggggtaagatgattgaggtgtcaacaaaaagagtcagactctgtaaaatatttgcagagatttactctgagccaaatatgagtgactgtggcccatgacacagcccttaagaggtcctgagaacacgtcctcaaggtggtcggggtgcagcttggttttatacattttaaggaggcatgagacattaatcaaatacatttaagaaatgcattggtttggtccagaaaggcgggacaatttgaggcaagggcttccaggctatagataaattgaaacattttttagttgacaattggctgagtttgtctaaagacctgggatcaatagaaatgaatatctgggttaagataagtggttgtagagaccaaagttttaccatgcagatgaagcttttagctagcaggtttcaaagagaataggctgtaaaatgttttttatcatacttaaagtctgtgttgatgttaatgccggagaggtataatgaggcatgctagaccccccacttcccatcatggcctaaaaccgtctctcaggttaaattttaagagccctggctgaggacgaagtccattcacatggttgacagggggagattagaattttatttttggtttagagagattaaggaaaagtgaggtaactggcgatctatacgagcatagtcaagcttcgtggctctttacgggaatcatgtttacaaaatggtatttgttagcatgattttagggtggagtttttagtccctggacaacaaaaggtcacctattggacatttacaccagcccaactggagggttagtggtttcaaccagcttgcattggacaagagctgaccaagttcctgaaaaacaacttaaacaatcgttaccatggtgacctacacctcagcgatgttataagaaagttaggaaaagtttagtttatatcgcttagctatgtgacttttagctatataagttttaaaatcaactagaagcaagcagctaaaagcaagccagatgggttaagtttggtgggcctaatcaggtcagcccttgttttaagcagggtttaatccatcttatatgaaaaatttcttaacacgttgggatgcaattcacttctatatggaaacttatttagaccagctaatagctgtcttcctaatgcttctttatcttggcctttagaggcttccttccatagttttttccatagtcttttatctacaccttgttctccttaccacagagaaagtaatcaaaatggagttgtgtggtcttgtattctccttctggtctttaaaaataacatcaaccctcaatttcattcatgataacaagtgccctatgtagtatgtcctatcacttccatattttttcttactttaaaaataattaaaaatttcagatacttaaagcaagtgttaggtagccattatatttgcttaatatgagtattattaatttttaaaaaacgttaataggttttttgggaacaggtggtatttagttaaatgaacaagttctttagtggtgatttctgagattttggtgcatccattacctgagaagtgtacactgtagcaatatgtagtctttttttattttgagatggagtctcactctgttgcccaggctggagtgcagtggcatgatctcggctcactgaaagctccacctcccaggttcacaccattctcctgcttcagcctcctgagtagctgggactataggcgcccgccaccacgcccggctaattttttgtgtttttagtagagacggggtttcaacatgttggccaggatgttctcgatctcctgacctcatgatccgcccgcctcggcctcccaaagttctgggattacagacatgagccgtcgtgcccagccagcaatatgtagtcttttatcccttgccaaccgctatcctttcctctgagtctccaaagtccaatgtgtcattcttatgcctttggctcttcatagcttagctctcacatattagtgagaatatacgatgtttggttttccatttctgagttacttcacttaaaataatggtctccaattccacgattccatccaggttgctatgaatgccattatttcattctttattatggctgagtagtattccatggtgtgtgtgtgtgtgtgtgtgtgcgtgcgcgcatatatatatatatatatatatatatatatatatatcacaatttctttttctttttctttttttttttttttaagatggagtttcactcttgttgcccaggctggagtgcaatggcacgatctcagctcactgcaacctctgcctcctgggttcaagcgattcttctgcctcagcctcccgagtagctgagattacaggcacacaccactatgcctggctaatttttttgtatttttagtagagatggggtttctctatgttggtcaggatggtctcgaactcctgacctcaggtaatccgcccaccttggcctcccaaagtgctgggattacaggcaagagccactgcacctggcccacagtttcttaatccatttgttgattgatgggcatatgggctggttccatatgtttgcaactgcaaattgtgagcactgtttaattctaagcttccttgtaggtaaggcaaaaagcaagcaaagtattttaggcaattcccataactaaagggaaattatttattatatttgtccatttgaaaagatattttttcatgttgtaaaaaatttattaaatgaatgctaacataaggattaataaacaacatgatcttaacattcttcatggagtaatttagtttttttcaatttttgataaaaagctgaaggtatatcaacttgttattcagtgaaaggataactattggtagcgaaatataaacctgatctagatttggagatcaaaattttggatttatacactttagggaatatatcagaatgaataaccttcacatcacattgagtactctatgaagaatcagttacatgggctggacttttgatcagaccctcatagaaaacagctgagcatgatgggcctggcattctattgatgattaccaatacagtcatgtattgcttaaaaagcacctggccaagttatacatattataaaggctttttggtattctcgttgagatggattgagaaatattttatatatattttttgagaaacgttttatgtatgaataatagatgggcaatatgaaatcacagtataaaatttagttttctttcaactagtctcaaaatttcatgcccattacaaaattaaaactaagaaaaaaaattagccatgtttattttttctttttctgttgtcagtgttcttttaacaccttagctcttcagggtgctctccctgcagctatatttttagatgtttcccagtttctctcctcatcaggatcatttaatattgtaacacttcaatttttaaataactccattttaatattttgtgattgagctatttcaccatatgagaatcttaggtctttctgttttctgaaagttttgaaatatgacttaaagcttgaactaaatgtatggttatatcccacaattctcgtctcctaaccacccttccccaagattattcagaatgtcaagataacaaattatatttcgcggagtctcatcattccaacttcaccacgagtttttccttattgacccaaagtaactttactgctttctctgttgtctgaggcattaaattgccagccagctaggcaagtgaagaaattaatttatttagttgaataataattctaggagaattgagtactgttttttctgtctcctttctatcatttgtctaactaatctctctagcatttggtggtataaatacagaatagtcatctattttaatcatctaaccaggtagtgtatatcatcctcacaaatagtgcaacttagattccagtcttattgttaacatcctgctaccttcaaatattttatttatttattgagacagagtcttactttttgcccaggctggagtgcagtggcatgatctcggctcactgcaacctctgcctcctgggttcaattgattcttctgcctcagcctcctgagtagctgggataacaggcatgttccaccatgcctggctaatttttgtatttttagtagaggcagggtttcaccatgttggccaggctggtcttgaactcctgacctcaactaatcagctcacctcagcctcccaaagtgctgggattacaggagttagccactgcgcctggcctaccttcaaatttttgtctcagtggataagacagattttgttacccattttcttcttcaaattgacttgtttgttctattaagatatacattttcacttccactttctaatattgaatccctcagtttccctttgtaaatacatatgtgcatatgtgtatgcacacacacacacatatatactcccaaacacacccatatattctttattgtaataccccgcttgttgatatatagttatgggaggacaaaggtattttctgtaatatggttgtgttctcctatgaatgctttgggaaattccctaatgtttttctatctgtgtcatatctattatatttttataacccttgttaacattttaatattatttttattttcccataaattttatgtttaaatcttctgaattagatcagcagttcaccagagaaataagtcttccgtgtccctttgaaaatactttctaagtcacaaatccccaccaagtttggtatcttaaatcatgattctgccaccatctatataaccagctgctcagcatttttcctttcctaaatcacacattgaatgggaggaagaattttaacacttggaaccctttaaaggaaccctttagctttctgcctaggatgtcatgaattctaaaaatggtttgcatgtgtattatgatggcatcattcatacccacatgaatcagcaggcatggatagttgtcagcaggtgtgataaggcttggcagtttttccattatgtcctggatacatgctgcagaaaggcaatggcttttctgtttggccatgtcaagtctacataaaatttactcattctccttggtgaatgactagctttgttcaattagatagccttcattcttttctgaaaataaactgttatttcatcctaagtaattaatatctgaatttttgtatgttttggaatttctatgttttatatctgtaataaaattaagatatatgtacatcttaatttattgagtcaatattaatatatttctgaaataattcaaagattaatagcactattttataacaacattatagacaatattggtagatgcatcattcattgttatttggatgacttaaattatatcagaattactaaataagaattaaatattgataaaaatagagggaaagagtatcccatactgtgccatctttgaggtcacagctcatgaaagagagaaaactgcaaaacagactttatctttgggtattatttcacaacaatcttatcttactttgttctgtggttggcaggccgtgtgctatagaggccaacagccagagtctctgcaggaggatttcaaatagtgccaaatcagaaagagatagcagccaaagggaactgacattgcaattgctagaatttctcctgaaaatgttcatattttaggtaaaaataagcaaaattatgttactgcagtcactaccatgtaaaacaaggggcaatcttggttgggttaagttataacatgatgttaaaaatggaaagtacatatctgaaagatattcatgcagtcaaattaataaaaatgtcagaataagctatttcttattctggaggttgttagaaatgaagtagactaagatgcattctctgttagggaaagtcatgaaatacagtcataatttggttctataattcctttcatcaatttagcacaaaacagataattaaataaaaattatttagtagtgataaaatttgtattctgggagttaatcatccttgttaaattaaaggacaaattaatgttgggaaattctgggacagctaaaagacattaaaaaggacattaagtatattaattaaaccatatcaaattgccattttttggtaaaaaatggttgatatttataattacatatggttcaatttaggtagtatttaattcattatttacattataaatatttatataaatttatctttttccaccagactctgagtcctgctagtgcaggcttattgatttatgtatcaccagtatatatcacagtatctgatactctacagctgttgaaaaaatgttgaataagaaactgagactattcgccaggacaattgtctccagcagtttgattgactatcactcaaaatatatgtacatgtattgacttacaaattatgttctgattcattatacatgttacatcataaaacatatatatacatatattaaacatttttaaagataattttattttgtctaggaagaagacattggcttagaaaaactccaacattttagcctgacagtaaatactaaatttgcaattgcttggaaagaacaagtgcagtaatttaaatctggcttttcatctttcttattttaaaggaattgaattagggcaaagaaaaggaactaacttttattaagcacctggaataagaaaacaaatttatgtacattattaaatttacacttaacaaaggaagtattattttatttatatattgatttattttttgagacagagtctgcctctgtcacccaggttgaagtgcagtggtgcgatctcggctcactgcaacctctgccttctgggttcaagcgattctccggcctcagcctcccgagtaactgggattacaagtgcccaccactatgcctagataatttttgtatttttaatagacacaagatttcaccatgttggccaggctggtcttgaactcctgaccttgagtgatccatctgtctcggccccccagattgatggaattacaggcatgaaccaccacgcctggccagaagtattatttttgctaagcagaatttaaagctgaaaatctgagaagttagataaattgtccacagccattatccagttcctagttccagagcctggcctaaaacctggtctgaggtctggtaataaagcctgacatgtgcgtttccttcctaaaaatgatgatagtagtctatcaatgagggttaaaaaatggacatttttcataaatttatgcattttacttctgtatgacctgtatggagaaaagtgattttctctttttggtaaataagcaagactcctaaatcaaggcaactattcaatatttctaacttcttggtttcttttaatagcaacagcagtagcaacacaagctaactattgcttactgaaaacttgtgtgtgccagtttctttttttttttttttttttttttgtgtgagacagggtcttactctgatgcccaggctggagttcagtggctcaatctcggctcacctcaacctccgcctcccaggttcaactgattctcctgcctcagcctcccaagtagctgggattacagatgttcgccaccatgcctggctaatttttacttttttttggtagggacagggtttcaccatgttggccaggctggtcttgaattcctgaccttgagtgatccttctgcctaggcctcccaaggtgctaggattataggcatgagccactgcacccagcagtgtgtgccagtttctatgataaatatcgtacctaaagttgcctcatgtagccttcataattacccggttgaggtattatttttaccattttgctcttgtgaatactgaggcttaaagggaccaagttggccagtgttacacagaaggtaagtgacagggctaggatttgaacataagtttcttagactccaaagtcccttctctgtaatcacaataaatactgctgcccttctgaagagccagattttgtgatgtgtccatgatgcttcctttattttacccttctcaccgaggcccagataaatgtgtttgaaaaccattcaatcatactcattgggaatagtaaggtaaataaaagcatcaaaccttgtagaggaatcctttgtcctctcagtggcatagctagtatttcttccatggctagctgattaatggcagacaaagcagcatgcctattgcacatatctatagcacaagctatagtaacaagacttatcaatatctcaatgctatagcaagaaaaagcattcagggagaattatgcaattatttttctgtagtttctgactccttgatttgggaaagttagtagctgaatgctcagagagagagagaaagagaagggttgtaactatatagagggttaggttaagccttgtggattagctgcagttggacaggagcttggtagaggaataatagactttccatgttctttcattcaggcccactggctatttcattcaccgctttttaacttacatttcatgacttttctagaattaacagggcaaatggttcaaaatactgccagttaatttgtagataattttaaattctctcatcattgtgagatattgtggtacagtgaaaaaagtactatattttgaagcaaaacattgagaccctcttttaccatgtactaactgtaaatttgtaaggtcacctctattttctaaatttcttttttcttatttatgtatctatttcttctaaattttttgtagagatgggggtcccactatgttatccaggctggtctcaaacttgcgggctcaagtgattctctcaccttggcttccaaaagtgctgggatttcaggcatgagccaccacacctagctattttctaaatttcttttttttttatttttactttttattatggggaattttaaatatgtacaaaagtagacacaatagtaataacaaaccctcatgtattctacctagtttcaaaaattatgaactcactatggcatcttatttctttgtccttctcactttacttttccattttatatcatagtaaatccgagacatcacatcattttattgatacatattatgttttgtattactaaaaatatgggctttaaaaaccatatataaccaaaataccagaatactacctaaaataaactaataactttttaacatcatcaaatatacaatgatctaatttccaattgccttacaaacttcattttttcccccctaccattgggtttttggaatagggattcaaataaagtccatccattacaataggttgacattattttaccatctggattttgctgattgcaaccccatgataatcttcaacatgttcatctgtcctctatattttctgtaaattggtggttggttctagaggcttaatcacacttaacgttggatatgtttgtttgttctcgtgcaaaattacttcatagatgatactgtcttcttccctcagaaggttgttaatgtttgtgtctcttgtgatgttaggaaccagtgatgatcactatctagctttattaattcattaggggctaaatgaggagattctatttctttcactttctcctcacttattagctggaatatttctaaaagaaaaaccttccctatgtactatttagtttcccattcatacaatttcatgtagaaaagaaaaaaataaatgcttattttcctttatttaccacttttcaaaatgataaattggttctttatcatcttacaacaccttatatgttaatttttgtatcattacaaactataaataaatatatttattgtgcttcaattcttttccatgattgttctttttgagttttaattattttattttggtcattgtgaacctcctcaacgagcctcaaaataattttgactctgacctgtttctcattgatagtgtcttttgttgagtattaacacgattttccagaattatcttgtatatatttttgccccagccctaaattagcagtttatcaaagtagcttggtttctttcggtgggaattgttacatcaaaactgtaatacaggcactgtggtactcattgctttcgacttagtcacagttcataggcttctctgtagacaaagctggaaaatattttatttcatttcattttaaattataaaacccattaagagtttattttgataattccaactcaaatttagaactacaataatttaatcttctattttatgtctgtatctcctttccctgacagtgaaaaatctaggtttttagtgataacagaagtggtagaattagaatattatgtagtcatttgcgttattccaaaaacaaacataagagtctcagaataccaatactaacatgaacatatgttgtaactgtaataaatatgagcaataatattgcatatgtaagagtacacagtaaattcaaagctttgtacaaagttaagtagttttaaaatatcatcctgaaaatactgtagatgtatttccacaaatctccgaaagagaaaatattgttagacgtatgatacaaactgacaaaagaacttatattagaaggtaaactttgaattattggtctgcaatatggtaaaactgaatattttaaatcaagacaaaataagacgggctgggcgcggtggctcacgcttgtaatcccagcactttgggaggccgaggcgggaggatcacgaggtcaggaaatcgagaccacggtgaaacccagtctctactaaaaatacaaaaaattagcctggcgtggtggcgggcgcctgtagtcccagctacttggagaggctgaggcaggagaatggcgtgaacctgggaggcggagcttgcagtaagccgagatcttgccactgcactccagcctgggcggcagagcgagactccgtctcaaaaaaaaaaaaaaaaaaaagaaaataacacgatcaccatgtccaacttccaaaacacttttgctgcaatattcctatgaatataataagatttcctaagaagcaagggcattttaaaggaagaaatcattttgttctttcttaagatctagaatttaaactcacaatataatctgatgcattgtaagttatggagagtatgaagtctttgtggggaaaatgaactagatacgtaattatgaatacaatccatgaaaggtaactaactgtttccagatatacttaagaacactcattttatttctatgtctttacttttaaaggactctttgaacatcaataattactaaccagttaggttttatattaatattaatatgacaaaaaaagaaaaaaaaggaacagaatattagtgaaaatgtgggtcttctatttttgctgcatgataattgatagttttccaacatattaataaggcattgctggggttttctactgtgtatagtaatataaaatatttgtagcatagaatatattaaaataatagtacaaataaaatcaattgaaatacagtcttatgttactggatacaataatttgttaattaaaattatattaatttttaagactgttccacatattacatttaaaacttttaattaatgtttttgaattaattgaagctatccaatattgtaatttacatagatttagctatgggatgaagtataaagataaattactttttttaataaaaatggaagaaaatatccaattaatagttgctggagaagaaatatcacaatatttcttagataacttcttctcctataagtatatagtattgattacataaaatttatgttggtaaagtgattgatttatcttcttttattatgtattttcagaattcaagacttagttgtaaaagtattcatatgatgtaattagcttttacaaatgttaaacacaatcttattccaaaaggtatcttaatttgtatcaaagtaaatctcttttgaaaggcaatatgtgcctgagatatgtttgtgcataattagattgttctatctcaaagttgcttaaggaaacaaagctattatgttgtaggagacagtaaaatgatttaggatatgggttctggattctagttcagattttctgtcttacgtagctgtctgatttggggcatttcaattatctacttaatattttgtaagtgtttaccctacagtagacctatgctaaccaatcataatgtaaatgtaaccaaaagagctataatccttttccccacagaacattcagtctcacgagggaaatagacacacatgcaattactatccataaaatgtgatgagtgctatgtgaaggaggacagggtactaggttagcacatagctgaggctccttactcaaatcctggatgatcagggaggtgcagcctatgctaactaggaactggattatgggaacgagggatgagtgatccagatagcagaaacgatatgtgcaatggctcagaggtaagaaaacctggctcctgtgaggaaatgaaatgttactcggtatggatggatcatgggaatcagaggagtaagggatagcggaatgtaaacaaagacagatgaaaagaggctggactatgaagggcctcataatccacatgggagaatatgaacttgatcctttcagcgatgtaggcactcttgaagccttttaaaattaactctgcttgaattgtggccaatggccgacaccaacaggttgatcctgaaagcaaggaacaagaagaaaagacatgaaaacaagtcacttaaactcactgtcccttatgacaggattagcataaatcatttcttttcttttttctttttggtttttttttttttttttttttttgagacggagtcttgctctgtcatccagtctggagtgcagtggcacgatctcgactcactgcaagctccgcttcccgggttcacgccattctcctgcatcagcctcccgagtggctgggactacaggcgcccgccaccacgcccagctgattttttgtatttttagtagagatggggtttcaccatgttaagccaggatggtcttgatctcctgaccttgtgatccgcctgcctcggcctcccaaagtgctgggattataggcatgagccaccgtgcccggccgcataaatcatttctaaattcactcctagccatattatatgagttcaaaatcttttctacctagtctagactctagagagttttcgagaagatttttcctcatggagatataatgggagaaaatgagttccatcttccagataaactagtgtgttatctgccttagctcgtcagatacatgagaaatcagaccacacactaataaaaacctaatttaaaagtgtatctactaagtgtgtatgataagtttttgacatttggaacagagcagtatcagatgcagcactatagtaacattaatacaatatgacaaagtggtaactaaatattgtgaaatatattattctcttacagatgtgtctagtttattgacagaactgatttatatagtgcatttcatcctaggaaagcaattttatgaaacattattataatggaaattgtgttttttcaattagttgttgaacgccaagactttaactcctgggggaaaatgtttataaggaatactttctgttaagagtgggcatgtgggcacttcattagaaaggttttatactagaggacttttataggtggtataaaactccctcccccccaggttttgtgttgtttaataacatctgaagccaacatgatgccattccttgttagtgctgctgctgcacagtttcagacaagatgagcagaagaggtaagtttccctaagggagtagttagaaaattaattaaactgagggaggcactgggatatttagaaaacaaattagagtcaagaacaaacacacacaagaacaaaagggagtaataagaaccaagggagaaagaacaaagtttaagtcatggctttccctccactgtcctaaacagaatctggataatgtatcttagaaaattaagtttcttatctacatttataatctacatttataaatggttacatttataatctacatttataaatggttacatttataatctgaaaataatctgaaatatctacatttataaatggttacatttacaacatttaaacattttattccaacactgtttaaaagatacgttttctcctaagcaaagccttcatgccaatcatgaatctcagaggctgttctactaaacgtcattttgaaggttgccataaactcttcataaaggacaagtttataagggcttggtataaaaataaacattcaagcgctctctgaaaataatttctttaaatgaccatttgaaattaaaaataagatttatttttggtgttgaattaactgcaaatacaagagtactacaacttcttagacaagtaggctttaatgtactagtttaaaatacagagttgtcttgtctgccagtcaatatttatgaatttattcaattttcatgaagtttgataaaaaatttggcattttttgctattgcacttactaagaattaatcctcacacttcctaaatcaaatggatattcttaaaagcaaagacatcttattagatatgcatttaattttgaaaagcgaccttctgaaacttgtaagtaattactttgtaaaaactctagtggttgagattcacgttccagaaaaatcttgctttaaatagctttaaatgggacatatatggttagcatggaatgagaaaagaaaatatatgccctctcattgatattatattattggattattatgctttgtggcctttgaactggtgaatattagagccacttgttacattatctatcaaaagaaaaatatttttaaacatgaggattggggtttaggcaaccattttacaaataaatcaattaatatttatacagtacctaatgtatttaaatttttaagttcagtttaaatttaaaagttcagttcttcatggaaaacaatatagtaaggaagaaaaatcatgaatatgttaaattattaaaatgtaaacaaaattggacaattatacatagtgataataataactatgttttcctggatgtttagtctagtgaagcactctacatgcattatttcatttaaaagtttacagtgggaatacatttaacttcttttctcaacatgcagatgagataaatacaattatcattctatttcatagattggtatactgaggttcaaaggggatgagcgattcgcctaaggacatagagtccagcttcaaacaataaagtctggcttcctacatgagtaatttcacaaactgagttactaaggcctctctttcataaatccaggcatggagatcctgtgttaatggaattgagatccttccaggtacagtttgaaaagtctaccctagtggtctgcaaatggaaaataacattttcttcatttcttttaaaaaagcaatttctctaatgttttgtcttttacttacttcagtctgtccattttagtagtttttttctgcttagaattgatatctgaattataaatgctagctttatttttggcattaagaaataatcacaactgggtgcaatggcacaagcctacaataccagcactttgggaggctgaggcaggaagattgcttgagtccaggaattttgagaccagcatggacaacatggtgaaatcccaactttacaaaaaatactagcctggtgtgatggtgagcacctctagtcccagctacttgggaggctgaggtgggagggttgcttgagcctgggagagggaggttgcattgagccaagattgtaccactgcactctagcctgggcaacagaatgaggccctgccttaaaataaattaaaaattaaataaataaatgaatgaaggtaggttgagtataaagtatagtgtataaatgatgagttaaagcattttaatatttttttcagtgtatttcagtacttatcttgctataactaagccagaatgcatgatgtggggattattatccatttgatatattatcctccttaaaatatagtttatgtaattcaaagcatatgtggattattaagtgcacattgtttatagttaaataacttgctggtgttcatccattgctccctgttggaagatactccaatgttgaaagcaaaatctctgctgtttgtttaattgtgccccagggtacagttgggaatgtgtctatgagtgaaagaacaccagttttaataagaatacaatgtaatttaacagttcataaaacagtaaaatttaatcctgaactgagagatttattaaatttcactcagcagaatagagcatgggatataagagcaagtgagaattaagtgaaatgatttcaggggtaatagattttattacgtgataaactgggggaatcattctttttttgaaaagctatttattcttaattcattctttggaaataattgtcttacataggaaagctttttggagacaaaataaataaacttgaaactattaaaagcttttgtttaactttatttgtttaatttcaaaagagtaaaactatactactaaaatcatatcaccattatggctaaaatattttaaactgtaagtgaaagtattttgcattcagggaaaaaggaccagtcttctttttgtaatattcatttaaagtcctcccaaactaaatgatgcttgacaacatgctgtctcagagagtttcatttttgcatatcaagtagcatattaaaaaattcttaggcatattctctgcatctgtaatgattgattccattggagctttacctaaaatgggaaatattttaaaatttattttgtttttccctttcttttaaattatgtaaagaagtattaaacagtttgaacatgctattgaagattataatgagttacattagtaaaattttctcaactgtaagacctacaattgctattttttattttcctttttttgtaggggttgtaaaacaattttctgagtaaaagaaggaggctcccccaaagctagatgtctctttatttgcataacaaaacagcagcaactattgagtgtatagagatttagctgtgttttaatacacattgtatctattgagcttcattacacctagtggagaaagtagggcagatattattgcacctactttataccttggacaaatgaggtttggagaggttactgtttaccaggggacatatggctgttaagtgcagaacagattcagcaatggtcatttgagttcaagtcataaagacaccattaaggccctttgttgtgtattaaccagccaacatttaatattagtttttaatgatataaataattttattacagtcacaattgtgtttgtaattattcaaaatccatgaataatttcaataattgactgttttaaaataagattttaaaaaataaaaaaaggtttctttaataatcactagctagataaatgcagcattttattttttttatttttttatttatttttatttttatttttttttgagacggagtctcgctctgtcgcccaggccggactgcggactgcagtggcgcaatctcggctcacttcccgggttcacgccattctcctgcctcagcctcccgagtagctgggactacaggcgcccgccaccgcgcccggctaattttttgtatttttagtagagacggggtttcaccttgttagccaggatggtctcgatctcctgacctcatgatccacccgcctcggcctcccaaagtgctgggattacaggcgtgagccaccgcgcccggccagcattttattttttaaacaaaaatatgtatatgtaaaatgtttaacattgttgagtgatgaaatacctgtgaaagtttttataaactacctaaatatgaattcagtgatatttaattaaatgactgtgagattatggaattaaatatatatatttaattatatatatttattatatataattaattatatttaattatatatttattatatataattaattatatttaattatatatttattatatataattaattatatttaattatatatttattatatataattaattatatttaattatatatttattatatataattaattatatttaattatatatttattatatataattaattatatttaattatatatttattatatataattaattatatttaattaattatatataattatatataattatatataattatatttaattatatgtttaattatatataattatatataattatatgtttaattatatataattatatatttaattatatataattatatataattatatatttaattatatttaattatataattatatatttaattatatataattatatataaatcaaggttaacacaaactatgcctcttaagctgtgtactattttatgttgagatttttgcttatcaagtacaatctatgaaaagttaacactgtcatacaaaattaatttttcatctcttgactttgacagctatgttttatatcatctacacagtgtctgtctcatatgagatacttaatacatgttaaatagtaataagaatcaaatgtcagctcttagttgatggacatgacatgaagtctcagtgattcttcagaaatgaatctgaacagaactatccaaagacagttaaatggttcaaagaactctaatattgagtgtcctcttttgactccatctagaaagatcatagcattcagggagaagaggactgctggatcacacattagtcttttcaagcatacctgtacacagaaatagtctctagggccactatctttgaattccatggctacaaatggaaacaatgtgaattgctgggtggcctttgtggtatgtctggtgctgagcaataataaaggaaaatgaagggaaagcaagaacacttaagtctgtgtgactctaatgatttttagtcatttcttctttttttttccccatgcagctattttaagttaatacaggttcccctaaaggcaaatataactgactcattaggaaatcagttgggaaaacaatattttgcaattgtggccccaccccttcatttctccagagctcatgatagcacacatgctctatctctgttggctatatttttagctttcccacattattttgcaatattcctttccagactaaaaaattaacaaaactccacactgaagcaacaaatcactatcttacacaataattcactaaaataggaccttaaggtattttgcctttcttcaaactcagactgaaagcttttctggtcacgatttttcaaggttatacttttataacaaaaccagatgcaaagattttacctaatcagattttacaataatgcccccatttccctccctccctccctccctcccttcctttcttccttccttccttcttttcttttcttcctttgtttcctttccttccttcccttcctttcctttcccctcccttcctttccttccttcctcccttcttttcttttcttcctttctttcctttgtttgtttcttttccttcctttccttccttcccttcctttcctttcccctcccttcctttccttccttcctcccttcttttcttttcttcctttctttcctttgtttgtttcttttccttcctttccttccttcccttcctttcctttcccctcccttcctttccttccttcctcccttcctttccttccttcctcccttcctttccttcctccctcccttcctcttcctctgtctctgtctctgtctctctctctctctcttctttctcagacagggtgtcactctgttgcccaggctagagtagagtggcactatcataactcattgcagcctcaaactcctgtgctcgaatgatcctcccatctcagcctcccaagtagctgggactacaggtgggcatcatgaagcctggctaatttttttattttattattttttttaaagacagggtcttgctatgctgcccaagttggtttcaaacaatcctgcctgagcctcccaaaatgctgggttttgctttcctgacaccggtatctcctggttcaaataatcctgcctgagcctccccaagtgcagggattacacgtgtgagccaccatccagccccaatttctttctttcttttttaaaattaggttcttcctaattacttctgaatgacagtgaatgacttaggctcttaatttgcctttgaatccaggtattcagggtgacaagaccaacatttgcctggtctagtttgataaatgactctgtctaaaatggtgtcattaagtacgtgccttgacaggatttgaagtttttttctaattcaagatgctaattacagctttcttgtccagttaatattcagctaaaaagtacacatgtcaggcaggtcagtttcagatacccatgaggttaatctagaagcaaactaaagtgaccatcaaagtataatattttcagtacattttggatttttaaaaatgtatttgttttgctgagacacttctttgtgactgaatcatcagacttaagagctggcttttgattgtagatctcctagagtcagcccagacagactcaacagcaggtatagattccagggctgtctacaagaggccacagtgccaggacaaatcatgctgggcgttccttggagacgctcatgtacaaatgaaataatgtttcaaagaacatcaaggccatcctccagaggaacaagaaatgacaaaaggacaatgtacagattgagggtcttggcagaaaatcaaagtggctgtccctactgctttgatttgatgacaatgtggtaagaacattcgagtagcaggatttgtttttaacaactgagtgatttcctgggtgccaaagctctgggtcagtgtaatgtcctaatttattcaatcctgaaaaccactctgaatgtgaggtttctagaaatggcatataagtcttatttagtcactctttgttagttgctgatatctgattaaacaacacaaattaactagctgtttgaatgtgttatgaatgtctatgtctcccagaagacacacatttcttgtctgatttttcttactatgtggaagttagcatcttattcaatttattagccaatcaaaatcatctgtattttctactaaaatcaatccccttttgaattcatctcatgccattaaataagtaaccaggggaaattcttcttctttgttcactcaaggtttaagaaatttggccagatgaaatagtataaatcttttatgaaaaataacatattcctgttaattcatctaaacttagttgaaatttaaaatatgttagatatttttctggactagtttcataggtgtgtgatctatatagtcacatgggaccttatttaattcttaatattatttggaaaagaggccatgcgtttttttgtttttttgtttttttttcctgggccctgcaaattatgaagccagccttgtttgcttccagtatttaaatagtaccggtgtttgcacaaataagtctaagaacaaaaaccacttgaatgtattatctgatttgacaagaaaagagataaacgtttgtccttaaggaaggtgatcccaagatcagaaacttaaataaggttttaaatcctgtattttggcttccctgacaccagtatctcctggttctctgtattcactgtctctctctctcatgcttctcttccttcatcacttatatgtcagagaatctcagggctatcttctctcaatttacctttattcctgagtgtcatttgctcttgtggttccaatccttctcataaatttatgatttccaaatttataacccaggtccatacctctcctttgagccatgaactcatgtaccagacgcctccacttgcaagtttggaaactcaatatcatcttccgtgacatcttcctgaaacctcttgattactgatggggatacagcagtcaaatgaagtctctatacacatagagattatgttttagaagagggaaaagataaccagcactctgtgtgtgtgtatgtgtgagagagagagagatgagaaagtgaaaagtgctctgaagaaaagcaaggtgagagaatgaagaaatatgtgaaagtgtatttctaatagcatttatctgcattactttttatctcagtgaatattatgaccatcttccctttggcccaaacactaataaacctgggagttattgtagcctcccttctcttcattatcatcattgttattattttaaagttgaggtctcaccctgttacccaggctgaagtcactaggattatttttaatgagtttcctgaaggatctcctgcctctagtattataccaatgtgtctgtcattctccccactcaggaagtgctctttcctaaaagtaaatctgatcatttctgtcctctgaaaacactttaatatcttccactcatcctacagataaaatctacgctcctagccatggctgacgaaatcttcatttttctgtgtgtgtgtgtgttttgttgttaattattacttattaccttctccagcctcatccattatcactgcaaatccacaccttcactggtgcttcatctatgaggaacatttttcagcttctcaacactgtcttgttgtctctcatttctgagctgtcacatctttctccttctccacctaactcttagacttctttagtgtcaacatcactttcttctgaaagccttctctgagtcccccaagttaatttcagttagtgttttttgtatgtgcatgctatagcaccctgttcctcatttcagttttagcatttattcaccttaatttgtactgcatcttcaattgcctacattttactgggcgtgaactccataaaggcagaccctacatatatcttgcttatgtttatctctctagcattagcttagtgcctagcatagggcagctgagtactgaatgcgtgtgtgcttttttaatgtgtgtttcactctgaattccttctgaatctaaatgacattatgtatatgttaatgtagtaatatataaataacaatgataatggctattggacacatcatttttttttctaggaagaatagtggaatgattcaattatttcagattgcatttcagctttggagactgcatttattttgcaaaagctacttgtgttagtcccaaaattaatctgcctagcctggaggcaggtacctgctatgctgtctggagaagtcacatgaaaatagtcaagatatttttttccttcaaggagtgttttcttatgaaaccaatgcctctctctccctctccacgaagcggaaattaattttataactggtattcttgaaagtctgtataaatggaaggcactattttaaagtagggtttcatctgagtgcatgtgattaaaactactcttcatctagaaattagaaacatggcagatagcaaatttggattttcttatacatctacttaaacttaatttctccaaaaaagctatgagtcatttatttttgtggaatcctttttttattgtatcacaaagcctaaatttaaaaaatgttgcatatgagtttaatatcattaacatttaaactgttcttgattaaagtatgttaaaatgtctttgttttgcaagatgcattaattagaataaggatccaaacatcaagctaaagcattctctaatttgaagagattattttaagaaaatgatgaacaaagtccagcatcattggaacatatttgcctgatatattttatgcacttattccacttatgtttataataactattcggtatgtttgggcttttgttcaggttgcttttagagcaacctgaaaaaaaaaattgtaatatttactagaattttgtttaaagtgaagtagctatattattaagtgtatgtttctaatcatgacctcaatttttaaagaatcttgtgtttaaagatttaataattgaggatataaaaatgatatcctgaagagttcctgaaatatttgaagcattaaagtaatgtttgatataaatgagcacctgttgaagttctatagtattcaattggaagaataatatcttctacacttacctcaaattcttttttatgataaagttggatataaaacctaaaacaactattctagtttacaacatctagtcatgacagataattgtcaaactgtgttttagtttactacagcatgtctttatggccaaatgacttctgggagtgttgtcctctgaagttgagcttcctactcacaactctgctcaagacagaaagaaagcatattagtcctgttccaaatgagccccattcttagcaagtgctgctgtaatttaatttaggtttgggccttcacttgcaggaaatagacatgatgttaattaacagaacaatgcttgtggaaaagctttatgatactacttgattaaccacattccttttgatgttcatttttggaaaataattgtttatgtctcctgacacagtagataagatggcatgcatggctggtgtttgtaggtgtccaaagggattgtctttagactgatgtggcttttaggcaattctttttatgtaacctagcaatcttggtgcctaactcctacttctggttgactttacatatgaaaagaggggaaatttgtaaacttctgagaaattagaagtaactcaggtaaacattgaatactatctagaattcagaagaaataactgctacttttaattgaaattttaatttgcttttggtccattaattctgcggtttatcagcacaatacttttataattcttacatatcaatcatgagtaaaattgtgctttagttatttaattttcttccaaacagtaatcaattcacctttttttctccttaagagagtattcttctcacagaatgtagaaatataaaaaagaaaggtaaacttttctgtaatcccattaccattataaacattttggatttattatgatctctctttctttctttatgtatttatggagatagatggataagatatacttaatatgacagtcataagctatattttgttttacacctaaataatgtacattttaagaatatgcatagttgaaatacatttatttgttaaaataatgaggtatatctattaattctaacttggaaaaatatattcttagatttttttaaagcaaattattgtatatttgacttttgattaaaataataaaaataaacacaatatgtgtgtgactgggtctatgtaggcccacactgttgagaataattacctctgaggaagtcaggagcatgggtggtgggatctgaaatgttttactagatataattctgtactattacaatgcattataataggaatatattattttatgagtatggaaatgttaacatccatccttatgtcataaatataggtctagataattattttatttttatttttatttttttttgaaacagggtctgcctctgtcacccaggccggagtgcagtggtgcaatctcagctcactgttaacttgtaccacacaggctcaagtgatcctcacacctcagccttccaagtagctgggaccacaggcatgcgctaccatgcctggctaatttttgtatttttagtagaaatggggttttaccatgttgctctggctagtctcaaactcctgggctcaagtgatctacccatcttggcctcccaaagtgctgggattacaggcatgagccactacactcaccctgtataattttaatagtgttatttatttatagaaacacaacataaattgcttaaccttgttgagaaacattaaggctgctgcattttcaagtaatataagccatgttgtcatgcacacatctgtaaatgcatccatgtacatttttccttttttgttccatggaataagtttctcaagtcaaactacaatgtcccaactggtgtttgacatgcattttcagactgttctccccagtgatattaccacctttttctagcacctaatcatagctgctagcacatcattattcatctgtgtctggtgagcaaattatggtttctctcacctagaaatgttatggattctctctcacctctagatgaggaaagtaaatttttatcatcaagagaggacatagaatgaaagctgtcttccataatctttgtttcataatgcacattgtattatgttaatatgagggacactgaactctaaaatagatgcctaaatcatattgtttaggcacacagctatatatcacagtaatttctattatctaaacctcatggtttagatagaaaaaacccacaatctttggaatttaatagcctgggtttagattttaggtgtgcccattactcagtgctttgagccttggctccttggcatgtattgtttatatcatgagattgttaaagaaaattaagttaaataatatcttaaagtgcctactgcagtgccatgtggtaggtattatagaaagtaaccttgtggctaaataacttctttgtgaaatatttactatttttctgatttaaaaaaagacagattatcatttaggatatatagttaaaaactgacctaagaggctaaaattatagctgatatgcttattattgctctgatttttttatatctgtactaaacttcatgcttttaacttttggttaagggtattccttctggtttggttaatttcaaaagtataagaaaataaaagtaaactttaatcttctaccttgcatgatggatatgtgtaatatctttgtactgttttccttggaaaaaaaagtagatacaaatgcccaagtatacagtatgttgaattttgctcaccatttgacataaatgaaagtatctttgtagtaatttttctttcaaaatgcaatagaatgtgtatattcattgggtagcctttaagaggtcagaaagaaaagacactaaaggatatacaattgcagaagagggaagtggaggagtttagagtcaggaatgcagaggaagagaagaaatattatctgatgctgtgaaccctggaaatacagaagtctactcaatagttaagagccctttgctgagcttcattggacatactcaggtgctatgatagctatttgagtaaatgtatgctttataggagtctcttctcctggattctcaaatctagcccacaagataaactcaaggttaagattaaacaaattatgagtatctttttgagtttctttctaaataaatgtatatacttgtttgttccaaataacgaggaaagaatattttatgctatagcctgtcaacctaagtaacagtgagagaggccctctaaaagaaaaggtatttatttgaaaataaagcattgtaatgggaatatgcacgtcaaagtaaactatgcacatagttagggaggtaaaggaagacagaggttttcaaagagaaaaagcaggaagattatataattcttctgaaataattacctttggctacagagaccaataacaaggttatcgccagtccgaggttagacaggcagttgctgggcaaatgcccttgtagaaatatgtttttgtgtaaggttctgatggcctttgtgcaagattgtggattttgtatttttttgttatcagacatacaagaatggtaaccttctctttacagtgttctctggttctgccagggctttttgtttgttcattttttaacattagtgactcatttgattttgacacctttcacaagtctatcgttactgccttgttttttctgaaatgtcttttttgttttttctagtgatgattcttatgcttttaaaaacatttctaacatcctcctgttgcttatttatctgtggagttgctgttcattctggttttcctctgagtccttgcccatacgtcaccaccctgtcttaccttggctgcagctgttgctagtcatcagatgaagcaggtgaaggttatcaaactgttatttttcctgagtaaagtgtcatcacctcacctactgctctttgtcttctttgaattaatttcctaaatggcatacgattcagtgcaaaaaaattgttgttgtaatgaaagtcttttatgtcctggttggtgatttataattggtttcatcaagtataaaactcagaagtataaatgtcaagagttaactgatacagcttaattggtcatttccaattttgatgtcagtctattgacctaccggctaaaagggcattgtagagtattagttggcatttgtttttggagtcctttatgatttctttcttattagtgttcacagcagtgtaccattaaagtttttggcttcagtacacattctgattattcctgaacctgcatagtcacaataggaagggtagtgttgattcaaacaaaattcagatccatgtatttttggcaggtatagtgtgttcttctgcaccaactcacatattccattttgtgcctttacaaaactataggaatagtttagtgattgcctaaaattttcctagtaaattgaatgtttttctacaaaaatgtcttaaaaatcagaagataatatattcagtaaatttattttatgtacctattatattgtctagtactttaatatgtataattatttatggtttgattttatacacatctcattttccttaaatgtatattccaacttatatggagataaaagtaatgatatcactttgccttgaagaaactaaactctaagactgttatcatttgattctttcattttgagctgtctaaaattttataaaattagttaagagcaaaaagaagcatattagttatctttcttttttttcttttttcattaaaaatttttattcagtgcaacgggttgtataacttttatagacaaaaagtacaaatagctagtgtggtttgatttaaatttctatttgaattaaacatttgaatactttttcacttgcaatttatccttttagacaaatttctggaaccttcatttaaatgaacacagatgtaagaaataaagcggttatggaagcccagttctggactcattattaacccatttatgcctgaggttgcaattttttgaatttttattttgttttattttatttttatttattattattttttattattattatactttaagttttagggtacatgtgcacaatatgcaggtttgttacatatgtatacatgtgccatgttggtgtgctgcatccattaacttgtcatttacattaggtatatctcctaatgctatccctcccccctccccccaccccacaacagtccctgttgtgtgatgttccccttcctgtgtccatgtgttctcattgttcaattcccacctatgattgagaacatgcggtgtttggtttttttgtccttgcgatagtttgctgagaatgatggtttccagcttcatccatgtccctacaaaggacatgaactcatcattttttatggctgcatagtattccatgatgtatatgtgccacattttcttaatcccgtctatcattgttggacatttgggttggttccaagtctttgctattgtgaatagtgtcgcaataaacatacgtgtgcatgtgtgtttatagttatctttcttttaaagtacaggataatttgtcttcaaacatagctggatccaggtgcccaaagaaagtccttatcaacaggttcctcttctcccacttcctctcttttctctactggcttcattctcagagggagatataaaggtggcatcaaggtttataatccaccagtctgggaccccacaagaaagaaagtacctctttcctaatggcttcctcaaaaagcttgggtttaactaatgagctgagcttgtttcacttggccatgcctgaagcaatagctgtgacaaggcctgaaatatatgtttatacctggagctaggagattaaagcaggaaatggactgaagtggaagaggattctgctgcagtaagaagagatgttgagaaggcagaacaacagttcccactgaagatgccactgagttactaggaccatactcctggtcttctgagttccatattctactctttgagtctttcacatggatcagttctaagatgaagtaagaataaacttaaataaatcctttaatgtttatcctctaaaaggacaagaatattttaatagcctgaaagcagatgttgggaatctcagaaaatgaataaagtataatcttgaaaaaaactagtgaaacttctggtttgatctcttccctaatgccaccattcctctcaacttttgattctttagcttttttccactccttttattttttgaagctattgatgttgctagaaaaatctttgaagcaaagactactctctaacattaatagataggaactactccagatgaaattaagtacccttctattaccctgcatatggcattgcattaaaattttggtttacttgtttgtcccactcacatactgtaagtactccaaagaactaaatcatctttgatttccaagttttattgcccaaccacataattgtatttgttgtcagtaacacattaataacataagtgttgttgaatgaccaaatcaaactgtaatgcacttacagacacaggaaacaacacaatgagaaagtgtatgttcatatggggcagggatattcaagagaactaagaatgagcaagcagaggcatttcctcatggcaataaaacaataattagttaaagcaatatattttcaaaataggaaacatttatgttaattaaaatagtgaagagggccaggtgctgtggctcatgcctgtaatcccagcactttgggaggccgaggcgggcggatcacgaggtgaggagatcgagaccatcctggctaacatggtgaaaccccatctctactaaaaacacaaaaaattagccaggcaaggtggcacgcgcctatagtctcagctactcgggaggctcaggcaggagaatcgcttgaacccgggaggaggaggttgcagtgagccgagatcgtgccattgcactccagcctggcaacagagcaagactttgtctcaaaaaaaaaaaaaaaggaaaaaaaaaactagtgaagagatggaaggtcttcaagttaaggatctgaggtacactataaatatgagtgtagaaatcaattcttatttaaaaaacaaaaccaaaaactctgtcccatctaaattgatattatcagttgttaacatacttgagattttcagttaagttgttttataattatgacatatttaaaaagctttataattcatacttttataaatttatctaactttattcttacaacaactctgtgaggtagcttaccatattacttaaaggtgaggaaaatgaagctaagaaagataacatgacttcccattgccactaagaaattaaaaagctaaaactctaaatctcatattctttctatgaaaattgtactttttcaaaattttatgacaagttgctactacaattattgtagagtaatgagcacaagatagaaagctaaacacaataagaacataaaaagtcataaaagatgcatattgatatgttttgtttgcatatgtattgtttcatttttttcagaatatctctctaactttttaagtctttttcaaatcatgcttacagatggcctttgctataatttaatttttaggttatcagtttttattggcatttggaattaatacttacgtgaatatttgaactcatggacctaaatttctagtgtatttttggtttgcatacacctaggtcccaaatttagaaaaaaatcacagtctgttaacaccgtaaaaatctattttaattcatcatattgaaaaaggtaaatataaacaacattgatgaatataaatttttaaatgcaagtacctaatctgagctgcaaatatcaagataattggatgtattggagaccagctggaagtgcaaagaatacttccccttggtattgactcttctctaaatcaatagcggttccaaatgtagtaaaaagcggacaagatttaacaggttctaaattattaaggccagtgcattgttgctagagagttcattaacaatctcatcaatacaatgtggttcatggacattagtaagagctttgtgtaacattttaaaacagaatgagatatctcaatggactgatcttagtaaaaaaaatttaattaggtaagaataattacattagttaaatggaacttttaattgaaaacttgttggcattttcttacctgcttcacagctgtcctttaatcatttatatttaaaaagtgaagagtttctgtacatgatgtttgaaaattatctaaacatcttggactttttgtataaacgtttaaaggagtttagataatgtggcagtaaaaacaaataggattttctgcttgcggaatggtacatttaaaagatatatatatcagaaagaaaagttatagagaaaatatgtatggtaagtatatactattcttgggaaaaaggcaaagtagtcattttctgaagctttaacatttataactttaaaacttcatgtattgaacatcattccttatgaagctttaaaatcttacagggaaataatactgtttataaaattatcttgttaaagaaaatggtatccaacaagagtttttgaaagaatgaaagcccgtatttgtgtaagataaacataaagggccaatggaaactcttattgttaaaattagtgtcagccacattttaggctgtatttactggttgttgttcaaaataagctaattggcaatcactattttttggtagctttcagcttaagccagagagcactggtttggagagacatagacatttattcaaattcacaggaacactaaacaaatggatttgttaattattcatgacattaattctggccaagacagtttcttatctgaatctcagcaaccactatcactcagtgctgcctactttacttgatcttcagaacattgctgaatttgaatattcttcctaattcatcaatttgtctcttcctttcagccctcatgggtactcaatgacacacatgtagagacaaaaatctttatatatatatgtgtgtatatatatgtatatatatgtgtgtgagatatatatatacacacacacacattactgtatagtttatttataataaactataaattcatttagaaacaagacagaggctgtactcacattccccgccccggtctgagctgctgacagatttggctcattgtatttctaggaggtaatacattctagctgtatggcaaagtgtgaagatacagatttcttcatatatatatggaaacaatatatatatgtgtgtatatggaaattatatatgtgtatatatatggaatatagatatatatatatggagagagagagagagagatgtggtcttactttgccacccaggctggagtgcagtggcactatcttggctcactaaaaattcatatatttttaaaggtatttcatcatgcagtttctgaaattttctttaatgcatttaatttgtaataaaatctctctggtagttcaaaaacataagtcataagcagatttgtgttttcactgtgtaagaggaggcaaaaggaggtaaaatgctgtaatattggagaatgactttgggtaggaaagaaagaattttagttttcttcttcgaagaatgaggaggccaggctgagatttaatgtacatgagaagtttaacagcaatgaaggtgaaacaacaaagaaaagaccataatataaatattggcaggttttatttgttcaggcagtaatttgctaggatatgaacacagtcaatggcctaagaataattacttttgattacccttattaatttgtatgaaatgttcatacaatagtttgttaagcaagcacacaacattataaagaattatggagagagacagacatatgtagaatgtaaagagtaaataattatgcagagaagacagacaaataagggttatggttatattacaaaaccggtataaaatcagagtaaaatgtggattttctagtaatatgaatgttagccacaggatgccttaaaatccacctgattcaatcccctccttttatagatgaagaaactgaagactagaaaaaataatagtcatacttgtccaagtttacatgctgtagtgaaattatctgtgcaatagcagtccttcatttaatattaaatacaagacattataatattttaccactcatctttattcttgaattctaaatttgtcagtaacttatatgtactcaattttttattttttggcattctgagttcaactgaattgtagcgtcatgtacataacacattgtgtagggatcaggttattatatgttaatttcctccatgctcctttgccatctagaacctgatctgctgttttaaacagcatgaggcctgttctcccatttaggctaacagtgggtgcagaagggttgaagcattatactttctaaactggttccttgttctggagagtatccatctgaagagattaccgctcttctggtgatcatcgccatcatcgtccaacacctgcctatgcaccatgtgccaggaattgtgcgaactgctttaatgtattatctcatgcagtctgtgtagtccacgcagctgctggtaaagaactctgtttcagagtaatacaaagagccagcaacagagaaagcataatggcagctgcagtgtaactgggagaattgtctctgacaattggctcccgactgggtctgagggcatttcttcatcagtccctcagttcagctagcagccaccgcacacctgctctgtgctgggcagagtgctcagtgcagtgtgccagctgaatgagtgagcaccagcctgttctccatgtgtgaccccctccttcttgctcagaggggtgggcgattgtctgtcccatttaggcttgtgctgactgtgcaagggagatcccaaggtcaggatctacctctttgcccatcactgttaatatctgtattatctaactaaagaactaacatttgtattttttttcctgaaactatctgatttttaaagtaatttttcaagcaagaaaatctttagatcatcatatttaattttcaatgataaaatgaggaaacaaggcaatagggatttttttttattattttctttagtaaaaaggtcaagtcagtgaaagatccagaattcataaacttctattctatttattagaccatgcagctctttctgctatgcactgtacctcaaatgggaattcagaaatgagcaaaatctgagatgtaggagttccagaatggatctgccacctgccagctagcattcggatctcaaaggggacctgcctgcacttacttaatggaaagataaatgtgttcaaggaactgttactataaattcatttagaaacgggacagaggctttactcacattcctctccagtctgagctgctgacagatttggttcactgtacctctggggggtaatacattctagctaaatggcaaagtgtgattgttattcagagctcccaaatacctatttcttttattgtttaaatgaactttatggttgaattcatccatttattgaaaagtacttttatacacttactacaggcaaggcagtgtatggaatactatgtgaggtattaaaaagatagacattgttcttatccaaaagatgattgtgttataaaaggaaaaacaaaaggcaagaaaaatataaacagttttattaaaactagaatgtaaaaggaagaaagaagatacaaattagtgatgtttaatttgctaggattctagatagttctagaataaaatgaaatcaatggaccatcttccaagaaaaatggtgaatcactctttaacttctaatagatgtatgagagtaaaatgtacacattataaactacacatatttaaattactcttaagagtaattatatttagatataaattattgcattcaacattgaaagcatttgtagcccaggccacgagtgctaataaacaacaagtcttgagcaaagagtgaaatattatcacaaatataaccgtgcttggtacaacagacagaataacctggaaaatactaggttctaagttctcccagtcaaaattcaatggaggtatccaaaagtcattccaaaagaatgacttctcaccagaagaaaaaaataaacatttttgatggatttttgctgagaaaaatttttagtacatctgagaaatttgatatactaacgttctgttctgtatttgtacatagtttggaattgtttgtttctattgtcttcatacttttttcaaagaaaagctatgttttaatttttgtgtaactcttgaagcacctattttagacctttacaaaggaaatgtataatgtgataggaatcagaaacagaaataacatatgcattaaacctggacattggtagcttggtaattactgcttagtatcagattattttgtaaatgaaatctaagcacatataaatattttaactattcatagaatctattatttctgttttttatatttggagatattttaattatatatataagatcaaaatattaatgtcaatttttatttgaaactttttagaacatctaatttcttaaattcttcaattatttaaaaatatgtagtgaatttttccaaagtataaggaaaatgtaagcatacatagattttactgttttttttaataccttaaagactcatcagtcatgaggttagttgatggatggaatagtactgagtgactaagcctatttctgtggcaatggctcagccatagaaattagcatttgtcactcttctgcctgtttgtctgttacacattccattcttaaaagtaatttgactaggtataagatacaccaagcaataagctagtaagaaggttaatgaatatttaaatatatttgcagacatttcttatgttcttttcaagccagccatttggaaagatcactatagttttactaaaatgtgtaggacaatattgcacaattttaaaggtttgcaaaacaaaacaagtttttggctgaaaaacattttttgtaggttaactaacttattttggaaataaaaatagcttcaatctagtctgaagtaagctctgaaaggcagcccacattccagttgacaggcgtctgaactagcagtgaagcaggtagggctgcatttagctgtcacattagccctgtctggctggtacctacctaatttgagcttctttctgctgcactataccctcagagggaacagatattctcttctagctttccattaagtgtggcccatatatatgggggtatgtgtgtgtatgtataatatataatgtatataatccatatgcatatatacacatatataattatgcttggagagataaatctctctctctatatatatataaaattgtagttgaaagagagaaaatagaacagattatcttatcttcattattgatttactcccaacccctgcttagcttttgtcttgcctttgtagtttaggatgtaaatgaccacagatttatctaactatctcatatggattttaataaccaaattgtactgatatttttagtttacttggttaaattagagttatgttgaaccctgaagcattctttagaggtagctataatgtataagaaaaagacaagatttgacttagggactacaataacttttattggaatcccagctcagagatgtattctccatggtccgtggaaccatactagcctggtattcgtaagacaccccctaaactgtgagatcttctcccactagtttcccctcctttgcccatcatagtttcagtgggaatatggcctaggggaggcagggattataattgtttagacagtgattctaagggttaggatttgcccgaatcttatttctgccaatctttcatgagacctcgaaataattactttaaccttcctatcttcagtttcctgctctcaaaaatgtttgtagtaatatcatttagaacatacggtctttgtgagaattaaatgagataatgcatgtaaagaaatcagcacagttctgtggcacagagttaaggactcaatataacttgaattaaaataattattgttttgtaataataatattataaaaatgataatataatttaacctgtgtttcccctccacttctctcttcctctgttccacccctctcttcttttctcctgttttcttccattaagaaaagagtcaaggcaaggaattatagagtcaataagagaggatgaagatttagcaaaagcagataaatcaatctctaaatttgggtgtaagagacgcctcttaggccccagcgtgaaagatacactagggcctttgccctttgaaaacctcccgagcagcaactggatagaagcaaactagaatgttgaagagggctttaaaaagtgttatattgctaggggttataagaatgtcctttgacactcatgaaataaagactaaaattgctgctttttaaacttattttgtcctctgaactaatgtttgcatcctgctcagttcaggatttgttagaattatatgattctataatttctttttgtaatctaatttgtatttgtttattttgtttttttctatttactttatatgttattttttcagttatctttttctaggcattgttgggcctctatgtaattccatacttatattttatacaatcatttataggtacttctttcttatccttatagtgatcagatttcactaataattggtcacaatcagtgacattatgaacctctgaaaggagtgtggtggctccttccaggacaacgactggaaatgtgggttcctaacttgaccattcctgtccatacttgatgatttaaattatttgttttacctcaatgttccttgggacaaataatgtttaagcttgataacctttgatttgtagagatatgtatttgggggtatactatcaatttagtgttgcctacaagagtgcttaatatttttagaaaattctattcaccagtcaccataatgtgttctggctcctgtagtagatacatacatatacacatatgcatacatacacacatacccctctggtatatacatacatacatatacatacatacattatgtatatgtgtgcgtgcatgatatatgtttgtatatgtgtgtatgtatatttaccttttctgtttctaaatttttaaatattttaataatatagtttcctggatttatgctatcttatccttcatatgttcagaaatctatttttttcatgaaattgttcctagttaatattagtaactttttaacccacctattattgaaccatattcatacattagtttttttttttctaaaataaacaacagaaatttatttctcacaattctggaggttgaaagtctgagatcaaagtgccagtatgggttctgatgaaagccctctcctaggttttggacacccaacttctcgttccatcttcctatgacagaaagagggctagagagttctctggagtcccctttattttattttattgattcttaatgtatgtacatatttatggagtacatgtgatcatttgttacatccatagcatttgtaatgatcaagtcaggctatttaggatattcactacttctagcatgatcgagtcacggtatttgggatattcactatgtctagcatttactatttctctgtgatggaaacattgcaatcctctcttctagctattttaaaatatacaataaattgttgttaactctagttaccctactctgctatcaaatattagaacttatttcttctatctaactgtaagtttgtaaacattaaccaacttctcctcgtctgtccttctcatactcaggttcccttccaagttttcagtagctatcattctcctctctacttccatgagaccaacctttccatagcccctacacaggagtgagaacatgtgatcttactttctgcgcctcacttatttcacttaccataatgacctccaattccatccatgttgctgcaaatgacatgatttcatttctttttcatggtcaaatgatgttctattgtgtatatatcctacattttctttacctattcatgtgctgatgaacacttaggttgattccatattttggctattgcaaatagtgttaaataaacataggagtgcatgtatccctttgatatactgatttcctttcctttggatacatacccagtagtgagattgctagatcacatggtagttctatttttagtttattgagtgagcaccatgctattttccataatggctgtactaatttacattcccagtgatatggtttagctttgtgtccccactcaaatctctttttttttttttttttttgagatggagtctcactgtcgcccaggctggagtgcagtggtgcgatctcagctcactgcaagctccgcctcccgggttcacaccattctcctgcctcagcttcctgagtaggtgggactacaggcacccgccaccatgcccggctaattttttttgtatttttagtagagatggggtttcactgtgttagccaggatggtctcgatctcctgaccttgtgatccacccgcctcggcctctcaaagtgctgggattacaggcgtgaggcagtgcacccggcctcaaatctcattttgaattttaattcccacatgacaaaggagggacctagtgggagataattagatcatggggatggtttcacccatgttgttctcatgatagtgagggagttctcatgagatctgatgattttcaaagtgacagtttcccatttgcatgctctctctctctctcttgccaccatgtaagacatatcttgcttcccctttgccttctgccatgattgtaagtttcctgaggcctctccagtcatgcggaactgtgagtcaattaaatctcttttgtttctaaattacccagtctcaggtagtgtccttatagcagtgtgaaaaatggactaataaagagaattggtactgaaagtggggtaatgctataaagataacctgaaaatgtgaaagtgactttggaactgggtaacaggcaaaggttgtaacagtttggagagcttcaaagtacacaggaaagtggggaaaagtttggaacttcctagagacttgttgaatggctttgaccaaaatgttgatagtgatgtggacaatgaagtacaggttgaggtggtctcagatgcagatgaagaacttgctgggaactggagtataggtctgtcttgctaggctttagcaaagagactgcttgcattttgcccctgccctctgtggaactttgaacttgagatagattatttagggtatctggtgggaaaaaatgtctaagcagcaaaacattcaagatgtaacctggcttattctgaaagcattcagttatatacattcacaaatagatggtttgaaattggatcttatgtttaaaaatggaagcagagcataaaggtttgggaaatttgcaacttgaccatgtggtagaaaagaaaaacccgtcttctggggaggaattcaagccagctgcagaaatttgcataagtaacgaggagcggaatgttactagccaagaaaatggggaaaatgtctctaaggcatatcagagaccttcacagcagctccttccatcacaggcccagaggcctaggagggaaaaattggcttcatgggccaggcccagggccctgctactctatgcagctttgggacttggtgccctatgtccagctactccagttccagctccagcagtggctaaaagcagccaaggtacagctcgggctgttgctgggaacatttacccaatgcctgtacctgcattgtatcttggaagtaactaacatgcttatgattttacaggcttattggcggaagggacttgccttgtctcagaggagactttggacttggatttttaggttaatgctggaatgagttaagactttgagggactgtggggaaggcatgattggttttgaaaggtgaaaagtacatgagatttgtgagggaccaggattggaatgttatggcttggctctgtgttcccacccaaatctcatctcaaattgtaatcaccatgtttcaagggagagacctggtgggaggtgattggatcacggtgttctcatgatagtgagggaattctcatgagatctgatggttttataagtggcagttttccctgctatccctctctctctctcctgctaccatgtaagacatacctttcttcccctttgccttctgccatgattttaagtttcctgaggcctctctagccatgcagaactgattcaattaaacctcttttgtttataaattacccagtctcaggtagtatctttatagcagtgtgaaaacagactaatacactcagcagcagtgtataagagttcctttttctccatgtttttggtttgcatttgttattgtctttttgtttaagaactattcaaactcgggttagatgatatttcattgtggttttgacttgcatttccctgatgattagtgataatgagtgttttttatatatctgttgtctgtttttatgtctttttagagaaatgtctgttcacatcctctgcccactttttaatgggattttttatttatttattttttttactgttgagttgtttgagcttcttttatattctgaatattgatcccatgtgagacaaatagcttgcaaatattttctaccattcaacaggttatctcttcactctgttggttgtttgctttgctgtgcagaatctttttatgtcccatatggctttttgtgtcccatatgtctattttttgttaattgcctatgcttttgggtccttagccatagagtatttgcctagaccaatgtcctagagtgttagtctgtgtttccttctagtagttttatactttcagaacttatatttaagactttaattcattttgcaatattttttgtatatgatgagagataggagtctagtttcattcttttgcctatgggtatccagtttttttcagtaccatttattgaagaacctattctgtttccgacgtatattcttggctccttttcaaaaatcagtagactataaatatatggatttatttctggattgcccattttgtttcattggtctatgtgtctgtttttataccaataccatgctgttttagttattatagccttgtaacacattttaaggtcaggtattgtgatgccttcagctttttttctttttgctcaggattgctttggttattcaggctgttttggttccatatgaattttagaagttttttttcttttctatttctgtgaagaatgtcatgatatattggtggtaattgtgttgaatctgtagattgttttgggtagtatggccatttttacaacattaatccttcctatacatgagcatggtcttttcatctgcctgtgtcctcttcaatttctttaatcaattttttgtaggtttcattgtagagttcctcatctccttagttaaatttattcctaaggttttttactttttgttggtagtgtaaatgagattaccttcttgatagtttggctgattagttatttgtgtataaaaacatggctgatttttgtttgttgattttgtgttctacaactttactgaatttgccaaatagagtttttggtggagtctttaggttttttaaaacataagatcatgtcacctgcaaaagggacaatttgactttttttttttccagtttcagtgtcctttctttctgttgtctgattgctctgagtaggactttcagtactttgttgaataggagttgtaaaagtgggcatcattgtctggttcaagtttttagaggaaaggatttcagctttttcccatacattatgttatttgtaggtgtgtcatatatggcctgtgttatactgaggcatgttccttttatgcttagtctgttgagtttatattatgaaggaatgttgaattttatcaaatgtttttctgtgtctgttgagatcacatgatttttaccctttattctattggtgtgatgtattacatttattgttttatgcaggttgaaccatccttgagctcctggaataaattccacttgatcatgttgtagtaccttttggatgttctgttgaatttagcttgctactgttttgttgaggatttttacatctatgttcaccagggatgtttgcctgtgaacatagatacaaaacatagatgttcaccagttgttgttgctgttgtgtccttgtctgcttttggtatcataatactgacctcataaaatgagttaggaagaattatctcctcttgctttttaacaggtagtttgagtagaattggtattaattattttttaaaagttaggtagaatatggcagtgaagtcatctgatactgggcttttctttggtggaagccattttattattgattcaattttgttactcttattagcctgttcagtttttctacttctttctaattcaatgttggtagtaggttgtatgtgtctaaaaatttatccatttcctataaatttttgagtttgttagtacatagtttttcataacagtcttttaggatttttttgtatttcagtgttatctattgtaatgtccattttttaccttctgattttgtttatttgggtctttcatcttttttttcttagtttaactagaagtttgtcaattttttttaaagacttttcatttcaataatcctttgtattattttttaagtctctatttcatttatttcagttctgatctttattatttttttcttctactaatactaggtttgatttgttcttacttttctagttcttgaggtgcatcattaggttatttaaaatctttatattttcttgatgtagatacatattgctataaacttccctcttaacactgcttttcctgtatccggtgtgttttgatgtgttgtgtttccatttttatttgtttcaagaaacttttagattttctgcttaatttactccatgacctaatggtcattcaagagtatgctgtttagtgtccatatatttgtagagtttcaaaaattcttcttgttattgatttctatttttttgtttattgtggtctgataagatatttgacttttgcaccttttcaacttttaaaagtttgttgaaacattttgtggccttacattgtttttcctggactgttttgtgtgctgatgagaagaatgtatattctgcagttgttggatgaaaggttctgtaaatgtctgttaagtccctttggctaaactgcagttttaatctgatgtttgttgattttctacctagatgagctgttaaatgttgagagtggatattaaagtccttaactatttctgtattgtagtctgtctgtctctttagatcaaataaaatttgttttatatatttaggtgccctgctgatgggtgcataaatatttagaaatgtcctcttgctgaattgatccctttgtcattatataatgacctggtttgtctctttgtactgttttttgacttaaagtttgttttatttgatataagtatagctattccagctcacttttggctttcatttgcatagaatatctttttttcattcctttactttctgtctatatgtgtctttacgagtgagatgaatttctttctttttttttattattatactttaagttttagggtacatgtgcacaatgtgcaggttagttacatatgtatacatgtgccatgctggtgtgctgcacccattaactcgtcatttagcattaggtatatctcctaatgctatccctcccccctgcccccaccccacaatagtacccagagtgtgatgttccccttcctctgtccatgtgttctcattgttcaattcccatctatgagtgagaacatgcagtgtttggttttttgtccttgcaatagtttactgagagtgatgatttccaatttcatccatgtccctacaaaggacatgaactcatcatttttttatggctgcatagtattccatggtgtatatgtgccacattttcttaatcgggtctatcattgttggacatttgggttggatccaagtctttgctattgtgaatagtgctgcaataaacatacatgtgcatgtgtctttatagcagcatgatttatagtcctttgggcatatacccagtaatgggatggctgggtcaaatggtatttctagttctaggtccctgaggaatcgccacactgacttccacaatggttgaactagtttacagtcccaccaacagtgtaaaagtgttcctatttctccacatcctctccagcacctgttgtttcctgactgtttaatgattgccattctaactggtgtgagatggtatctcattgtgattttgatttgcatatctctgatggccagtgatgatgagctttttttcatgtgtcttttgctgcataaatgtctttttttgagaagtgtgtgttcatatccttcgcccactttttgatggggttgtttttttcttgtcaatttgtttgagttcattgtagattctggatattagccctttgtcagatgagtaggttgcgaaaattttctcccattttgtaggttgcctgttcactctgatagtagtttcttttgctgtgcagaagctgtttagtttaattagatcccatttgtcaattttggcttttgttgccattgcttttggtgttttagacctgaagtccttgcccatgcctatgtcctgaatggcaatgcctagattttcttttgggtttttatggtttcaggtctaacatttaagtctttaatccatcttgaattaatttttgtataaggtgtaaggaagggatccagtttcagctttctacatatggctagccaattttcccagcaccatttattaaatagggaatcctttccccattgcttgtttttctcaggtttgtcaaagatcagatagttgtagatacatggcgttatttctgagggctctgttctgttccattgatctgtatctctgttttggtaccagtaccatgctgttttggttactgtagacttgtagtatagtttgaagtcaggtaatgtgatgcctccagctttgttcttttggcttaggattgacttggcgatgcgggctcttttttggtgccgtatgaactttaaagtagttttttccaattctgtgaagaaagtcattggtagattgatgggaatggcattgaatctataaattaccttgggcattatggccattttcatgatattgattcttcctacccatgagcatggaatgttcttccatttatttgtatcctcttttatttcattgagcagtggtttgtagttctccttgaagaggtccttcacgtcccttgtaagttggattcctaagtattttattctctttgaagcaattgtgaatgggagttcactcatgatttggctctctgtttgtttgttattggtgtataagaatgcttgtgatttttgtacattgattttgtatgctgagactttgctgaagttgcttaacagcttaaggagatatcgggctgagacaatggggttttctagatatacaatcatgtcatctgcaaacaaggacaatttgacttcctcttttcctaattgaataccctttatttccttctcctgcctaattgccctggccagaccttccaacactatattgaataggagtggtgagagagggcatccctgtcttgtgccagttttcaaagggaatgcttccagtttttgcccattcagtatgatattggctgtgggtttgtcatagatagctcttaatattttgagatacgtcacatcaattcctaatttattgagaatttttagcatgaagggttgttgaattttgtcaaaggctttttctgcatctattgagataatcatgtggtttttgtctttggctctgtttatatgctggattacatttattgatttgcgtatattgaaccagccttgcatcccagggatgaagcccacttgatcatggtggataagctttttgatgtgctgctggattcggtttgccagtattttattgaggatttttgcatcaatgttcatcaaggatattggtctaaaattctcttttttggttgtgtctctgcccggctttggtatcaggatgatgcgggcctcataaaatgagttagggaggattccctctttttctattgattggaatagtttcagaaggaatggtaccagttcctccttttacctctggtagaattcggctgtgaatccatctggtcctggactctttttggttggtaagctattgattattgccacaatttcagctcctgttattggtctattcagagattcaacttcttcctggtttagtcttgggagggtgtatatgtcgaggaatttatccatttcttctagattttctagtttatttgcatagaggtgtttgtagtattctctgatggtagtttgtatttctgtgggatcggtggtgatatcccttttatcattttttattgcgtctatttgattcttctctctttttttctttattagtcttgctagcagtctatcaattttgttgatcctttcaaaaaaccagctcctggattcattaatttgttgaagggttttttgtgtgtctatttccttcagttctgctctgattttagttgtttcttgccttctgctagcttttgaatgtgtttgctcttgcttttctggttcttttaattgtgatgttagggtgtcaattttggatctttcctgctttctcttgtgggcatttagtgctataaatttccctctacacactgctttgaatgtgtcccagcgattctggtatgttgtgtttttgttctcattggtgtcaaagaagatctttatttctgccttcatttcgttatgtacccagtagtcattcaggagcaggttgttcagtttccatgtagttgtgcggttttgagtgagtttcttaatcctgagttctagtttgattgcactgtggtctgagagacagtttgttataatttctttttttttacatttgctgaggagagctttacttcccagtatgtggtcaattttggaataggtgtggtgtggtgctgaaaaaatgtatattctgttgatttggggtggagagttctgtagatggctattaggtccgcttggtgcagagctgagttcaattcctgggtatccttgttaactttctgtctcgttgatctgtctaatgttgacagtgtggtgttaaagtctcccattattattgtgtgggagtctaagtctctttttaggtcactcaggacttgctttatgaatctgggtgctcctgtattgggtgcatatatatttaggatagttatctcttcttgttgaattgatccctttaccattatgtaatggccttctttgtctcttttgatctttgttggtttaaagtctgttttatcagagactaggattgcaacccctgcctttttttgttttccatttgcttggtcgatcttcctccatccttttattttgagcctatgtgtgtctctgcacgtgagatgggtttcctgaatacagcacactgatgggtcttgactctttatccaatttgccagtctgtgtcttttaattggagcatttagcccatttacatttaaagttaatattgttatgtgtgaatttgatcctgtcattatgatgatagctggttattttgctcattagttgatgcagtttcttcctagtctcgatggtctttacgttttggcatgattttgcagtggctggtcctggttgttcctttgcatgtttagtgcttccttcaggagctcttttagagcaggcctggtggtgacaaaatctctcagcatttgcttgtctgtaaagtattttatttctccttcacttatgaagcttagtttggctggatatgaaattctgggttgaaaattcttttctttaagaatgttgaatattggcccccactctcttctggcttgtagagtttctgccgagagatccgctgttagtctgatgggcttccctttgagggtaacccgacctttctctctggctgccgttaacattttttccttcatttcaactttggtaaatctgacaattatgtgtcttggagttgctcttctcgaggagtatctttgtggtgttctctgtatttcctgaatctgaatgttggcctgccttgctaggttggggaagttctcctggataatatcctgcagagttttttccaacttggttccattctccccgtctctttcaggtacaccaatcagatgtagatttggtcttttcacatagtcccatatttcttggaggctttgttcatttctttttattcttttttctctaaacttcccttctcgcttcatttcattcatttcatcttccatcactgataccctttcttccagttgatcgcatcggctcctgaggcttctgcattcttcacgcagttctcgagccttggctttcacctccgtcagctcctttaagcacttctctgtattgtttattctatttatacattcgtctaaatttttttcaaagttttcaactgctttgcctttggtttgaatttcctcctgtagctcggagtagtttgatcatctgaagccttcttctctcaacttgtcaacgtcattctccatccagctttgttctgttgctggtgaggaactgcgttcctttggaggaggagaggtgctctgctttttagagtttccagtttttctgctctgttttttccccatctttgtggtattatctacttttggtctttgatgatggtgatgtacagatgggttttggtgtggatgtcctttctgtttgttagttttccttctaacagacaggaccctcagctgcaggtctgttggagtttgctagaggaccactccagaccctgtttgcctgggtatcagcagcagtgtctgcagaactgcagattttcttgtaccgcgaatgctgctgtctgatcgttcctctggaagttttgtctcagaggagtatctcgccatgtgaggtgtcagtctgcccctactggggggtgcctcccagttaggctgctcgggggtcaggggtcagggacccagttgaggaggcagtctgcccgttctcagatctccagctgcctgctgggagaaccactgctctcttcaaagctgtcagacagggacattgaagtctgcagaggttactgctgtctttttgtttgtctgtgccctgcccccagaggtggagcctacagaggcaggcagacctccttgagctgtggtgggctccacccagttcaagcttcctggctgctttgtttacctaagtgagcctgggcaatggtgggcgcccctctcccagcctccctgccgcgttgcagtttgatctcagacttctgtgctagcaatcagcgagactccatgggcgtaggaccctccgagccaggtgcaggatataatctcctggtgcgccatttcctaagcccgtcagaaaagcgcagtattcgggtgggagtgacctggttttccaggtgctgtctgtcacccctttccttgaccaggaaagggaactccctgaccccttgcgcttcctgagtgaggcaatgcctcgccctgcttcggctcgcgcacagtgcactgcactgctgttctgtgcccactgtctggcactccctagtgagatgaacccggtacctcagatggaaatgcagaaatcacccctcttctgcgtcgctcacgctgggagctgtagaccggagctgttcctattcggtcatcttggcttctccccgagatgaatttcttgtaggcagtatatagttgggtcattaaaaaaatccattcagctagtcatatctttcaaatgaacaccttattgtgtttatatcaaaggttattattctttaattgtttttgtttgttttgtatatcgtttgttcccttctttctctcttattgtttatcattgcggtttagtggttttctgtagtggttccagaatttgtttggttcttttatatgatgtctatctctttatggaacttttcattaatatcctgatttttttttctttgtattgtttttctgtgttctctgtgtctcattgagcttctttgctataattattttgaatcttttttcaggcatttcatagatctatttttcactgaatattttgctgaataattattgtgctcctttagaggtgtcatacttcctggattttttatttcttgtgtccttttctgtccttatgttgatatctacacattttgtgtaatagttgcttgtttcaatttttttttttttttttgagacggagtctcactttgtcacccagtctggaatgcagtggcgccatcttggctgactgcaacttctgcctcccgggttcaagccattctcctgccttagcctcacaagtagctggaattacaggcccacagctaccatgacccactaacttttgtatttttagtagagaccaggtttcatcatgttgtttaggctggcctcaaactcctgacttcaggtgatccatccacctcggcctcccaaagtgttggaattacagatgtgagccaccatacccggccagcttttttcaatttttttggatggattttcataagggaaaatttttcctatggatttatctatggtattggttgagggggcactttcgctttgattatagggttagcagtagcatagtcctcatatgatttttacagcatcagtggtgtctgtgatttccgtttcttagactgtgattattagtggagactgtgttgaaattttactgggtgtaggagtgccaggtagttcagtcctgaggcccagtggtgttatcagtgggctaagtgtgcctgtctttaggctcctgtgtggcatacaagggcacgtgtgttagtgggctcaggtgggccaattgttgggcctccaggaagcttgcttcggttcagtagtggcagcagtgggcatgtgtgtggtgaattcctgggcccctaagcagtatgcatggcatgagaaatagcagtagtgatggtgggaccacccttggactctcaggcatcacatactggtgtttgcagtgcctgcaacaggctggatggaccagccctcaggagaagtgcacggacaccagcagtggtgaacaaggcagggctgttctcaggtccctgggtggcatgcttgggtacttgggggatagtgccaggggtgtgggcctgcccttagtgtcccctgatgggtgcatgggaataggctgtggtgaataggacagggcaatctccatgccccaggtataacaatgtatttcttttttacaaatatgcatttaccagttttctataatctctaccttttcttattttgcagtgcattttcattatgtatttatgaaaaaattatatagagatttatgcattcaagtgcttgttgacatttgttacattgtgtaactacaaaaccaccttcactactttgcttattaaccatagagtgttgagtgagaaacccagagaaaaggatataaactttggacagattatatggattaaatccagctctacgtctatatgctatggtttgttttttgagttacttagctgctgtctgccttggtttcctatttgacacatacttgatgggattgcacctgaataatggttatggaaattaaaggaattaatttaaggagagtgcctcacacacagatattgaatgaatgttggctattaatattattaatagaagacagattttcacatatttgtgagaataagagaaggcacatttttgtgagcattcttgtgagaataagagaaaccacatttctgaagcactagaattttcacacggtttttcaaaggaaggagatttatagacacacaattttacaaagaagacaatagtttaatctgacaagatattaaatataaatagaaaaatctacataatatcaccaaaacaactagtctaaaattaaaaccaaaaagtaccccaaactggagaaaatatcatagaaagtatttcagaagttctgtttattgatttataagtaaagatattttaaactgggaaatccagaagtagtttgatcagcgacttttagattacttgtacctttttctcaaggatttatattttattgttacagacagtagtctcaccattttgcccagactgggctcaaacttcagggctcaagtgatcctcttaccttacccttccaagtagctgggctacagatgtgtgccactgtgcccagctatatttatcttatagtttaataatattatctaatttttataattgtacttaaaataacagatttcaaagagttttattagcaactactgtgtcctgatcttgaaactgaaactatataccagaaaagattttttgatttttaattaggcaaaattattttctagcattgtcatattaaataaggttactactctaggatttttatgtatgtcctgttagattatctatatgtcagtaagtcatgaaaagcaattttcatgaaaacttggaattagaaatattatagattgtattcttttagttattttttccataatagatcaacatttttatcttggcaataactgctatagtttttgtaatcttcctcatacattacgtgttaatcttaaaaactgtggaaaatatgaaataaaaattttactcatgattaattcacaagagttaaacattattattttattgtgttttcttgtttttgttgtttatatagtatgtagtggtggccaaaagcattcctgaacagggagggtgggcttccccacttgttagctgtgtgatttcaattagttcttcacttttcccaaccttggttttgttatttataaaatgttaacaatagattttttattatactattattcagagaataaagtaaatatattaattacccatatataagtatacatgcatgtgtattttagatattctatttaatttataaatatatattgctttataaggtaatacttcatattactctataaatatatattatctgtacatatatttataaagtaaatatatattatgctgtatttccataataaaccattatatattttttttatgtatatattacatataatagtttatattatatataaaataatggttatatattaataatggttttatatattatatattatatattacatactatatataatatatgaaaccattatatattatatataaaaccattatttatacatttatatatataaaatgatttatgctggaaatgcagttctgtataatctaaatctaatttaacacaacaccatttaagatgtatttaatttccatctagttgagtatttttcaaaacatgattttttagtgcttatataagaaaacatcgtgaatttatttagaaatttccctattttggtcattcagtagatttccactctttttttttttttttctaaaaacaaaacaatggatatgtagccttcattcttagctccgattttcttaatgctaattccagaaagaggaattactgggttaaaataaacataaatatttttaaggctctcttacgttttgtgctgcaaaattaccctttctgttgacagttatatattttaaaacgctcaaaatgtatcttcccaattctgttgatgatttttgtgactacctgtgtaatatatgtaatatgtcctctgaatattaactcgggtcagagacaaatatcagtcaaatcctcaggctcaggatgtatgcctcaatgaacactactagttttcactatgcatccttcagggtatgtgaaaatagtcagtagaatttataaaatgaaggtttggaatctgagttattttcccaagagatttatgaactataaaataatattattatgttctcttattgcattgtgctctttagccatcttccattttatgtggtatagctccttaggatccatttggttgaaagctactgtgtatactcattttgtattgtattgtggcaaatgctgtaatctacagggttcctattcatttcacagctcactaattgtgtgaatgagaagaggaaatatatgcttttattctaaagcatgccaagcagatggccaaagttcattactaggagcattgtcagtgtggctgtcttttctaggtagtaagcctggcatcgatctgtcaaacacagagtgagggtccatttaacacagcacttgaaaatcactgagcctctgttttgttatgacttataaacattttatttttttatcatcaacctccaaagtggttggtcatttgagcaggtgcaaacacagtagaattcatatttgttttacctgagaagccaaatgaacttttattcatatggaaatcttggggaaaggaaaccgtacaagagattaagcttagtttcttgaaaagcgggtaatacagctattgagattcaaaactaccatcatttctgagattgaaacttttgaaaatttaagttgaagaaaaagatcagggtttatatctttttaaagctaaaagattaaaacaatgaaagaatttaaggttttaagtaagtctcccttaaaatcttggtttcttcctataaaaggaaactgtttacttacttttatatagaatatgtaatttatgtgaccattaaaaatgttagcaatgtactcattgtgtgtgtgtgtgtgtgtgtgtgtgtgtataagtgagacagagtaagaatcagagatagtgacaaaaaggaaataaagcctgtcttcatacatgtcctacttcaacggcagtactaggactatatgtaattgggttatttcaggaaaaggagggtaggtcaaattttcttatggagctgatgtagtaatttgatcataatgtcttgtttaagagaacgagagcatgttagagataacgttttcttctttatacaaagaaaaatgggatatatatttcccttacctcttccctcttcctccttgcaaaccatctaccacaagttctacaagttatattgactataaatttccctttcccttgcttttcagactgatgctgctctaatgtatgatgctgtgcatgtggtgtctgtggccgttcaacagtttccccagatgacagtcagttccttgcagtgtaatcgacataaaccctggcgcttcgggacccgctttatgagtctaattaaagaggtaagttaggagaagaacatctgccttgtctcttttgttgtcaagctgaatgaagtgagattattgtggtttttctagcaagtgtccttttactttatgtttaatttaaattttctctcttactccaaataagcaaaattaacatttttactaaataataccaaatgaaaggtgaggggaaacaaaatatctatcaaagtatctatgagggttagcatttacctttctgaatctttattacttttcctttatgtagagatatagattaataaaggaatgtttatattttaggcaacaaaatataaaatgcatttttaacataaatgtcatttgcactacagcaaaattatacctaatttgtgaggcttcaagtatagttattcagattaattgttcctaaatatgtctagttatttaaattatatttacaattaacaaaaatagaatgtatggattaatcaaagtgcaaaatttactccatgttatataatgcaaccattcttatgaccatatatcatttctgactatgtctgttatagatcaagaatattcatagtgagaaaaagtttttgaagatcatacatacatacatatatacatgcatatatatacaaatatgtatacgtatatatttttcctgtcaaaaaagaaagtcctttgttaacttagaatacttttcatagatgaaagtttaactgtgccttaatctttgcaatgaaatatcacaggtattattaccatatgaaattttttattaatggcttaaaataaatcatcagttcatcttgtaataaattattcatcatgaaaataaaagtgcaaataggatcataattaagtatctctgaatatccatgaattttctttgtctaattcttatcaaactctcaggtagatgaattaatagtttcgaagaatatgcagtttattagttgccccatattctaacatttacttctggtttaaaactgaaacttagtgagctgtagacacagtccacaggtctggcgagatgaagaattgatttttctgaactcagcactagattattgaaacaatgacgtgtcaagcagccctaaaagaagcagttgtatgacattccccattgtatttattgtagggtgtaattgagaatcttgtccactaaatcacacagtgtcccccttatgaggaccaacaggagaaatttctctcaggtctcagtgccaggaaaagctctttctcctgagcagctggtatgtcttaaattatagaccctgtatattgtgtttttatcatattttcttctttgttttggttgctaggaagttcagaattgaatttgtgataaaattacttgtgcaatttcacctggtatacatttctttatgctctctctaccccagatttgttcttctgttttacacttctattcttgtacttcttgatctttttgtttacttttatactattgtccattttggttagtcacttgaaagtttttctttggaagccattaggctaaaaatatttttttcttccttattccaaaccagtgaacacatgtttaactttagcaaagacatgttgcaatatgtttatgaatatgtattaaactttttctatttcatttgtaatttattagctgaaaactaagaatcttgcacataagtatccaaatatcatatggagcctcagaaatttagtaatattaatttcaaatccttattgaaatattacccttaatctactgatatttacttcttttgggtcttggttatattattttaaacattttagttgtgagtatacattttataattgaaaatttctgtatttaactactttttcctaagctatttccaaatgacaaacaatggaaaacatctaattgtggttctataaccaacagaatgggaaaactttttacgttaaaaaagtccagatatttactcaccttttagggttgaacatattatacagctagattattatattcccatctcctccatgaagtatatcttgatatgaagtaattataatacatttcccttgcccttacttagtggaaagctagggggaatgtatataattgagttagtataacatagcttttcctggattcagtttctcttattgtaataagttccttttcatgttattatgaatttagtagtgggattttataacagtagttctaactgtatttgccagtgagatatttaatatctcatacaccataaaaagtaactaaattcttctcactttagttaaagaggtacactacttaaaacataataatacaatgtctcctagacagaaaattgtaactggaaaatgcattgtataaaatgaaaaatttatagtaaattttctgctgaaactaggataatttatgtagaaaaacatttttcaaatttcagaagaaaattaaaatattttaaaaatctctagcaatgtaaactgaaaagtaatgaatataagtttcctacttttgtgaaaaaatgtttattccatctttcttcacttatttattatcaatgtttttctattcccataggcacattgggaaggcctcacaggcagaataactttcaacaaaaccaatggcttgagaacagattttgatttggatgtgatcagtctgaaggaagaaggtctagaaaaggtatttcagtgagcttatttgctttaattactaaatgaaacatatctcaaagaagacaaatattctctgttgtagtcacatttcattgacatttaactttattgagtaactctaaaaataaatagttaattcattatattgaatataataattgacaattaggattcaaggataaagggtatcttaagacaattttatattttattttctaactagagatttttctgatgcatataatgtttgaagtgcatataatgttaattagtcttaaggtttaatatagcaattagaaaatatttggtttaatatgggtctttatacatgcagcttataatcacttatggttgcatagactttccaacttggagcaggccattaagaaattaaatataaaagtatgtttctattttttgagtcatatttaagtgaaatatttgaattcatgtatgcacagtaactagggtatatacataaatgtaacataccacactggatctatcttacttgattttattgctagggattgtggtaaaacacccaaagaatgtgggtatgtgcctacttaatgaatattttagtgtgagttttcttaaatacataatgtatgtatttagatatttttctgatagattcattgataattgacaagagatattaaatctttttatatgttatttagatgttattaaatcttattagatcttattaaaataagaacttgagaaaaattatatgtgactgagataatattgctttgaagatagtaagctatcttatatttcacccagcaatgaaacatgcagctttatttctagacagaaactgaagaggaaagctgagacctacgaagggctttcttagtctggaagataacagcatatttgaatgctgattcaaaccatccaggacagagtaaaattgcatttttgatagtgtccccaagacagttttaaatacattatgaccaactgatgactcaaactgatagagctgttacctcctgccactgaggatttcaaactgtacactttgtgaagaccaagcaaagtcaggaatattttataataaactggaacccaaatattcatgagacagtcccttcctaactgtctcactctccagatgagaaaattagtctgtgtccaagactggagttgataatggtagaattcagtaagctcgtgaggagtttatcttactgtttactggagatgttattactttatttatttatttatgaaatatcgaaatcactaggaggaatttggaccattgctgacatttcaatacatctgcataaaatggcagtgctcttcatattaccatagatccattcctgtcttgaattcaaaataaatgaaacattacaaaattttctctgtgctccattgtggcttacagatacgcctgaatataatggttatcaagtacatatgatgatctatcacactgataagcaaggtaaaccagtgtgagttgttcaggttgctctgagatttcataaatattttatattattttctaaaatctgaaaattcattttgctgaattaattatgttcagtccttatcctcaaggggcttttcatgtacagtgataagataatacatatttgtaaataaatacaatcaaaagctatatgtttcaagctttcaaaagaccaataaaaatataatttctgataaaagatataattaatcaagagtcatagtcaattgagtacttagaattagcctttgaatatgttgaattattgattgttagaaaatcagtcattttagaaggaagtagaagtatggggaaacacaaacatagcgtttgattttatcattacacacatacacatacaaataaagctaaaatgctagattttagtcataacatagataccatgtccaagatatttgcagggtattagaacacaatgtgagtttaaagaaagaatagccctgaaggctatgggttacttgggaagataatatagtttagaataattttagtatgaggccatgaatttaaaaccattctaataggaagtggagatgagtaaacagtttgtgacagaaggcattaactgaaccatcagcaatgttgttagttcaaagactagcaaagcatttggactatgtttttaaggagaaatggaggagccaggtaggaaaagggagataccagggataaaagcataactcaaatattggaaaatgaattagcaagtaggggaattactagtagaaataaactggcataaaccttcccctgaaaagacagataaggtaccgaggatgggtggaggtaagttaaagagaaagggagcaaaaagttcacatcacatgttttcaatatccttgaaaatttgtacatgaactcatcagctaaaggacagcggtaaagtttagtcggttcttaagaaaaattgaaaattccattttgacagacttgattttgacttagaaggaacaaaatgctgctaagtagcaaaaagtcctcattttaaatttagtagaatagtttacagctcaaggtctagattcagagatattttggctcaaattctcactctgccctttactttttgtggacaaatttattaatctctctaaaacacagcgtcttacactgaatcatgaggcaacagcagttatctgcctcatgatgactgagtgttattgacttgactttttttctgcctagaaagtatagttaccaacccatagatggaaaagacagcatccctaccctgatggaattcacagtttagaagggccaatagatggtgatccaagaggcttgaatttcagttccaattctatcaaaactaagcatgtgaacttcatcctgccaccgaacttctctgtgccaaattcatcaccttaaaaaaaaaaaaaagtgcagggcaaagggctgccctcttggacagtctgaagtgagaatactatggcctctaaaagaacccggaagtaccatcttgaaataaattgatgctagaaattttaatcgttaaaatttaacaattatgttctatcatgactgagagacaaaaataaagaaggaaaacatgtaaagtgctaggtttatccctcttctcatgcctattgccttttcttcattctcattctgtcttggtcatcttagaccagcacacttcatttagtaggttaatcttctaacaaatatggaaggaatgtctgttttatgccctcatgaaggttataatctaatagaggaaacctgccaataataaatagactcattagacttataaaattataagattgggcagtaataagtgctgaaaagaaggtcattttgtttttatgtcactgacatgatagattttacataatgttcggaaacatgaacttcaggatgaaaacagttaacaggaaggaagtctatgcttctgttgtttacaactgtggagcagataaaccaggaagaaaccagtatgcttctgatgaatgggaaaaggtgggccatgctcaagtgtctgagcctggagtggagatgggcatcctttctacttagatggtgtccatagatcaaatgaattctttctactctattataacagaagccttaattggaacccagcccaattcactgtggtcccaaaaagatcaccgatactgtatacacagccagccacttctgtgcaaacaagctctctgggaccatggcagtgccttcaatggaggaggggagggcaagaagggggaaagacagtaggtactattacagactttgcctagttcaggcaatacttttgcttatgagaggctggtattgagcactcaggaacaggaaaaggaaaacagaataagtgattttccaagcttgaattcttctggtcagttcaaggatcatatagtgtattctactttcaaaatatgtttagaatccattcatctctcaccacatccgttgctgaatcataaccatagtacctttcaactgtacaactacattggaattcccacaagcctctctcttcaattctgttataatccattccctaaaccacagcagccaggcagatatttttaaaaggaaattgacccctgtcatccctctgtttaaatgctttcatagattctcattgtgttttgaataaaatccaaagcaccagtgacctctcatcatgtcatcatgttctcagatattttcttctgccctacctacagagggtttttttttttttctcatttcctcaagaaaacaaagttttcttatcactttggcatagagtaatagaaacagttttcccagccaggaatatccattcccagttcctttgcctggggaactcttactcatcctggtagtatcatcttaaatattacttccttagataggcctcctctaagtctctaatcaagtttaaatttctcctaatgctctgccctttttaatttctgactctatcaaagtacacaattatttattcacgtgaactttataaaagggctatctccctagccagagtgcaagacctactagatggaaaatatatgctcccttttccactactatatattaaggctttgcaaagtatcctttgtcttgaggacaaagtatgtactcaagaaatatttgttgactgttgaatgaataaagaatctttatggaaattatgagatacttcacacagaacgcttactcaagtgtctgatgcagagttattttcctgtagcacagtttgttgcttttcctagctttgctctatacctccaacatgaggacagggaaagacaatagtcaagggatcagtgggttggggtcatgggtcaatgtttcaagtgggtaaaggattttagattgcagaaggtcaccctgaagtcggaaattgtaaggatccacattgcttcagtggtaaatctggccccattcatggcacaattaaaaactctctgaccttccagtattacattaaacagtaaaactcaacattctatttataaatgttccttttttgtccttacaagttacagtatggaaataaacaaagctcacccaaatgagaacaagtggaagttactattcagaacttactacaggaagggagacagccttcatcacttgcattaaacagggattcaaaggcaagcaggggagtggaaaagtttcatagtggaaagaaatgaagacctcaggtgtgctgtgattggagattgctggcatgaggaaactggagttggtctaacaaagcagggcacctagataatgggttttggggggcacatttgactttctctggctggttctgatttggagggtggcaaaaaattgggaaactggaagtaataggatgaatcctgattgttttgggtagattgcctgctgagattgtgtttggcttcctgaggtgctcactccagagcttctgggtcatagtttgtcatcacacatggtttggtcattgtctatttgtgtattcagtctgtgagtggaattactgaagtaatttggagggagaagaatagcaaaaataaaaagaagcaggaaaaatttacttgtgaggaaatataaaaacatcatcaccaacaataaaattgtttttttggtttgttttgtttttgttgtttagaatgtgtaaccaggatgtaacttattgttggaagtggtttatccttattgttccatcacctgaagcttagctatgtgcttaggaaagaccagctctagagggaagaaaacacaaaactgatggcataagatgttacagaaatattcaggaagatcttagactgtaacttcaaaaggatatcatttacagcaaaaagagttggaagagttccacacaaaatgggtttagactgagttgatgacattatataaaatagtgcaatttcattgcaagatgagctacctagaagccatttttgggaaaacaaccacttaaatttagaaaagaatttcctataggaaactgtaatgcaataataaaatccctgaatcttaactcatgattgaattttcttttaaactctcctatgtgaccacaaagtacttcgtgtgttttccaagagaaaaaagtcagtcttttactgttacactttcctggttattcaaaataatttttattgtactacagaatatttgtttctaagtacaggtgtaaattaaaattattcttgtgtacttctcttatcctttttctagcatcaaattttgccaatctgattactttgtggatattctcctgtgtgatatttaaatgaaaatagacattggagaatagaattccctatctcctcagcagataggctctaataaaccattattaaaattggctttatgtattaatattatattaactttgaaaaatagaaaggataaaactgataaatttctttggacagaaatagtgctgagggaccttgaagcatttgggactataaaaaacaatcacaatgtgtttgccccagcgtaggtttgtaataaaatcagatttagtttgtgtatcctttgggaaaatcttaaaaaaaaatacagaaagacattttatgaaatatatgtttgtcaatttctatagttaataatataaatataaaaataatttgtaaatgtcttataaatagtatttataaataatataaagcaatatattgcacatttacacacctctaaaaggtttaaatttgtcatattttactttcatgtgaagcttcattttaacttttaacacttatgctttttaaatatttactgcttgcatccaccagtatagagactagtattaatccacagactttttgctaaaactcaactatcttgataatatatgaggaggataagaattgatagtgaaaccctgcctgcctgagtttacaggcttatgtgttctagaattagaacatgtttcaaagtgctttttgaatattttttgtaaagtatgtattttgaagaaaaagtggttatttctacagaaatctttactattgacctttcttttacttgttgactcctgccctcattaaacttcatatgaaaaaggtgcctgaatggaatttaaattttctgaacttatctaaatctgaaaatctacctcagataggtgaaatttacattaattatagatttctagaaccggatgcacggcagtttttatcttcctctctttggtggcatttgatacatatacccagtgcccatggcaacagtgacccccaacttgtccaggaactgagatttatcttgccttcctctacgaaagcaattttaatggtgatgttaactcgtaaactttaaattagtcaaaaagtgatgtttgcttctctaaaaacaaaaatacttcctgggcaggatccaagcctattgcctttctttggagatgttagccatttaatttgtctaactcttatatagaattcattataaaccctgtctcagaactgtaccgacatttttgtgtgtcagtgtgtatagttattattttgtttggcaactttacactttcaggacgataaaatatttcagaaaactatttatgaatgatgtttatgtttagaaatcaatcagattgccttatttgaggtcacagaatttattgttttggttcccaaaaagtcttattttggcccaccaatgaatattaaatattggcttttttcttttaaccactaaatttgaattaacatatatatatgtataaattacaattatgatatatataacataattgtaattgattgatttgatttcaaatcaaatcaaatctgacctacatttttatctgtggaaaaatggcttttaactgaatggtatcgtattttcatatttgggaacatgtaattcattaattcaaacattatttaaaaaatcaaaatcacaacctgtctgttaactctttaattgtgcttagcattaaattgccctaaactaaaataaaaatcttaaatgagaaaaatcagtgtttagttagattattaattcctttccatgagatgattatatacttactgatttattgtactcatattagcactatagttctcgaatggtaaaatccgagatcctatgcacactagttgagagtttcaggacgctgattacgaaagcgttctttgccctatccttataggccaattaacttatatctgaaggtcagccaatttccagacaattgctctggactcaaattctagctggcaggaagcacataggctttgctgtaaaatatttctttttgttttctagagctcaggtgccaatgcttaagtgctctcttttcaacacttagttcaatggaagtaaacagttattaaacttcggtgtcaagggttattagacggtaatgcaactaactatctctacttttcatttaactattcatcatttgaaggagtgaagtaaggaaaacaaaagtctctaatttcccactaatagtgagaaaactaatctgttgaaaaaaatttctgtacccaatattcatgcattgtattggcttgagaaacccaggttttcagaaataataggtatatgagttaatagagaaataaacagtccactagtgtatattcagtcaattgcaggaaacatctttcatacgtaaatcagcatttaatataaatctctttcttatgctttctatttctcaattccctcaaacagtactatcggggtgccaacttttttccaagggaagtagtcaatatacttcaaggaaaactatactttgtaggtcatatggttgggggcaactcattactggaaagaaatttctttaagcaaacatattctaagatggagagtctgcattgtgctaagactgttggaaacccatgtacagtgtggtttctcattatcatcacacaggatctctgtggaaaactatggcttatattctttattcaaggctgacacattctcctgacattaagtcaaaacaatgtacaatcaaataactttcttttttacatttttacattgttgtctaatggaaaactatattgcttctttttccatctaccaacatccagtgaatattttgtgagtcaatgccagtaagaaagtataaagagaattttgatagatttgtatcaggtattttttagtggagaatttaaattatttcttaatttaaaataaatttaactttatttggaactaatatttttaaaactaactgggaatgtttattttgttcctacttgaaaaatttcttgtatacatatcaagcaaattatttccataaatttcatagaaaataagaaatgtgtgacattgatccggtgtacacaaaacagagctaacatgcatctttagaagaaaagatgctactttcagaggttaacaattatatagcccaatagaggaaatagaaacattttttggatttaaagtagtaatatgagttacaaaacaaaatttgtactgagaaaactgtcaccaaaaataaacaaataaacaataaagaagcaactaattaataagataaataatttaaaaattattctgaaaactgttgttttctacctagaaaaaaatacacagaaaccaaagagaaaatatacttataaaacaaaattatatgaataatttacacattcctgaaaaacaaaacctatagtgtaaaatatttatttaaaatacttataaaatataattaggaaaaaatggaaattcatagtaaaggtatgtggcataatatttcaaacattaaatatgatattgagatagatcttaaaacattaagaataacacaaaaaacatgaagataaaatatggaaaacaaaatatgtaattataaaagaatagacacatatgtatgttcaacatttgccaaatgaatgaatgatattggaaagtcaaccaaaaaagtctgaaagtttttatcatggagtaattcactcacttactctatttatttattcaataaatattcattggatatttattatataatttaaagattgatgaaatgtttcgttttgtgaaggcacttagagtttaacacagcaggatcaataaaaatgaaatataatttggattcaaagcaatacataagtggcatttctgagatgaggaaaataaaacatttatttctgttcaataaatattattatttatgttcaataaataaaacgtttattggttatataaccagtatgttcagagatctcacatataaagcccgtaggatgtcctatattcaaaggccttggggtaaaaagatgagtatgccaaagtctccatccgtagggaattagtttttactagacagagataagtaaacagttaaaatataatatgatacttattgtagtaagtaaaagcataactaaattgctgtgtatggaagcgtaataaacgatcatccattactgcacagaggaggaattgttttacctatattttgaaacagtaattaagatacatgcataaggtagtgaaaagggaaagagtacaccttctatagaagacatgaggacacaaataattgagaactacaagatgcaacaaagtctatgttcagaaaatggagaaatgcattatatttctgacaatttaagaaaagaaccattgtttctctctctttctactcagtctttaggtaacatattttgcaaaaagttcatatatacatgatatacacatccgtatataacatatacataaatgctatgtatgcatatacataaatgtactatatatagagatacatgcatacatctacatagacatatgtaaacatccacatatacacacacacacacacacatatacacacacatatgtacttgttgagatttaatatttccaaatgataatactgaagactttcaagaaaaaatattcaccaatagcaaaatacatatgaggtagctctcagtctttttgagcaacattaatactagagaaaaatgaataaaacttagctctgaaggaagacggctctgatataataggtcttcatttagctaagttttctttatataagaaggcagcaaaaatacctttaagtctgcaaccataaaagtatgtcacataattatcttttataataaattatcttgtgtaagtacaatgataagtgaaaagcaaatactcagaagaaactgtggctagatatcctagtaaacatcaaattcagttaagcacaaaaaaagatagttttgaataatgactttacaaattatatcaaaattacaaccttttccttgtagcaaaataattcataatacacaaagcaaaataaagagaggcagtgtttacaaccccacattaaattaactaaaaccggctgggcacggtggctcatgcttgtaatttcaccactttgggaggccaaggcaggcagatcacctgaggtcaggagttcaagaccagcctggccaatatggtgaaacccatcttttctaaaaatataaaaattagctgggcatggtagtgggtgcctgtaatcccagctacttgggaggctgaggtggggagaattgcttgaacccaggaagtagaggttgcagtgagccgacattgtgccagtgcactccagcttgaaggacaaagcaagctccatctcaaaaaaaaaaaaaaatgttaactaaaactgtgaatcagtatgtgtggcagcagaatgggacaaagcatagataattttcgtagagtagatatttcaatttttatggctgaatattcgtttttcagcatgatagtaatatttcaaacagaagctgataatacacattagtagacttaaatgtattttatctcccaattaccataggaaaatttccaggagtagaaagtaaataataaacaccaaacaatgtgaaaggagcaaggctaaataaagataagattcagtaagagaaaaagttaggacattgaaaaaatctactaaggcactaattataaaaaaatccaacaaaatgagaaatatgttgaaagtgaaaatatatataatgatttatcagcaaatgcaaagaaacaaataatggaggtaaagtaagtgtgattaataatatatattgagagtttacgtaaaacaaagtaattgaaataaaaacagttatttttatcaataacaccatctacagttaaaagacttgacaattataaacctttataatataatctgatgttattcaaactattaaaagctaaattgttatacagttgtcttatggaaactaccatgaactgtaaagggaaagataacaagtagagaaattattttggaaagttatttggcaacatatagtaataatcttaacaactcagattatctgtgctcagtcattctaattctagaaatctgtttttaaaatgataaaatgtgtgaacaaatatttataaataaatgtgtttactaaggccttgtaacaatgatagttgaatcacgatatgttcatatgatcattttgtgtagtcattataattatggatttgattatctttggtgccaggagaaaatgctcacaatagtgtataaacagaatataattagtaattgtcataattatagcatacttataaacacactatgttgaatactttttcatttaatcacactatgttgaatactttttcatttaatcttcactatagtttatgaagtagatactattatttcccatttacagatgggagaattgtgacacaaagaaataatgtacccgagtcacctgatgttaagtggtggacataggatcctggcagtcaaatacgctgtccataaaagctgggccattaacaacaaggctatgatggaaactgtgcaaggaatgtgtgtggaaagacaaatgacaggaaaaaataggaccacaatattaaccatgattgactctgggtgtattcataggatcaaagtttaaattgatcttcttcttatatcttctgcatattttataatctcatgacaattaatatgcattctttttctgaccacaagaagaaatcaaagagccaatcagaacataaaataaaaatgaataaaatcataattttctatagctccttatgacttttgaagcactttcatatttcttgtatctaattgaatccttataattagaatggccctataatttattacacaaatcatgatattttttatttgtacaagagggtattattaatgaaaacagtacctgggcaaaccaggatgtagagtcaccatatataaaacaattctgtaaggtcaacagtgcttaagcatcttaattgcgtttcagagctaaaaaaaaaaaaaagtatttcaaaggcttgatcaagtcatatgacaaaatagtggttcccgaatagacaaaaatagattgctatcactttgtccatgttttttgccattaaaacaaaacaaaacctctggtgacaatttcctcaatggaagaaagttttgaatcatgtagttgacaatctaggaatatctaaaattttatttgacttaaaatattaaagccactgatatttctgaaatgtcataatattacgctaagaaagctgagatttacaaaagaggataactaatacttgtgaatataggaaattgtagattcatgtaatattcatctgtgtcagaactccaaaaaaactagaaaagcaactaaccaataatgaaactagagaagtattttcagatggtaagttgagtgaacatttagctaaattatttttataaaagtaataatggagggtggcattatgtgaaatgggaaattctttgtattagttacttggttagaaagttgaaaactttctaaggttttattagatagacgacagtgaacaaatgatgtttgtcagtggtttcactggtagcattacacatctgaaaatcttagctattttgccaatttatattaaaaaaaaaagtaaaatctaagggaacaaatgcatgataggtattaattatggaccaggtatagaaaagtgacagtcattcactgcaaaatactatctgcagatgtgtcttgtttagccaagagtatttgcaaatgattttaaatttgaaacactttggccgggcacagtggctcacgcctgtaatcccagcactttgggaggccaaggcaggcggaccatgaggtcaagagatcgagaccaaactggccaacatggtgaaactaaaaatacaaatacaaaatactaaaaatacaaaaattagccgagcgtgttggcgggcgcctgcagtcccagctactcgggaggctgaggcaggagaattgcttgaacccgggaggcagaggttgcagtgagcagagattgcaccattgcacttcagcctggtgacagagcaagactccatctcaaaaatagataaataaataaattaattaatttttaaaaaattaaatagtttaagcaggtcaacaggcattctagttttgacacccctccatccttccctacccaggtccccagcaggccctctactagccctggtggtgccttaccggaaactcaactaaagcacctgctctgggaacatgcagccccaaggcacacagctgttggaaaagcaggattgggattgtggcccctcctttctactgtgtcttgacattttgtgagatttaaaaattgcacatacttgcatagaaattcttactacggccctgtacattatcatgtttcacattgatatgaccggcttggctcctgaagcctttcattattgactctgaaatagaattaggctccatctttaggacattgtcataagcatagtctaatgtaaagaaatgtaaattggccagtaggtggtttagtttggaaagaatactgaattacttgactttttccttcctaacaccaacatcaggaatatacagaatttaatggtgagaggaaaattaactccatatgaggaaatatggcaaagagattatgctgatgggacctttgttagcatatttagttagaacagagtaaataatacctgctaaatcaatgccattttaaaaagacttaatttatatacaaagacttattttaaagataatttgatagttttccttttctttgagaaaaataagttggatacttgtctaggagagtatggaagacaaattttgttattgattactcctgggtatgagacagtgaggaaaaagaactgatttcacatcttcttttgcctctgctcttccttgctgctgatcattgttatatgatagtgcaatggtataagtgtcaataaaccatctaatgaatgcattttgtgacatcctgtgcttacgtgtttcttctggaggcttatctgcattatctcatagtctgtgttcagtgaatacaaaatgtctaaacactgtgagtatatgacctaatctatcagaagatattagttaaattaaaattcatattaaatggatcacagaagaaagtattggaatgtgttattcagatcagattttactgtcttctcctttcttgggagcactttaaaaggtgcaaagatgcgtttttaaatctccaaagataattctgggcatggtcttatcccaccaggggtagtgcaaaatactattcaatgcttcccttaagcctacctttacctattaatttatcttggatccctagattttgcgctgtcttttagctttgtctgtataatatggcatgttatctttatgagaggatgaaatagatccattacagtaaaagatgtatgccattaatgagtttctagccagctatcaaggtatcatcaaatgtggtttatcttggtgaatgaaagcttgaatggaaaattaagctcccacactgactggagaagttcagtggatcgttttgttctttaatgttacacttcactgaacacacttcacagagccgtgaatcatgctttaaacaagctgcctttactttaacggcagcagacaatgcagcaaaggtgaataataagtgttagcaatcttaactttcttttgcagtactctctaccacgtgcctgatggacaatttacaaagtacatatgctattttatagattggaacgtgggatccagccagtggcctgaatatgacagaaagtcaaaagggaaagccagcgaacatcacagattccttatccaatcgttctttgattgttaccaccattttggtaagtatttgcttttccattattcttagttaaatgtagatgaacacagaagtgcatagaaaaggacattataattggaacagcaatgaacagaatgtattttacagttatttagcaattactgtacaacagatgagtcaatgttaatttagtcacagttttgttagtcttaaatgatctaaattgtattaacgtttgggctgtttatgttgactaataatacagcttaatgtattactggaaatcttttcatttttccaaaattagttactattgaggaattgtcaatgtcaagacttgaaaaatacgtgcagctctataaatatagttaagtgatgagccaaaagtgaactttgcttctgcttttattttccgcaaatatatttcatagggcatggcacttatttttcagaattttttctcattataattatattttaactttattttcaattttattgttttcatcttggaaaattaattttactttatgaatttccctaatgtaaccaaatggcaagtgctttttaaagccagaaatattttcagcactgacagacttaatattgttaagctagatgtttttacccctcttatatttatttatatcttttaattagatcacacagtaatgttcgcttatgcccactatgtcatttgcaaaagggaattttaatttaggataagcaaatagctcttacattatttagtcagtacttttcacctaccaaataagcttatcaatgaccattcttattaatcctcaggtagtcagtaaaaattgagagtaatatctagaacaaactaccatgaacatttagcatttatataatttctaaatttgatttatggtgggaaatcaagctatgaggaatatatattcttgcccctttagtagcaacgagggatgtcagatctgtaggcatgtcaaaatgaagtagcttgggttaaagccttttgataatgaagcaaagctgataatcatgaagtgacagtgatgaaagtcataaagtttttaaccaatctgtggctaaggacctcagtggatactcgctctctctgtcacatccaaacgtctaagacacccttttacttaattttctatcttcctttcttttcaaagataactcccatacccaccaacctagccctcttcttcagtcaaaatgttctcacagtacaattacacatcctctttctgatctacatgccactatgttctggatctcattacttcctgttgggactattgcagtagccacgtaactatttcttctgcctgtggctttcctcctttgcagtgcacccaagtcccaccataaaagtctaattctgttccaggcaaatggtgactgcttgaacaaggacaacatcaacaacaacaacacaacaacgacaatctaatcctgtcatttctctacttctttgttatacagattgttagagaatccttattgaccattaaaaagccaacaaatttaaatttttatatatagggtcctctatggtcttactctctctcacctttttatcttcacttcccattattttctttcaggaaccgtgtgttttaattgaattgggataaccagttagcctgctacatagttttgtgaatgctcttcccttgctctgcaatatgcttatctcaatttctgagatatagtattcatcagtaatatatgacttaatattcatattatgctattcttatttcatgtgtgcattattttcccaaatatcactaaacattccttggaggaatagaattagattatgtcttctgtttctataccatatgtacctctgcaatgatcataggatcaataattctgggtagaaaacatctgtagccttcagtaatctggcccctacactcctttctatcatcttcctgatctagccaaattcctcaaaacatcacttattttatggctccaaatcttcgctcaattcttcttcttctcctcctccttcttcttcgatggagtcttgctctgttgccagtctggagtgcagactcatgatctcggctcactgcaaactccacctcccaggttcaaacgattctcctgcctcagcttcctgagtagctgggactacaggcgcgctaccactcctagctaatttttgtatttttagtagagatggggtttcaccatattggccaggatggtctcgatctcttgacctcgtgatccgcctgcctcagcctcccaaagtgttcggattataggcgtgagccactgcacccagcctgctcaattcttctttatgttctgcagtaaaaatcctattcattttcttgtatccatctcaaatgctacccacttcatgaaaatctttgacagctccattaagttgcctgtgtcttggggagaaggaggaagtttgtatactttatgtaccagaatactccatcatggcattatcatttttttaattaaaaaactatgtatgtttgtgtttccacttgacataagctctataatcaaattttacactttctgatttctcaatgtcggagaaaagtgccttgggtatagcaagagctcaataaatatttgtcaaattaaattaaataaatgatatttaattaaatgggaaattagacgaagtacagaactttcaaatgactatatttaaatatttttcaagtgtgcaggttattaaaattatctagtacaaataaagcaggtgattaagagtacccatataatttctcaatcttgcttcagtattcagtgttattttttgagaagtgttcagatattgcttctcaatcataatcaagtttatatctctctatgaagaagtggtatctaattttatcttcatatcagagtcagctctaaagctttaataaatacactaatgcctaaaacgtaccccataccatttgaaacagtatttctggactttgaatcttggacactttgatttttttaattttcacaggtaacacaaatctataaccatgattaagaactatagctcagattattactccatatgaataagatgtaagatcaactatggaagatgcactaagctctcattttaataaacaggttatttatattttagagtatgccaactacttgtttctaaaagatcctaatatttcctaaaaggataaaataaggcactttatttttataccttttagttaaaaaaaaattcctttttctgaatactctgacttcaacatatccatagtcaagtaaagaacagatttgaagagattatgtaccttatttatgtaagcttatttttgatgtaatttactggtattctatttgtatttttggagaaattatgattttttgattgatgttatgattattttgcccttttctcttgaaatatcttagaggaaattctggctacattatgaataatgacatttctcccatatccctatcatgggaaggagatacaaggagatgttaacttgtgcttcttgttcaacatttttattacgtgtctttaaaaaatgatgaggtattctggaattcagcactatccacaagctaattataatcagctctatttctcatgaattctattcattcacttatttaattttattcattattttatttgatgaatatgtattgaataataatgatatactaagcactgtatttaaagctaacaaaatagacatgatcgcttcccttattgaacttagaaaatggcaggaattcatatggagagttttacacacacacacacacacacacacacacacacacacaaacacatacaacttataattaagatataaaagaaaagtaaatgatacggtgccttaatatacagggtaattttgagttatactagatgtcaggagtggaagggcaagtcaggttaggactcacagtagaagaatagacagctgagactgagagtttgaggaggaattagcaaggtgaagaaagggcaagggagtattctaggcgaagagaacagcatattcaagcatcctaaagcgggaaagggcttggaaaattttgtggaattgaaagaccattatgactggtgctaatgcctcgatctgcttctcagctgcttccagtataaatgtatgaatatggtccactacaaaaaatcatagcagacatgtattacatgcctactgtgtcccagacatagtttgaaacactatccatggatttattcgtttacttgtaataataaacttttgaagtagacactattagcaccattacttatttatagtattatatatatattttttcttttttttaggttagaaagctgatgtttatacagcctaagtattttactcatggccatacaactagaaggtggagtagttgtagggtttcaaccaatctgtttatccaacctgagcagctgatactataaaatgaaaattctagtggtcaaatatagaaaaggctaacacttatagtttatgatcaaaatagcatcttgattgataattatttacctaaagcaatgtttctcatccagaagtcccacatatgctagaactttgtgatgcccttagagatgtgcctccaaatatctaaacattttttctctacggagaacattatttaggctactcttgcgtgaatatgttgggtttctagtctctgcactcccctcatttagtacttagttttcttttactctctttaaactataatctcagattctcctgggcaatcaagacggtataggagctcacttcattttttctcttaagaattgcaatgtttacacatgtttttactccactttaataacatgacctagacccagtacattgtacgggtacagtacatagttgtattatgcagtaaatttacatagagagcattaaacatttattttatatatttttttatttttgaattaagatttatgatataaaattggagatttatggatcgtcaactacaggtctatgcctaaagctcagctctatttatgccctaattttattgtttgtgattttccatattgcctctttcatctttgaatttcaagttcggttgttgttaaaattctctgtttttttgtgtttatcgttattaatggaactagaactattatctttcaaattatattttcatttatgatgattttatttattgcatagaggttgttaaaatatgagttcctaattgtcaaaaataataacaaaaatacaatttttgagcaagtagtagagagattttaaagtataacgtgctaaaccttcagtttgtaacctggtcttgttgctgctgctgttagctatgggaagtatcaggggactaagtattattttatttatttgtttgtttatttctatgggttttcgggggaacaggtgatgtttgtttacatgagtaagttctgtttttttttttttgtttttttttttgatggagtctcgctctgtcgcccaggctgcagtgcagtagcatgatctctgctcactgcaacctccgcctcccatgttcaagtgattctcctgcctcagcctcctgagtagctgggattacaagcactgccaccatgcctggctaattttttgtatttttgtggagatggtgttgtatttttgtagagacggtgaccatgttggtcaggctggtcttgaactcctgacttgtggtgatcttccagcctcggcctcccgaagtgctgggattacaggtgtgagccaccatgcccggccatgagttaactctttagtggtgatttgtgagattttggtgcactcatcacccaagcagtatataccgtacccaattttgcagtcttttatccctcacacccctcttgccctttcccctaagttcccaaattccattgtatcattcttatgtctttgcatcttcatagcttagctcccatttatgagtgacaacatacagtgtttggttttctattcctgagttacttcacttagaataatggtctccaattattcaagttaatataggaaatgcctactttttcctctaaattcttagttttcgatagacatttttcactcctgtctgactatgttgagtgtttctcattgtgctatgcctgtataataattaatttttgtccatcaaaagattagtagcatttaaatgctactgcacatgttccttcttttgttgactagtaacactttagcatacaaatgactatgcatttggttactttttcagaaaagcatttattgtcaaggagattccttctccccagtggctcagtgaatttaacaaatgtacttgctcctgaaaacttagtcgtattttttattttcccagtactttgtggaaggtattacagtatccactttacttgcttaagcttgtaaagcttttgtgtcacagcccacagatacggaaggcttactgggaagcaaatttccaatgacaattgaaaagtacacagtacaaaagagagaagtgaccgaattatcccctaagtggttctgtagcttcttctataatatcaacaaaagcagtttttttctaaggcttcaaatctgccactgcaataagttttccctctgattctcgtctttccattgtggtagaaggactgtcaagcatgaagttcttagagagttgcatagcatttgggcttggaaacccagacactgcaacttcacaaagaagaaaaatattttccttctcagcaatctcagtcacatattaaaatgcgagataagagtgactcattcaaactaaagtcttctccaaccccattcctacaatcagcttgttcagacaaccacactttttctcaccatattttttcttctatttcagagattgtgctggtactacatttctctctttcattcttgctctgataactcagtgtgttttatttcaaatgtattttatttctcatattttcagagacttccacaaagctagtcaaatataaaactattgatggtggtagagaaagaagaaataaagaaagtcatgagttttgatgtaaaattaggtataattttgaaaatcctagggtcttaatttctaaagccttctaagtgccagaacctcattttttacttcatatacacattctttttcctttgtcctttattaaatctgacttaaattaactaccatgatgaagacttataagcagttttgcctttatgttattttttattccaaacattattgtccatactataaaattgacaattttataattgtcaatactaaaatggttgaagactattttattatgatcagtatattaagttttgtataaaagaatgaatagaaaaatctgaattttgaattcagctcagccactagcaaaatatgtgaaaatgaaatatttttgccttaacattctcatttttttaggaagatgttatcacaataggaccatatacacttgtacaatctgaattttagctacaaccttgaactgagattcaaatgtaaatttgcaattacttactggacatatatccacttagatatacagtatcatgctccacatgcatcaaacctccttctttgattcaggactcacaatgctgattttgcctatattttcaatctctatttatgattccagtacctttctattcaccccagccagaggtgtgttttcttagattcctcagtccctttaaaacccatactcacaattcaagtacctaaaggagaaagagtagattattctaagaaagttcaacagagaagtaatcaagaacattttgaacaaatgagatatgatttgttcatgggtactactgaatgggtgattatttttagagtctgctttgagaggcactgtacttataggaaagaggaaagagatggcaacattaaaaactaagtataaggtttcttgggaatgcattagatagggcaaaaatctattgaggaatgtggatgaagacgtaaaggttaaaagcctagaagcagggatgatagcactgccacagcgtgtgatggggatggtgggaaaggagatgatgaatgatactcaagtatgtatggagatgttggcaatgacttttgagcagtcaaatcttgattatttatgtaaggggataataaattagattcagagatgaaatgctgtttggagattagctaataggtacagtctcctttcccatcaaaccttttactggaaccacaatgaaatagtacatttgattgattcaaacttcagctttttctttcttactatctttcccttgtaaattaaactacccaaaattttaatgaccaaaatagaaattatcagcagaaagatagtaacaaccaactgaaggaatttaatagcataccatttaaaaaaaatgacgttttttcttaatacaagcatgaatgatagtcactatgccgaatcctcccttaagatatattactctgacatcagtaaattcctttcttgaaacattggtgaacagcacaactagcaaaactcaccttttttttcttgaaagtcgagttcaactattacacaatcattatttccataagactcactacaatttccagtaagtaaatattacttttcagggagaaagaagttattctcatcttcccaaatcccagtagattttctatagttacaggataaaaacagaaacttttcttagaattataattatggccaacaagacttagatttttgtacattttgaaattctctaaagttatgtttctgaaataaggtaaatacagtttgcagaaactacgtatatgattatgcttgcatagtttatgaaagatttatgtgtgtgtaagtatgaaaatcactcctggcaaagattgcctttgcttaatagacttgaggaagaaagtagaaaagaagaaaataaaagaatttttctagattgcctcagaatgtacttgaattttgtttaaaaaagtaaataataagcatggtttattaaaaaacttattagggttattgctctataagcctggcatactatttgtttttgctttaaaacatagccccacattggattaaaaaaacaaaacaaaacaaaaaaaaaccaatatcagtctttctgctatcttcagaagaaccatttcacatgtaatgacacccatagactcaaaataaaaggatggagaaagatctgtcacacaggtggaaaacaaaaaaaggacagggattgctatttttgtattagataaaaagataaaatagacttcaaagcaacaatagtacaaaagtacaaagaatgacattacataatgataaagagttaaattcaacaagaagatttactactctaaatgcatatgtattcaatattggagctcccacgttcataaaaccttacttctagacccaagaaaagactttaacagctacacgatagtagtgaaggacttcaacacaccactgacagaattagagagacgattgaggcagaaaacaaagaaattctgcacttaaatttggcacttgaccaattggacctaataggcagctacagaatcttccatccaaaacccacagaatatacattcttctcatctgcacacataacatactctaagattgaccacaaacttcatcataaagcaagtctcaataagttttaaaaaactgaaatcacaccaagcatcttctcagagcacagtagaataaaaatagaaagcaacaccaagaggaactctcaaaaccacacaaatacatagaaactaaacaacctgctcttgaatgatttttgtgcaaacaatgaaattaagggagaaatttaaagaaatctttgaaatcggaaaatagacacacagtataccaaaacctctggaatgtgtgaaaagcagtgataagaagaaagtttatggtgctaaatgcctacatcaagaagatagaaagatctcaaattaacaacctaatctcaacctaaaggaactagaaaaacaagaacaaactaaatccagagctagcgtaaaaaagaaataactataatcagagcaaaactaaatggagacccagaaaacatataaaggatcgatgaaatgaaaagatgggtcttcgaaaggataacaacattgatatactgctagctagattaacaaagaatgaaaagagagaagatccaactaagcacaactgaacacaacatatgtgatattacaactgattccacagaaatacaaaagatcctgagactactatgaacatcactatggacacaaactagaaaatccagagaaactgaataaatatctagaaacacacaaccttccaagattgaaccaggacaaaacagaaatcctgaacagactaataatgagcaaaggaattgaatcattattgctgatcaacccaaaaagctgtggaccagatggactcacaactgaattctattatatgcacaaagaagagctggtgcagatcctactgagattattccaaaaatttgaggtggaaggactcttccctaactcattctataaagcagcataatcctgataccaaaatctggcaaagatacaacaaagaagaaaactataggccaatattcttgatgaacatagacacaaaaattctcaacaaaatgtaaccaaacaaaatccagcagcacatgaaaacattagttcaacatgatcaagtaggctttattcctggaatgcaaggatggttcaacatatgcaaataaataaatgtgattcaccacataaacagaattaagaaaaaaacatatggtcatctgaatagatgcagaaatgcattcaataaaatacaacatcatttcataataaaaatcctcaacaaaccaggcattgaagaaataagaactgtcaatgctaaacccacagccaacatcatactgactggggaaaggttggaagcatggcccttaagaactggaacaagacaaggatatccactctcaccagttctattcaacattttacttgaagttctagtcagagcattcaggcaacagaaagaaataaaaggcatccaaataggaaaagaggaagtaacattatttctcttcactgaatttatgattttatacctaaaaaaccctgaagattcctccaaggactcatagacctgataaatgacttcagcaaagtctcagaatacaaaattaacatacacaaatcagttgcatttttatacaccaatagcattcagactgagacccaaatcaagaatgcaatcccatttacaatagccataaaaatataaagaacctaggaatacacctaattaaaaaatgcgaaatgtctttatgaggagcactaaagacaaaacaacaacaacagcaacaacaaaatcacgctgaaagatgacacaaataaatggaaaagcattccatgctcatttcatgctcatgagttggatgaatcaatatcattatattgtccatactgcccaaagcaatctatagattccacactaatcctgtcaaattaccaatgtcatttttcatagaatttgaaaaagaaactattctaaaattcatattgaaacaaaaaagaggctgaatatctacggcaactctatacaaaaagagaaaagccagaggcatcacactacctgacttcaaataatactacaaggctacagtaaccaaaacagcatgggattggtataaatatagacacataaaccaatgtaacagaatagaaaactcagaaataaggctacactcctacaaccaactgatctttgacaaaatcgacaaaaacaaataatggaaaaggatatcttattcaatgaatggttctgggaaactggctaaccatatgcacaagaatgaaactggaccactacttttcactctatacaaaaagtaactgaagatatatcaaggaaattaaatctaaggcctcaaactgtaaaaatcctggaagaaaaccaaggaaatatttttctagacattggccaaaaatttatgactaagtcctcaaaagcaactgcagcaaaaccaaaaattgacaagtgtgacctacttaaagaagttctacatgcaaaaaaatatttgcaaactatgcatccaacaaaagattaatatccagaatctaaaaggaacttaaaaagaaaaggaaatatccccattaaaaagtgggcaaagaatatgaactggcacttctcaaaagaagacatacaagaagccaacaagcatatgaacaaatgctcagcattactaatcatcagagaaatgcaaatcaaaaccacagtgagatgccatctcacaccagtcagaatggctattattaaaaaagtaaaaaaaaaaacccacagatgctggtgaggtgggggaaaaaaggtaatgcttacattgttggtgggaatgctaattagttcagcccctgtagaaagcaatttggagatttctcaaagaattaaaaatagaattgccatgtgactcagcaatctaacacagaaacagaaaaccaaatactgtatgttctcacttataagtgggagctaaacattggtacacatggaaacaagatgggaacaatagatactggaaattccaaagagggagggagaaaaagagaaagaaagaaaggcttgaaaacatcctattggataccacattcttggttgacagggtcatgagaagcccaaacttcagcatcacttagcatatccatgtaacaaacctgcacatgtaacccctgaatctaaaataaaaaataatttaaaaataaaacacaaactctagattatgatagttattccttttatatgtagaaagttcatttgaaagtgattttttaatagtatcgagatatcaaaataggattttttttccagacaataaaacatatatgagcccatgtggagataattatcatcagtagtttttgattttcacaaaccagtcatctccagtgttgccttttcttgaaaacattgagttgtactgatggtagcttcgaggcttcttttcttgttcttcctggtattctcacttctaattttgataacctgtggtgcaccatggcttctgacatgaacactaattagggatggcagaattcaggcttgaagagccacagtgaataggaggaaattgaaagatggactcagacaatgacaagaaggttcttagctctacagaagtaagagtacatttgttggaatgacagatactgaaaaagaaataaaataatactgtcctgtcagtggaataatatcaatcaactgttattattatttatagttacctattattgttcttgttggtcatttcttgtgactgtgaattagaacttagtttttggcatgtccaattcaatttctgtgtattttttcctgtagcatttacgggagtatgagttattgatatgcaatgaaaatactagtagttaaggttattgtcaactaatattcttaaatatatgacccctttccaattttgagatcacagttttgctatgtacatttataaaacttaaaaaatttaactgagaacaaaataactgaagactattttagaatgcctaaaatatagtttagattagtggtggtatttattaaaataatttaaatcacaagcttggtatcatctgtaggctctggaaataaaagaagttatcagtctttataaatgttaatgatactagattcccattaaatctcatcaggttaaaaatacagttttaatgaatgaaaataaatgcagtataaaggaatcatttacaaataatgtaataatctttacttctgcatttctttttatataatttctgaaacttttctaaatgatcagctaaattagcacttaaatatattttgttttctaatcttgataaatttgaaactcttttaaaaattgttttacagttataagactcacaattttagtcacgctcattaacaaataattggctatctaagaaaaaaaccccaaaactcttttatttctcaccataataataaataattttatgaaatgttcttaaatagtaaaaaagaaacattttctgaagcaatttaggataaatgtaagaacaatcatttccaaccaataatcacaaattattaaaagttaggccataagaatattagctcttcattctgcttgacagtatttgagcatggcttggcttcttacttggcaggtggcctggcactcctatgccagctgtcaagctgaagacgtggctggacagatactttagaagagctacgtatgatgttctgagtgagatctaaagaaaaacagaaactgaagaaacaaaacataaagtttgcctgcattaagagcctgtttttctgtaatatacatttcatttttttaaaatcttgaacccactctttcaatacaggtgcccattattataaattctggttttggctttagagttcaaataattcaaattatctgcaaatctgtaatcaaagaactgtctagatgtccataatgaaagctatcctcattactactgtgaaatatttgcttcatctcaactttccgatgaaattctcatgaaaattcagaagaaacaacacaaatacaattttaaaagtgatattttaaaataacgttaaaggagaactatcacaatttcaatagaatacacaaatagactttattgggatagatttctgtggttgaatgtttttaatgctataaatatagaaaaatatcttatttttgaatttttttcttatcttgagtcaatttatggaaatgctcctgtatttaagagatttacaattaattgttcattaattatatgccctttggtgagaactttactcttcatgcctgatcttgtttttcgttgttgttgtttgtttgttttgttttgttttgagacggagtcttgctctgtcgcccaggctggagtgcagtggcatgatctcagctcactgcaaccttcgcctcccaggttcaagcaattccctgcctcatcttcctaaggagctggaattacaggtgcctaccaccatgcccggctaatttttttttgtatttgtagtagaaactgggtttcaccatcttggccaggctggtcttgaattcctgacctcgtgatccacccacctcggcctcccaaagtggcctgttcttgttttaacagcattttcttttattattcttaacaatgataatagatttatgctcaagaaaaccttttatttatactttttcaataaattatttttcaagaatgggcactaaatacaaatgaataacttgataatctacagagattgtcattaactttcaaattgtacttattatgattaatatattaattaatttttgaatggcaaaaatacttatattccagcaataagctattattggtaatggttaaaaaatattctcatgaactgctatattttgtttgctctattatatttaggtatattcactagtgactgctcaataattacaatatttaactactttgctagtttcttatatcagggttatgctaacttcatttaaatgaagatgaactggtttcagagcatttactatggtctaaagcagtttttggattatgaggttgttttattgttttatattaggtgaaaaataaaaattccaaagtatttttttcttctggaagaaatgcttcagtagctttcataatttattttatgcttattggccttttcattttattgtttctttttgaatcaattttatattgtgcactgatatataaccaggtattcaaatttattaacatagattttcacataatgtcaccatataaattttataatctcaatttactgaatctctttctcacataaaattctttgaggcttaaaatttctttcccttttttcttaatttggttgatgaagaaatttattttattactgttgcttttactaaaagacatgtttactgtttagccattttcttccttcctactttgtacttcactattttttcagcattttcttattatttttctttctgctatttgggtttttttggagcgtctatttcccagcctcttatgatttaagtactccatttatttatgttgattttaatcacttagtggtaagttcatatgaggctgaacttttctttcacaagtcttttgaagatatttataaattaaaagttgtatagctagtgattaccagagtgctttgaaatcaagcagaacactcatcgcttaaatcaaaccagactttggatttcagataacagttatttaataattcatttaaataatacactttaaaaaactacttttaacatctacacatttctttttatttagggaaatttagacaattttgtttattaaagctagtgttcatggtttttttaaatatcaccttccagggcagacatggtggttgggatgacttgacacctgaagttcaagagcagccagggcaacataggaagaccctattactacaaataataaaataaaaaaaaatagccaggaattttgacatgcacctgtggtcccagctactggagaggctgaagtgggagtactacctgagcttgggagatcaaggctagtgagccatgatcttatcactgcactccagcctgggtgacatagtgagaccctgtctctaaataaataaaaacttacatacatacataaagtcaacttccacattttttgtcccttaacttgactagtgccaataagtatctttaaatgaagtgtgtatgtttactaattttcattccattcatttattgcctggtgaagtgactgaaacattaaattttttcaattttcacatttcctcttgaaagcaattttgatatttttttcattggtttaactttggttttattctggctagccagttttattttaacttgtttaaagcttacaagactattctccactttatgtttgtaatttgtttttatacgttgatttttgtcaggctgggtttaagtaagggtgatttaaatttatttgacagttttctatgaaaatgtcattccttcatcctccaaaattcttaccaatctgaaaaaactacccattataaaaagaggtacagattacctatgagttccttttttttttttttttttttttttgagacaaaatctcactctgtcgcccaggcaggattgtagtggcatgacctcggctcactgcaacttccatcccccgggttcaagtgattctcatgcctcagccccccgagcagctaggattgcaggcacccgccaccacgcctggctaatttttgtattttagtagagatggggtttcaccatgtttgccaggctcaaactcctgatctcaggtgatccacccgcctcggcctcccaaagtgctgggattacagccgtgaaccatggcgcccagcctatgagtttcttttatgtctttggaagcataccctgaagttatatgttttcctgctgcaacatggctttgttttcctctagcctctgaagtagctaggactttttttcaccatactcctgggaattttctttaccgatcttctgtgctacagccccatttcctggatcttattcttgcatttttcttgaattattttctcattttgttaaaggctgtaatagcatcctgagaaaggttgctgagtacaaatttaagaccttatatgcccaaaaacattgagtcttccatgaagaattataggttgaatttttggggaggcattactccattgcctttttctgctgttgcagttgttcacaggtcattctgattcttaaccttttgtatgtggcctgtatttttccttcctatgaacaatttcaagattgtctctatttctgaagcttggaaacttcactaatgatatactcttgtgtatagaattaaaaatgaattttaaaaatttaaaaacttcattatgttgaacattctctagagtcttgatttgtgccgtccaatacggtagcttcgtcacatatgactattaaacacttgacacctggcttgattgaatggagatgactgttagtgtgaaataaatactggctttcaaagacatgatatttaaaaacgtaaaatatcttaaatttatattgattacatgttgaaatgatagtgataatattttgatatattaggttaaagaaaataactgatgaaattgaattcatctttaactttttaaaaatatggttattagcagaagctacattatatgtgtgctcctttttggggcttgttgctatatatatagttatatatatatatatatgtatgtgtatatatatatatatatattttttttttttttttttttttgagacagagtctcactctgtcacccaggctggagtgcagtggtgtgatcttggctcactgcaacctctgcctccagggtttaagtgattcttctgcctcagcctcccgagtagctgggactacaaatgcacgccaccacgcctggctaatttttgtatttttagtagagatggggtttcaccatattggccaggctggtcttgaactcctgaccctttgatctgccctcctcggcctcccaaagtgccaggattacaggtgtgagccaccatgcctggcctgttgcattatatttctattcagcagcactggtccagaatcttgttgggcatattcaatccagaaactcagttccttcagtcttgagatattttcttaacattagttaacatggtaatttcctttccatcatttctcattgtctgtatcactgagtattggtcatctgacggttagacttccaagtaccatgtaaacaatagatagattctgtttgttttaaacattgatgtccaggtctcacatccagacattcaggttgatgaaacccagacagtattgtctgaaatctccctacatgattctactgattgtctaacttgcagtcgtgtgatgagtaagttctggagatctaagctacaacatgatgagtattgctaatgatagtatattgcaaatttgaaacctgttgagagattagatcttaactattcttaccacacacactaagaggttaactgtgaggtgatggatatgttagtcaactttgattgtgttaatcatttcataatgtatatatataccaaacattgtttcataagccctaaatatatgcagtttttatctctgaattatacctcaataaagctggaaaaaaagaaaaagggaaaatagtctggggaattaattttaggctgatgcacatttttatttagtcttctagatttcaacatagtgcttaatctctgcgaatctagagccacttcaattcaattacttcttcagttttctgccagggtcaggacaaaaagaatgggtagttctccagaaatgggttgaaatttctacctaatttactacttggtacagattatggacctctgaacacggacttttgttggggagaagaatgaaatatttcttgtactgtctctggttaatcaaggattattggtttcctggggccttatatttagtgtcaattcttcaaaaatgataggtaaagttctttatggggttcaggacatgctacccccaaatgtgtctccgtggtattaagaaagtctaggaaggtcactttcttttccccttctcccccaaagcacgtcataagactctcatctgagaggtaccctccctacacttggaagaaaagaacatccttatctctgaaatcacagggacacagagaagaatatgaacaaacagttcttgctaagtttccctcagtttattactgttagatcctacccttttgttctcaaatcctatttccccttaactgtccattcttcatcaaacttaagcataaaagtacataagtttacttcattttggagagtcttcatttctgaaggtttccatgtcatgtaaaacttgtattaaataaatttgtatgttttgctcttgttaatctgtattttgttatagaggccacagccattaatctagtgatgggtgaaaaaagaaatcaacccaccaagattccttaatcaattgcctgtaactctatatattttcaatgtgtaacaaaaaggtcatggattccagccacatgtgtaagccaagttgaccaccctgctgtgccagtggaaacacactgtcacagtaagactgtggtattacctacgtatcaataagaccacagacggaattttgtatctgcaatttttccatttcaagagttcatttattttaaacataattcattaccaacagctaaccctctttttttcactctattaatacaacttttttttttttttgagacggagacttgctcttgttgcccaggctggagtgcaatggtgcgatctcggctcactgcaacctctgcctcctgggttccagcaattctcgtgcctcagcctcccaagtagctgggattacagctgcccaccaccacgcctggctaattttttgtatttttagtagagacgaggtttcaccattttggccaggctggtctcaaactcttgacctcaggtgaaccacctacgttggccttctgaagtgctgggattacaggcttgagccactgtgcccagaaatacagcttatttcttaaaaatagtctggaatatgcttttttttttaattgaatgaggctctttttgatgccaggttcatgctcctgcaccagttttgtttgtttgtttgtttgtttttacaagaatgcctacaacttaccagttaccttcaaacacaattttttgtacatatctgaattttgtgcctacaaacttttagcaagactccaggctactctgactttcactgttctgaatttgtatctttgctcataacctcacaactactttggttgggtgccagtagaggcaatgccagtgcttacttttcaccaatccttgagctgtatttggtttaggaatatgagtctattaggtgaagaaggaatgtaagatatttcagatagtggggaaaagtatatttgaaggcacagatgtgtgaaagagtttaggatatatgaataactctaagtagtctaccactgatgtagcacagaaaatgtaagggactggtgatggatgagtgtgaacagataggcaacatcaaagtagaaagcctttgtaagtttcctgaaggaatttagtttttatgatattaaagaaattttgaaggatttaaaatacatgaacagtatgatcaagttgggggttttaaagatcccttttagttttgaaggtggaattgttgttcactggacaagatttggtgagaacagccaaaaaatattgcaagaatacaagctgataagatctgaattatggaagactctaaagggatgagggaaagaaatcagatttgtaagatatatgggggaaaaatgaagaatatatcatttgcaaattggactttatgaagtcagaatttaggaagacatctttctgataaatatgactggaaatgggattgaggtaaaaaagcagaattgaaataatacaggatgaatttaattttgaacatattgcattttattttcttgtaatatattgatctagttggcagttagatatgtaattccagagctcaagagaatgttctggcttggagataacttttggagttaagatgatggttggtctcatgaataatggtgtgatagttcactcagggagcacatacgtgtttcagtacatttacactattggacatttctttcttctcctgacactatttcagtgattctgtcctaaaacttactgtattctgtttggtttgacaaacaattataaattatgggcttccaaagaaggtaaaaagcatctgggattaaaagaataaaatgtcctttgagtctggctcacaagttctttaagcatattgggaaatgatgattgtaagatgacagccatgagacattcaaaaccagtaaatcctgaatatgtcagatacctgcaacctaacttcatttcctgatacttatcggattcccaggtcctgatctctgtgttttcaactacaacttgagtacttgacattgatttctaattacttctcttcatttgagatttattggatactcttaatgacagactatatcctgactccaattaaccccactacagtgactcaaaaagaaagttacagacttcttcctctcatagaaaacacacatattttgtcttgctggcatcactggaatcagtgctttaacataaaaatccacaataacagatgagtccttggtttatccatttatcagtcaattattttattaggcatatttcttattaggtgtttatatatagtgacattaattaggtgcctaacctggaatgaatattcttaacttgaatcctataaattttatattctgagctctcttagctttagttctacatagtaattgattaaaaaaacaaacaaacaaaaagcatgaatttattttaactactttgagtaatctcatattggaaaagcaaacaaaacattttttcactacttcatcagaggattaataaaagaaagaaatgctttcgccatatagttgtttgaaaaacatttcatgttatatgaagaataccttatgctacattcaaatataattatagccaaaggcactaaaatatttattttcatgtatgtcacagctttatgtctttaaaaactcaaaatttgtatttgctgtttttaacttttaaatttacattgttggcaagtatgatactccctgaccttgaagagaaacaaaacagtaccttcaaagtgaagcacacactttttgtgccctcgagcaatagcattccgtgtttactatttgtttacatcagaatttcagtgtgctccacagttctgataggtataaatatataggcacaccctaaaactatcctgtacttaaatagattttagaggatactgggttaagcagcaaagtttgttaggttttgttatcactgaatgtttaacaaattcacgtgcattgtgaatatctcagaatgattttttttttttggtacggtttctctctctgttgcccaggctagagtgcagtggagcaatctcagcccactgcaaactctgccccccaggttcaagctactctcttgcctcagcctcccgagtagctgggattacaggcacccaccaccatgcccggctaagttttgtatttttagtagagatgggggtttgccatgttggccaggctggtctcgaactcctgacctcgagtgatccacctgcctgagcctcccaaagtgctgggattacaagcgtgagccaccccgcccagcctgcagaaagattttttgaaactaaaacttggggcataatttctcagaagaatacactgtggaaaacaataagttagactctgacgattttgaagcccttacaaatatttataatggaattcacttatacgtgcaaatctatgaactacataccctaccaataattagcagaagagcagaccatttctataattagttgacacttggtacctggatttaatatctaactgaaaagaagctttcagtaaggtctgcgagttgaatggaaaaatggaagtcagaatctggttttgaatcgtgagcctgccacttagtagttgatttactttaggtaagttgccataactggagtggggataataataatgaataacttgaagtttgtttctattagagataaaaatttataaattatataacatcattcctggcacaaaattgtcagtgagtgatcgtttttaacgaccacagggtaatctaaaattaaaacataataaatggtgttcttcgttgctatttccccccggactttctaatatgttttttaacattttctccttatgggccaccattcctcttcttcaggccatgtgttggtgaacttcttctctatatcctctctcaattcatttctcttgcttggaaattcatttatctccatttacctaattcatactcattctactcatacctttttctggtggtttttcctctgggatgatttaactgactgacttgggacatttttacttttcccttctctcacatctaatgatccttttttctataaaatgttatctttatgcatttaaatgcaaacttttagtattagtttatatttttctgtacaagttctctgtcctcaactagattaaaaggtgcttgagagaagcaactctgtcttaaagcagagtattttctttaaaatgataggtattcaaaaaacttttttttattttattgattacaaaaggcagcagctgaaagttaaactcactattcattatagaaaaagaactttcagtagacagatgtggctaactactactgatcattgaggaataattctcattgcacaagatctttttcatgtctgttttacatgcatattcagtgacattgaaggagttttccagtgtctgatcaacttttgagtgggatgtgggtagaaagcaagttagtattgagttctttattctaattcatttctctatcaatgtgtttccatttgttttggagaaacaaacagaagtagaggatggcaaacactggaatctcctttctaacaccagagggcctccaaacaaaatgttcagtgaattaaaagaaatagaattctagtcattgaaaactccaccttctaatctttggatgcaaaatgtcttcatttttcgattggctccatctttctttcatacattcaaatttattcgatctttaagtagtgaaaaatacataaagagaatattgaagaaaaaaaattcaacctcatttattacaccaaaattggttttaggtagatgctttaaaacaattttaggaaatggaatgccattctaagcaggatatgaattcaaagagtggtaatcagcaataattatatctggatagtttgtcagagtttgtgggggtaaagatttttcctaacttaggccttcatgtccttgtatccccctgtctttcttgctccacacttttcttcacttaagtcctacagaactatttatactttccatcatccacatgagtcattttccctcttcaaagtatttccatctacgccacttctttaactccatagttatctgtcttgactgcatatttgaccagctaaataatttctatcccatgtgcaaaatgaaaatgagggatctcttgttgaacaagtactaagaatttcaaaaggacactagcagagcagaaaacccaaaagcagagtcctttgaaacgttgggccctgtaccacagcacaggtcacgtccccatgaatctggcccaactgcacgttataatcacataggaagttgttttttgctttgtttcatttttaaataatgatgctaaggtagtgctcagatgcattagatcagaatttctgggggtaaggcccagacctcagttttgtaattttaattgcattttaattgtaaaaaatttaagtttattttaattttaatgtgtagccaaggctgggcaccaaattcaaaggctatttccttgtgacttggcatatacttacctatttacttttctatctctctcatgagaccattgagttccttaagagtagatatcatatctttttagccttttcatctttatgacatagaacaacacctggaacattttagatatctattaaatagattatactgaatgaatgattaaatagatactaatatgacctcatttttaattttacagggtgtaatcaagaaaaaaagaaagtaaaggcagacttattggatgataatttgaaagtgtaaagagaaaacatactcttagaaaaaatgtaataaaatatttgagaaattagatctaaatttactttttaaatgaagggtattgagagatacaatagtcccctcaattctgtgcttaaggggaaaattatcttatttacactattactcattaaactttcagagttgaggaaaagcaagaataaggaaaaaagatgggagaatgtttacagaattaaggaaatatgatgtttctcaatatgtgtgtaatacagttgaataataggagaataaatttgtggtagaagattccttctcaaagaacgacatggcttgtgaatggtactagaactggaaaataatgagccattattagcactagttttgtctgatcaaattaatagaataaatgtaattgctcataagcactagtaaagaacaatcttaagcatttgctagttttaaataatttggtccagattttaacatagcatacattttccattatatgattgtgctagatgtttacacataatgtaagagtatggcacatataaatagcccattattatgttgtgtttatagtatatcatagcaatttgaggacacatgacatgtctcatttttttctttttggtacagcgtttggcaaactaagttcagagggctagatacatgttttttgtattttctcttttatttaggtaaaacttacatgatgcaaaattcatcattttcaccaaagtatgtaattcagtggttttcagtatgttcacaatattgtgcagatatcaccactatctagttccagatcattttcataacccctaaagaaaactctgtatccattaatcatttattctgcgttcattgtttgtttgttgttgttgttgttgttgttgttgtcgttttgagacagggtcccattctctgtcaccaaagctggagagtagtggtgctatcatagctgactgcaacctccaactcctggctcaagcagtcctcccacttcagcctcccaagtagctaggactgcaagcacacaccaccaggcctggctaatatttttattttgtacagatggggtctcgctatgttgcccaagtgggtcctggcctcaaacagttctccctgcatagcatcccaaagcactgagattacaggtgttagctactgtgcccagccttgcatttgtttttacccatgaggccctggcaatagcctatctgctttctctttctatggtttgcgtactctggatatttctgggtgactagaatcatgtactgtgtggctttttgtgtctgcctgctttcacttagcataatattttcaaggttcatccatgctgtaacatgtatcaatacttcaatacttttatgattaaatgatattccattttatgcatattcatcatttagtttatctgtgaaaccactgattggcattcagtttatctccaaaatttggctattgtgaaaagttctgctatgcacattggttcacagtttttgtttaaacaccaatttttaatctttttgggtatatacctaagaatagcattgctgagttttatggtaattccatatttaactttttgaggagctgccaatattttttttatagcagctgcacaatttcactttctcactagcaaatgtatgaaggttctattttctctatatcctcaccaacttgttactttcatttttaaaattataaaacatcctggtaggtgtgaagtggtatcttactgcggtttagatttgcatttccctaatgactaatgatgttgagcatgtttctgtgtgcttgttgacatctatatgtcttctttggagaaatatctattcaagctctgtgcccatttttaaacagcattgttttttttttgttgttgttgttgtaggagttctttatatattctgaatagtagaatattatcagttatatgattcacaatattttctcccattctttagtttgtcttttcatttgtttgacaatgtcctttcatacacaaaagttttcacttatgataatgtccaatttatctatatattttttgttgattgtatttttggtgtcatatcaaaaaatccattgccaaatccaaaatcatgaagtcttacctatatattttattgtgagagttttatagttttatcttttacatttagatcatgataactttggattaattttttgtgtactatgtgaggtaagtatcaacttcattcatttacatgtagatttttagttgtcccaatgccctttgttcaagagatgattctcattattttgttgagaagttttacatctgtattcttaagggacattggtatgtagttttcttttattgtgaagtcttttctggtttagtatcagggtagtgttggcctgaaagaatggacaagaaggtgttccctcctgttttattatttggaagagtttgagaaggattggtgttgaattttctttaaatgatgatggaattcatcagtgaagttatttggttctgggattttctttggaggttctggatgactggttcaatctctttattttctctagatatattcagatttttatttctatttgaggaagttttgatagcagtgtctctgtagaaatttgtctatttcattggggtagtctaatttttgatgtgtaattatttctatgattctcttgtaaactttttatatctacaaaattggtagcaaaggccctcttttttcatctgattttttttgctattacttttttcttgattggtctagctaaagatttgttaattttgttcatcttttcaaataatcaaattttggttccattgcttctctctattttttttttctgttctctcttttattatctctgaggtaatctttcttcttttcttcctacctgcaggtttagtttgatcttattcttctaggtttctatggtgtaaatttatgttacttatttgagatttttcttcctttttaatgtagatatatacagctgtaaattccctttgagggactgctttcactgtatccattgagttttaatatgttctgcttttgttttcattcatcacagagcattttctaatttcccttctaatttcctctgcaactcattggtttctctcaaggccagtttctattaatttctttgttcctgtcaatgggctgtactttcttgtttgtatttttcacttttttttggttaaaaaatgggcattttaaacagtataatattgcaactctagaaataagatattcccctcacccagggttttttgtttactggttattgtagttctttgttgtttagtgaccttgctaaattaattttgtaaagtctgtattttttgttctgggtggccactgaaatgtgtgattgttaggttagtagtaccttagtaacttgacagagatttccttaaactcctggaacaaaacaacaagaaacaaaaccaaacttcccgtctttgtagtttggttgtatattggggcactcctttactgtttagccaggcagtttacaattctgccctattcttccttcctgcttgcatggagcctgaatctagccagaggtaagggcttagggtcttgtcaggtcctttctgagcatacatcccccactggttatgtgcatggactgctagattcccttgactatacgggagcttgtcccagctcttagtgcccccaagtatttcctccctagtctttctgtctcaggctttcaggtcaatctatttcttgcccctacttttccctcttacccaccaggtggcaggtaatatatttgcctttaaatgcttacaaaaaacaccacgtgtgaagcagcttcagccttagggaagctccttatgcagatgaaccaatggcaagtccttgagcccatccctctgggagccaccacacaggttaaaatacgtaacaattctgtaagaataaggtccatatggtttcctatggtgtgtatgacctgcatcaggaatgcaggctactatcttcaagactgttgtggagctgaggagtatcaaatagtatcaacagggtaaattaatatgccacagagctctccaaccaagattctgtagtttttcccttcactaaacatttccttgtcgttgtaagtttttattcaattctagagttatttaaaaattgattctgatggtttgccagtttatcaactgcttctatggctgctttcacactataatgacagaattgaatagttgtgactatatagttcataaagccaaaaatatttactatttggtctttaaaggaaaaaatttgaacctctagtctacatatctatattcagaatttacataaaaacatttgtttcatgaatgtattaatgactaaattggtggatgaatggatgaatgaatacatccaaaatatttatattttaacacgaggtattccaatatagatatctacatgcatcttgttaaacttcaaataaaaatttagaaaatcatggtaatttattgatcatctttggagttgctcttttcacttagaggttactatggaaatacaggagtggcggtagtcaattatcaataaacatgccaatcaaacacatatattactactggggatcattctcatggtgtttataagctgtcccccatcccttgatcaaatcatactgtatgtgtgctaaatctacccaagagtgttgcttattagagtaatgagttgataacatttttgtgagagaaaaatttatctttgctgaaaatcttcctttattctgcttgtatttctttgtaagcattagttatatttcttgggtgtttttcatcatttgagaagaataccttttacccataataaaagtaaacctatccatgaaaattttatctaataaaaatttttagtttagatgcctgaaatcaaataaaaataatattaaacagggttgaaaagaatgttaaaacaggtaactaaaacttgctgccttatactatctagtaaagcagactttccgaatgtttatcctctgtgcttggatgagaggactgcaagtgaagatttgggaaaattcaagtaaagcatggtctaggtagaaagggaaacaaagaaaaacccccaaaccaaaactaacccaacgaaaaagggcagagggttatcctttgttccatctccttaacattgctgtccatagtaatacctttcatccttaatctcccttttaaaagtgtgactgtcccctctgcattatcctgagcacctcttgagcccttagggggaaatatgttgaggtctgtttcattttattgttgttaaggtgtaagtctgatagttataatgaaccaactcaccttcctgaaaagcataattgttccactatttctgttgcccattcatcagccttctactttcaatcaacttaacatctgccttgatttccatactctataaaaactagattgccctcttactagttatgatttaatgccttcagtaagagggcagtaataagatatagagactgaacacactgctcagaaaatagaaggaaataaattattttcaggaaaatatgaactgctcagttttgtttcaattgccgtaatattactttaatcttagattatttttttgtaaccattatgtctttttcatttggcccatagggatgctatttaaaaaaaggagggttttttttttttttttttttttttttggtcaaccctatgttcattaaggaaaaaaaaaggcaccattaggtaatattttctaaatgcattgatatctttaagaaactggaatttcagctgttgccacaaataaactttacaagttttttagtcataaggataaattcaagaacaagactggggttacctgaatatacctgtctatttttcaaaataaatgatttgtgggctacagcatcctgtgttctgagattcaccacaatgctctaaaacaagacacatgtccctgtttctcaaaaacgtagcctgtgagaacattctgcattccacttctgataactaatgaagcaaagtagacgtgtaaataaatacaggataatatataattggtagggatttcaaattcaccactagattgggagtttcataagggcaggaatttttctatgttgttttgatttgtttttcattgttcagtgttgtatacctagcacctggaagagtgttgggacagagtaagagttcagtgtatgcttgggtaaatacattggtttatttattcttatcattgtaatagcaggggatattttatacatatcacattaaaattaatttacattttaatgtccctatgttttaagtagcatgagtaagacactgatatctcagggttaacatatgaaaaagataattgagccctagataagagctgagagatacatgagttatatgctttaaacattattaaaagttttattatatttaaataaaacatttttataccctcaaccttaaaatgtattttactttttcagaacttcattttggattcattctgtgccaactcccagtctaatgcagataaaaatatatgagttattgggttccttaaaactggggttgatagtagaaatgctgacaaatccttattacagatgccagtggaatgaagtgcctttacctctagcaaatgctgatgtggagatttaagactatatgagaaatcagttaagttgcccaggagagttttatcatattattcaatgaacttggtatgtgatgcagtaattgcttttggtaccatttttcttctcttacgtgaggttattatttatccttgtaccgtgtgaaacagagaaagagagcttaaaggagagtcataacttgatgtaaaactatcccatgacacagtgtagctggagataggaatcaaagcaagaaaactgcatcttacttatcagaattaaatatgggaagagtaatatttgacattgtggagatccataaatactaaaaagatgcactcagaccacaaatatttttttctagtgatgtgcaaacctgttgaagacatatatctaagtaggttttttaatctcagagggatcaacaaatttatttgcctatgacagaagttttcttattagctttaggtgaaggaaatcaaattaacaggtaggaggctagtaggacaagttagagtaataagatttaaatagcctaataacttttacaattatattgctgttttcacttattgcacacatatatccctcatatgcttcacagactcctaacaccaactttgattatattttatccagtgttcaagtcagtttctgtgaaaaataaataaaaagtacttaggaatataatttaatttaaaatagagacaattataatttaacaatgcaaacagaagaaaaagcatttttagatagtcatatgttgctacctaaatctgattagtttaatagatgttatttttataaattcttaaaatactttatgttaaaaaggtgtgcttttatttagaaatgagatgatttgtcaggtagaaaatgaattttgtgtattttatatttactatttattttcttccataaagttgtcttgatggcattgttcaataattaataccattttgcatacaatatagcccagtggctaatcccagttaactaaaaaaaaaaaaagtcatacaacaggtgtttaattatgtaatgaactatttacaattttatattcacatggagtttggaaatggtcagtaagaattatttaatcaaggaagtatgggagggatgggtaagtggtccagcagtcagcctggctgagttgtatactggctgttgactatgggcaaaaaaaaaaaaaaaaaatcttaacaccctttccctcagttttttcataatagatataatattactgacctcatgtagttgttatggagaatacaattgaaataatccaagtaaagcatttagaacagggtttggcacatagtaagtgcttgggaaatgttaaacattactattgcttagtcatggggattggcaaattgtcgatctttgttccttttaagtaaaacaaaacaaaacaaaacaaactctgtatttgaaaatcataacctaaatgaaacaaaagtatgaaatcaatagagctaatttactatacctacatgctttatttttttcccattccaccaaccctgtattctcagtctttcccctactctgcaagggaatatgatattctcctcaagtccttaaccctctacacatgggttagtgacttgaggatttgttaccatcatgcccgagcctcatagtggaacttacctgtctcaatttttttccttcaagttcaggtttccctggcttccccggttgaccagaacaattcgtttctattcaattcatttcagcagtcattttattggtaagcctgctatgagccaggggatgtttggtgcttttgaagcaaaattaagtaaccattttgccgagtaaatcgctcaagtctagttcagaaggcttacatataaatcatcacctactacttggtatgataaatgctatggtaaaagtattcaaaagttgttgcaggagcaccagaaaaagaaacacctaaatatgtctgaaaagtgaatactcagtaccagaaagctgtttcaccacagggcttcttccctttctaatataacaagggcatataaactatgatctatggaaatgtgttatctacttgaaagactagcaggccaggaagagtagtgaggcaaaagggtatgataacctcttgggtggaagggcactacatctgttacatttgcagtactttgtgtacccctggggaataaagtttatatgtgatcaaatgttacataaaaatcagacaagatcctaactgttcttttacttatgttaagctcaaatatgtagctttggatgtagttaacagattaatttctgattcccatctgattcaatttaaaaatccaacatatacggttttctcccagacgatattacgatgtagaaagcaacctaaaatagtgggaaaagtaggtattgtggaagttgaaaaacctaggttcaaacctcttattttgttgcctcttttagttgttctttacctcttcttagctatgtgacctgggaaaattatttaacctctttgaaaatttaaatgtcaaatgaaaatagtcccaataagactgcattgaaacatatgaaaaaatgcttaacatcatatggcattagggaattacaaattaaaacaacaatgagacatcaccgtataccctcaagaatggccaaaatccagaacactgacaacaccaaatgctaggaagaatgtggagcaacaaagcctctcatttcttattggtgggaatagaaaacagggctgccactttagaagacagtttggcagtttctttcaaaactaagcatactcttaccatatgatcttgcagtcatccaccttgatatttacccaaataaaccaaaaacttatgtccacacaaaaaccagcacatggatgtttatagcaactttatttataattgcccagacttggaagccaccaaaattttctccagtgggtgagtggacaaataaactgtggtatattcacactatgtaatattattcagcagaaaacagaaatgagctatcaagccatgaaaatacatggaggaaacttaaatgcttattaccaagtgaaagaaaacaatctgaaaaggccacattccaactatgtgacattctggaaaaggcgaaactctggagctactaaaaagattaacggttgccaggagttagagtggggaaaggaatgaatatgtaaaagcacagagaatatttagggcattgaaactattttgtattgatactacaatggtggatgcatgccattatacatttgtcaaaactcataaaatagacaacaccaagaatgtgcccataaggtaaactatggactgggagtggtaatgatgtgccagtgaatgttcgtctgttgtgaacatgtactgatttggtgctggatgttgatagtagggtaaactaggcctctaggaggggtagggagatatgtgaaatgtctgtaccttctgctcagttttgctgtgaacctaaaattgctagaaaaattaagtctattaattaattaattaatttgagacagtcttgttctgttgcctaggctggagtgcaatggcacaatctcggctcactgcaacctccacctcccaggttcaagagcttcttctgcctcagtgtcccaagtagctgggactacaggcacctgccaccacacccggctaagttttatatttttagtagagatggagtttcaccatgttggccaggctggtctcaaacttctgacctcatgtgattcacccacctcgacctcccaaactgttgtgattacaggtgtaagctgtgccgcccagcctaagtctatcacttaaaaaaaaagaatcatgaaaaattattgggaagctgaaataatgaaattatgttaagaagctgatttttgccaggatttttttaattaattcccctaacaactttaaatgtattgttaaatatatttagaaattagaaaattgagttatagaagtaactaatttatcaataatttatccaatcagtatttactgggcacctactatatgctaggcattgtattaggcatggaagatattataatgagttcatataaatgttatattttaggagagtgagacaaaaacccaatagtaagccaacaagtaaaacaattgaaaatgacttaagtactgtgagaaaataaataatgagatagataataacagagaagattctctttagatagaaccaaaggaaagattttatatttaacttgagccttaaaggaagcaaaagagctcaccatttgaagagcattatagacagataaaacaacaggtaaagggctttgagatggaaaatagctttgtatttttgaatctgggagaaaacaggatatctagaccttaaggaaaagaaaatagagttggagagagaaaggtaagttttaagcctttatgatgaatattttattcatttaacacatgtgccttgagcaccaacggcttgccagtcattttcttctatgcactgagataaattaatgaacataatctctaattcctctatactcatgggtttatgtcataataggggaagaaagaattgcacatacatcaaaagataaataaacaaaacttcagatgggatgagtgctatgagcaaaacaaagcagggtagaataatggagagtaccttagaggaaagaggtaacatatatatgcggtttctttgaagtggtgaatcttgagcatagggttaaatgacgagaaaacaaccatgtgaagatcttaagatagatcttccctgtcagaaaaatcaatcaatcaatcaatcaataaaaaggcagtgcaaagagccaagacgtggagttagaaacaaatctggcaagtttgaagaccaaaatgaaggccaatgcctggaataaaatgagaaagagagggaatagaagctaagttcaaagagaataggccttgaagaccagcataaacagtttttattttattccagttttaatgaaaagccactgttgggttttaagcaaatgcacaataaaagcagatttagtttttacaagattgctacgactttctggggagaatggactgagggggggcagaaatggaaagtaaaagatgtagttacaataggaattcagataagaaataaaggctacatgagccatgattctagcaggggacagtgtaaagaaattagtagaatcagtatatattttgaggggagaatttgcaggatttacaaaggataaaacagaatttgagaatgattgcctggctttggacttaatcagttttgtgagttgtgaagcctttcaccaagatgagagcaagtggtagaacaacaggttttagggcccatggcaatgatgttgaatgttattctaaacacattgggaatctatgtgatgatttcaagtagtagtggggaggtaattcaatgtatccttcagtaagatcccttgtgtttctctgtatcaaatgagctaaaagaaagggaagcaaagatgatgactcacaaatcagtttgagtagcagagtaaacgatggtgccattttctaaaagcagagaaaactgaaaacatgtaaaagttttggggaaaacaagaattatatttgggacatgttaaatgtgagctgtaatataatgtctatgagacataaaatcatgctgacaagtgctattggatacgtgtgcctaagacttgcaagaagtgtgggcctaatatataaattttgaggtcatcaggataaagatgttattgaatttgatgtgtgtggatcagaaaaaagtaggaataaaatttaagaaaaaaggttagagctcataactaattttaggaacataaacatttaactgaggaattataataatggaccatggaatttggggccagataatgaagtgaagtcaggagaggattgagaaatagtagggaaacgtgagttcactgaattgggggtctttatgtgatcgaagagcacaggcgtgggtgtgattaaacaatgagttggatgagtgggttgttagaaatcctaactaattttctgacaaatgcaggctgcagttttgaccatgcggaagagagactagacttcaatgagggaaataatttggtaatgagtaaataaaagaattaagagatcagctgtattggatacttcatgtaggtggattttgaatataccgagaataataagaatttgaaaaaagagcaaaattaccatccagtagtcaaatatttgaaaagtaaaggcttctcttcctacttaataaaacttttgaaccagatttcattgaatgacagcaattgtagagagagagagcctggtctagcagggtggaatgagtctcagaggagcagtagttactgcacaaggcaggggaaaaaatggtgtggggacagcaatgaggggcagggaaaacaccaaatgtgcctctgtctccaagggatgtggaggtaaatgaaaatagtctgtaggaaagagagctgaaggctaagcaatgtcatcagggtacagtccagcagagcagggagataaaatggtcattctaaaaatcaggtgaagatacgaaacaacgtgccaatctctgaccaggacttctctaacacacagtggcagtgtttagaaagggtcagaataacaggaggtgaggctgcagggtgcatacaactgtatagagataaggtaagtccacagagatgggaaggaagatgaaaataatcttgattatttcttagttgagtgtgggcaagctgacacatggctgtcatgtctaaaactcctttaggatagctctcatgggatgactgttgttctccaggggttggggaagagggtgagcacattcctaggtggactggcatgggagtatcctaacttttctcactctgtaatagcttcctctaagataacaggggctttgcccataagcaaatagtgaatagcagaaccaattgttgcaccttggtttattcatagcagcacagtctgccataccatgtgcaagtgccttcgataaaatgtgctaatgcatggaatctttttgcacttagttaaacatacaaatttctcatagggcctaatttgcagagcctcacaaaaattggctcctcaccccttttttattcagatcttgttcaaccaactcactcacttactggatgtgacttctgtcacactgttgccaattatcctcttcctgaaacactccaatattatgttggtctcagggctttttaccatgctgtgtccttggcttgaaatactctgttttcagagtttcaagtgtctagactctttctcatctgttggattatacttcgtctcttaccttctctgaaaagactttcaggaaattacttaattttgtcttctcttatcttaccgagtaccttgcagttgttttcttttctattgacctattttatgtttttataccacttaggaggatctgataatatgtgttgtatttgtttaggcatttgttaactgttttcttctctttatcatgaacttcatggctcaaggatttctatttatatagaggagggctggctcacaataggtgctccataaaattatgttggatgaatgcataagcacttgataaagatcactttcttcctctctctctctctatttttttttctttttttttttttttttttgagacggagtctcactctgtcacccagacttgagtgcagtgagcaatcttggctcagtgcaagctccgcctcccgggttcacgccattctcctgcctcagcctcctgaatagctgggactacaggcgcccgccactacgcccagctaattttttttgtattttttagtagagatggggtttcaccgtgttagccaggatggtcttgatctcctgacctcgtgatctgcccgccttggcctcccaaagtgctgggattacaggtgcaagccatggtgcctggccttcttcatctatattttaaagtaaactactactttttaaactataattaaatatagtagttgtaattttcatggttgttgggacaaaatgtgattatatatataaaaagtccacactccagttctttgcacatagtaggcaattagtcagcaatttttttcattaattttatccatagatcccatggaaacagcataccagatattgattaaatgatataattcaaattgaggtattataatcatggtgaaattagatgtcggatatgatgtattatatagcatatattacatatcacatattattggttatatataataagatttatggcataagatataagatataccatatttttgttatatagtcatggtgggattacaatagttaagttttttttgtaaagcactactatttcatataaaacctgaattttcttttaatattctagacttcattaattataattagaagaaaataaagttgactgttgtcctaaattaatgagaaaatttctgtcttctaagaaaagcaataattctgatgatgagtttcatgattaactgttacctcttttcttctttttcaatgttttcaggaagagccttatgtcctttttaagaagtctgacaaacctctctatggtaatgatcgatttgaaggctattgcattgatctcctcagagagttatctacaatccttggctttacatatgaaattagacttgtggaagatgggaaatatggagcccaggatgatgccaatggacaatggaatggaatggttcgtgaactaattgatcatgtaagtcccttccctcatgatttattagtttgttatgttgctacaaggtttactcttttgttgatgtatatgaaataactacaaagagtagtgatatatttcaagcatgtatttccttcaataattttatttaagctagatagtatttgtcactaaatgtaaagaatctaagagggatatatagccctatatatgtaaacagattaaattttccacaggaactgagagatggaacattatctctcttgattattacatttcaaagagatacttcccaggtccttgagaaaggctttcctgggccataaagttggcaagaggcttaattagcttttaaaggagttatatacatttttaaacagagagggagaaatgacctatgagtttttaaagtaagtattctaagaaaaaggggtgaggaggggtgtttctttccttattttcagttggaagaatcaggcctttttttagaatttagtatttaattagtatttagtatttttaattagctcttgcaattgcaagtctttgttattttagaaataacatgtttgtcaccttcttattctccatccctctttcttaagaggaccttaagcatacagggtttggtatgatctttcaaattcattatgatctaaacaagatggttcttggtggtacaatatgaagatgcaacttcagatagacatcttaacttttaaaaagtataatttataaatttagaagaggagactttgtttcttacaaagggttgcagcatgcacggtggccattcagacaggttgggaagcatagtctctggttggaagccaaaagcagatactttgagggaggggcaaaaggaacaggaatttatgctaagcaagatggctgaatatatatattatattttccccaatgggatataggagaagtcatgaatatttatgaaaggagaaacttgtgcatgaacatgaacatgcctctccatggattccatgtacaaaaatggtggcattagcatggtgtgagggtggagttttcagccctatggcatcaaaaagtgaagcacaggacatgaaaatccttactaagcattctctgaagatggctatagccattcaatggtcgtggtctaacaggcaaaataaggaaaggcagcatcaaggttggttgatatcactggtgaagtctttcgaaagggctgttttctgttttcagtggtgaagtcttctgaaagggctgtcttctttagggaaaaaagtctaaaggcagttagtgagaggttggtgtataatgaggcctcctgtcatggctgagaatacagttttcaaggttactatggggttccctgggcagggaaaaggtccattcagttgttttaggggctttggatttatttttatttctcagatattaggagaaagtgaatttctgaggcattaggtattgttagtccttgaaaaaagaccttttccctgaaaacatcatcctctcttctccactttcccatactcggtagggctccataaaatagtgtgctcgtgagcacttggtaaggcaaaggtgagttcaaatcctaattcttcaactatgcagttgcatgccttgaaaacactgccttaaacactttgaaacttaactttctgaaacataagatagagataagttatatcattttaataattaggaatgatatataggaattttctaacacagcgtctgacatatagtagataatcaataaatagagatgtaactaataagcccaaacttagtgtcttcttacttgttctgtcttctactatagtatttatgagtgtttgtgttgagggctaaaacataaacatttagatggtattacaatgagaaatctgtagggactatagcactataattattaaatttgaatttaatcatagtcagtgagatcagtattaagttttagtagtgaagtttattaactggatcctttgctgtcacaaatataccagtgctttcctacctaaatgacctatatgttgtgaatggcagttttatattaagattaattaaacatagagaagcattagtagagagtcaaattcactgttcgatcaacaataggcaagataaagaaaaacaaaacaaataatatttagggtacaacaaagcagggacacccttatttttttgaaaattactcttaatattaaaacaaactcaaaatagtcattatagataaaatcaaaacatttttggaccttcttatacttagagtttgatatttcgcaaatttgaattacacatacaggggacaaagctcttgacccctaaagttttgatgaaaatcactgataatgaggctgattaattaataagagaaaatacatacaaatttatttaacttgtatatacaggacccttcagaatgaaaactcaacttcccaaagaagtacagaagcttatattactatcttgaggttacaacgagaatgggggcttggatcctggtaaaatagtttatgagaaggcaaagagaataaattttatggaggggcaataaatgattacaacggaacagaaattaagttgtaaacagtttcctttttttagaacttaaatgatgcttgaagacaatgattatcttgcaaaagggtctgttcagatgtggttagattttttgttttctttcctgtaatggataatgagattacagggagggaaacaagaacacttgttctcctaggcaggtaaattctgactttttgtagataggaaaaaaagtctctcctagtgatcatcgattcccaagaatttttaacttaaaatactcattataccaggaagccatattttggggtgaaatattttgatttccttcacatgtaagactgaaagtgaagagattcattttctttcttaaatctttgaggatcttactccagcatttctcaaatacattttattctccttatatttatatatttttaagagacggaatctttctgtgacttagactagggttcagtggcataatcatagttcattgcagccttgaagcccttggctcaagcagtccttctgcctcagccttgtgggtagacatgctaacatccctagctaattatttattattattattattattttagatatgtggtcttgctatgttgctcatgctagtctcaaacttttggactccagggatcctcctgccttagcctctggagtaactgggattatcgacatgagccactgtgcctggcttcaaatacacttgaaaaaataaattttgtggaaactcatagtttgatacattttaaaatgttaataatatatgtcctactacagaaaaaatatggaagcaaacaatctattttgtttttcctttatgtactaataatctactctttcagtcctagcagattttccattgggctgatcatcttttgagtttttatgatgattggtgattgatgacttgaaattttttggttagctataaaaagttgataacttttgaaagttatcaaactgatttgaatctaaattaggatgctattttatcatatcagtttgctgcattcataatcttctgtaggggcaggttgaaaataaatctcagatctgtcccatctttagtttttcaccgcccatgtagctcatacgtttgccattttattatgtctctattatatacttcctgcctttaatatcatctccaggaatgcatatatacattttagtcagattttcatttaatcagcaatgttatctcaaagctttctcactgaaatcattgcagagatactgaaagattacagtatataatttcaagtactcatgttggcctttaatttctttttcatagtcccctgacacctgatggtttgcacagtcctcagttctttcctcttgtcaactgtttaatgtccatccccagagttctctgctggggctgtactccaaaaagctttttgtgccattttattcttctgaaaagcctactttcttcgacacctataaaactactacctctggcacttaatcatagacattccttattacttgaaattctttgtcctttcatctttcacacagactaatcccagctggaggcaaaatttcagaatatccttaagccagtgttctgctggtgaatctctgacctactgtcataatgctgataaaatgtgtgagggaatactgagtactcacattcaacagatctacagttacttcttaactgtgcaaatttgggcaccgtgtgtctaacttttctctttctcttactctcctgtgtagctttgggaaagtttcttactctgtcttgagtgacttatatcatttatacaatgggaataatgatactcacttcattgaatgaagatgtggattggccgggcgcggtggctcacgcctgtaatcccagcactttgggaggccgaggcgggtggatcatgaggtcaggagatcgagaccatcctggctaacaaggtgaaaccccgtctctactaaaaatacaaaaaattagccgggcgtggtggcgggcgcctgtagtcccagctactcgggaggctgaggcaggagaatggcgtgaacccgggaagcggagcttgcagtgagccgagattgcgccactgcagtccgcagtccggcctgggcgacagagcgagactccgtctcaaaaaaaaaaaaaaaaaagaagatgtggattaaatgttaatatctgagaatagagcaggactatagccttctttaacttagttaaatacatcagtgagacagcagagtttgggtatatttggaggagacacaacagaaggaaaaacgtaatgacaggaagtaggaaaaatttaaatgcttcaggacagtgatgcagatccctctgtagatattaggcccctcatgcttcagtgtatgaaaagctcctggcactgatggataatctcatgcctataaatacaaatttttcctttttaaaacctgagccctagtcaaaaaactgctacttaacctgggttgcaactaaagaaacagcatacaaacagttctaagactgagctacttaatgggttttcaaatcagatttgagaagtaaactctaagttgggacatgaatgcattgcataggccttaatgtgctgagtggcaaataggaaatactcaagaaaagtagttattattattattactattaaaattattattatggttaatgtatccaaaaaggtgccaatgtttttgaatgttgctatattttgtctattcaaccccatgagctagtttacaggattactgttgaaccatgattatatttaaaacaaataattgactaaatgtgtgctataatgttatcagagaaaaggggcatttaaaaacagatttttaaagccacattatccattcctttaccccattagaattgtgtggactatgagaagttatctaaatagtaacatttaaagtttagctcttttataagtgccaaacatctttacaacttctttgtctttaaagagatttgtgttttaatataattaaccatttgatgtaggtaaaagagtgcatcgggcaataaatgcttactttttaaattatgttcatttttgtagcttcaattgtgaaatttgagaagtaaacaaaacttgatcatttgacaggttttcttaaaaaaccggaatgagaaagaaattctgtttcagcttagaaaacaactatagtaaaatgggaagtctgttggaatctaattcagtattttacattatttttaagaagactcacgatgccacagatttccagctgtctgaatgcttcccagcttgctgccttggcattgcaattggtatttaatattatcaagccttttatgattcataaatgagccttggaggacctcactacactttgcttttgcctcctgattgctcttttattatatgttggaaaggaaatcaaatatttgtttttcagggaacttaaaaaggctccaggtattatcacaaaaatggaaacactaaatcaaaagcagtttattctaaatgggaattgacttgcacagccatagctttaaattttgacagcacattgtttaattttgcatcctagttgaggaactctagtacttcttgtgaaaataaacaaaaaggctaggcgtcgtgactcacacctgtaatcccagcactttgggtggccaaggtgggcagatcacctgaggttaggagttcaagaccagcctggccaacatggtgaaaacccgtctctactaaaaatacaaaaaagttagctgggtgtgctggtgcactcccgtaatcccagctacttgggaggctgaggcacaagaatcacttgaacttgggaggcagaggttgcagtgagctgagatcacgccactaaactccagcctgggcaacacagtgagaccccgtctcaaaaaaaaagaaaaaaaaaaaagaaagaaatacaaataataaaaaaaaattacaaccaacaacaacaaataaaaactgttggggagtagaaacactattattattgtatttttaaaatgttggcaaaaacaactaaaatcacaagtataaatttataatttcctatgaccccaaagtgacaactattaacatatttgttaactttgcttcaagtgtctcttttaatgtaaaagttataaaatattacagataatgttgaagtgccttcctcaccataattgtcttgatttagtattttccacatcagtcataaaatataaaactacattttcctcatccctctccaggtgtaaccaaaattgttcaatagtaccatgtaacaggattatatcatttttatttagtcttctactgataaacattcaaaatgctataattgaagatgcacatcttatcttccatagcacctatgcaaaagcttttccataatatatgcttatttcacattgcatgcctgtagtaaaacatctcatgtaccccataaatatgtgaaatatatgaacaaggaattgtttatcatagttcatgtattttctttccaattttgttagcaacctcatccgaaaaacaaatttcattagatattaaaaagatttttctccaaaaaatttttactaatttacatttctaccaatagtttataagaatttctattcctctgcaaaatcattagtacttgagattagacatttagactagactattagagtacattagactatttgaatttggtcaaatagtctggggacaaatagaatcaaattgctttaattttcagatactcataactagccattctttttctccatatttataggctttttaatttccccttctttgaattccccatttacttcattccttcttattaacatatagtaatttattatattttctgaatgcctataatgcaaatattttccccagctaagactttatctcttaatttcattgtgtgtgtgtgtgtgtgaatgtgtgtgtgtgtgttttcatatagaagttttaaagttttagtttgtcacatttagtcattttttaaatggcttgtgatgtttgtgatttgttggaaaaattcttttttaactgaagctcaaaaagatattttcctattttttaatattcttaatgtttttgtttctcagatttagttctttcatccacttgtggtttgtttattaagtccatactgattggacctcaacttaagtgaaagcctgaattccttttacgccctttctgaagcagtacctccccccaacacaccaaattctgctacaacatgtatgccagtaattttctcttctttgtaaaaaagcaacttgaaaagcaagtaatttttacttttaaggagacattctgtgattataatctcagacgatagagacattaggaattatgaaaagtatataacattttttaaaagggctaatatatttttaaactttttttctcaacgtgaatttaaacagtgagctgttgaagatataaacaaactggtttcagtgacaaggatattttgaaatttaatccagaaacatggtctatcacagatcagtgtaattctgatttatgctatactagattatgattcattagaaattatcccaggatagagcctcaacaaccatttattgaatatatattctgagaaacacacagtaaccacagcagtaataatagttctcaaatataaatgactatattttattaaaaaaggtatgttaagtgtttaatttttctttcagtactaatataataaagaatgtcttctcatgcagttccaaaattaatattatgtttagaaatatttatatatatttttaaatttaaatttttttttgctgtgatgtattctgagaatacttaaaagaaattgtttccctaataacaatcttctgctaatttgctattaattgcaaaattatagcaaaaaccagagctaaggattattttatttggcaattgtatcatgaattattgaataaatacccccaatgtacactattaagttcctttaaatatgacttctgaacttaagctacttaaaatgtctgtaaaaaatgttttggtcataatttgaagattgagagaaagtaaaatactaaattgacattatagagacctctataaatggagacttctggacactcctatccatcctattaataattttgcccctacaaactggaagcaactaatttgttatgcagtacagagcattgaaacttttccttactgtagtcaggaaatgcttcttaaaaaaaaaaaaagcttcaatgtcttcttaaataaagaaaaacagtttggagtagaagaggcgtgaaattgggaatttcatcgctcaaacaaaatgtatgtaaaaatgaaaatagaaatataaattaagggcaagggaattctgtgaggaagcatgtccaaaatctagtattatttaaagtcagtaataaaaattttgtatgtaatttaaatagtaaatttacaatgacactattgaagcagtgggccgaaaaatttgtttatctgtggtatatggaacatctgtgtgttattaaataataaatactgatttgcatctattactaccataacagcagaataaatgtaactgaaaacagatataaaaaagtggcttttttaaaggtgatattttctttagagcatagagcaaatctaaacagaaagacaaaaaagccccacaaaactttaaaaaattaaaaaaaggaaaatcatagcatgaaatgtattaatgctatagaaatttgttcagtgtgactggattttcctttcacattaaattgcataaagtttcttttcaaagtaaatttgagtaatagaaatttcagaaaaaaattgctcaaataagatattcttcatgatattcccatgtggaaaaaaattcagtattattcattaagcatttttgtgccattcacatttttaggtactgagaaacatacaaaccctgggtgagatgaacattaaatacattttatatactttagatagtacaacaatagagatattctgaaaatattttgggaaacatgagggagtatatctaattttgtcaagggaaagggtcagggaagtctttaagcttgaattatgaaaaaaatgacagatgctttttcaaatacactatttttagtgctgcagttcatttaattgaagcacgtattctacctgagggatgttatcttatgtaacaccacacgtgaccaaaacggtgtacttggtcaggtttatttaaatattttgaaagccaattcaatttaaaatgaactgatatgattcagacaatttgcggagggagaattaacataaagaaagttttcacatcttttctcctaagaagaaaatagatctagttttctcaattaagaagaatttattgaaaatgtattggtatgctaatatgtaattacactaacattaaccactgttgttttgtgccaaaatcatgtgccttcatccatataatttcctgatcacatctaattgcattttaaggttttgtggctcttctaggaaattcagtttgcaaaagatatggccactgaactggagtttattttttacgtattttattatgatagtcatctgatcaagtcttttgtattttttaaacattatccaatttggatcattgaaaatcagaagtaatgtctgtgggaccattatagagcaaatagtctcactgtccagtgtgcacaaaacactggcttttgaggaaaaaagggctttatttgccttttttcgaataggcaagtagtcagcaaggagacaggagtggattcaaatctgtctcctcaagttagggaccccttgcttctgaaagagttttagtattcaggttccagtcatgtcccagttttaccggtatagaggggaatattgattggttttgggtgttgttagagatcaaagctttttctattgtgcatgcctaggctacatgaactgcagattttggttttattatatctgaaaggtaactcaacattttgttaccaactaagcaggcccaatttgggctagtccagtaggtacaggacttattcaactaaaaattcaattatgaatttatgtgacagtatttagtttaatattaaacagcattaaactatcctttatgtccttatattttcacttccatgaaaatgaatgattttgataccttgtaatctactaaactatctttgttcactgtagattaatttgcttttaccaacatttagatttaaaatattctcattttactttgtggctttcaatacatacatcattaaggtcctttcctagttagaatataagctgtgggagggcagtaactatatctctaggacttagcatgatgcttaatacacagtagaaaatgagtgtttgttgaatgcataaatcctgtttttccatccaggccagtttgtccaattcaatgtataaaactacttataatcaggaatatgccacaaatggattttcccaagcattatattttattgatgtacatgttttgtttcctctgtgtaggtgtcaatgtcttgtttgaggcaggaatgatttgattttcttggtatctttcatagcacttgccacaatgctttacacgtagtcaagatggtcaataaatatctaccaaataaatgggtagatataaattatccacctaccctttttttctttccacactaaaggagtgcaattaactttacattgtacgtgtgattacttgaaaccatagctataatattatcacactttccttcagaaaaaaaaattgggtaaagttggtaaacttattaacagagttttgaagtagagcactatgtcatagctatcgaataatagataaaggcattctgaaacacataatatttaaaacatagactcataaaaagtcattttcaagtatttcttaagcagatactgtcagatatattggacgatgagataatttgagagcacgtgttctgaaaaacagggtaagacacttggacaaagaagttttatctttaaatcctgcaaaataaacatacacaaaaatcagaatttttaccaattatattggcgtacttcaaatgagatttgattacctatatacactatcaaaaatagcatttttgtcaggcaggagcagaaaggaaatatagtacatgctgtaataaaagtataatcaatataaaagtaaagattttagcatcagcatgtgaagaaaaagtcatcctgggcaacacatggtttatcttttaaacatcttaataaaatctttttggatggatcatttctagaatgtattacatgtatttactctttgaaaggacagtgagaataaaccaaactctagatgaaaatttcatgtctgttttgatgctttcataatcattctatttatatatttatttttttaaaagtatttcatgaagtgtcttctttttctaacttttattttaaattcaggggttacatgtgcagatttattagatggctatgttgtgtgatgctgaagtttggagtgtgcatgatcccataaccccgatagtgagcatcacacacagtaggtagtttttcaacatttgccccctttgccccaactctagtaatccccagtgtctattgtactcatctttatttccatgtgtacccaatgtttagctcccattataagtgagaacatctaatatttggttttcttttttggccattagttcgcttaggataatggcctccatctacacacttgttgccacaaaaggcatgattttgtccttttttatggctacgtagagttccatagtgtaaatgtaccacattttctttatccaatccattgttgatgagcacctgggttgattccttgtctttgctattgtgaatagttctgtgatgaacatacaggtgaatgtatctctttggtagaacaatttattttcctttgggtgtaaatccaaaggatttggtgagtcaaatgatagttcaactcagttctttgagaaatctctaaaatgctcttcacagcagctggactaactgacattcccaccaacagtttataagtgttcctttttcttcacagccttgccaatatcagttattttttgttgttgttgactttttaacaatggccactctgactgatgtgagatggtatctcaatgtggttttcataataattgtatacttcacattgcaatcacccaggaatataaaattcgtgtctatccaatttcttattcatggtttgacctagaaatgtggccaacattaacccagtaaccatttactgtattagtccattctcacagtgctataaagaactgtttgagactgggtgatttatgaagaaaagaagtttaatcgactcacagttccacatggctggggaggcatcaggagacttacaatcctagtggaggggaagcaaacatgtccttcttcacatggcagcagcagggaaaaatgctgagtaaagcagggaaaagtcccttataaaaccatcagatcatgagaactcactcactatcatgagaatagcatgagggtaaccacccccatgattgaattacctaccatctggtcccactcaccgaacatgggcattataggaaccacaattcaagattagatttgggtggggacacagccaaaccatattaccatcagttttattctttcacctctttgtaggttcaaatgagcactcatcaataattcccccttcccatcccctctgaatagcatgtactcacctcacattgtatctcatctttttcatcttattccctattatcatttacttactccataattcctcacataaattatgtttgttttctacacaaatattaaatagattaagtaattttatgtctgttttcaatgagaatttaaatcctttgaaagtcagaattttaaattataggttgataataagctgatttatgagccgagctttatgaactgagaaaaacattgaacatatttaaagcagggttcactccttagcagagctgcaaatgacagtgataccatagtgaagatttcttgattctggttctgaatcttagttatataggtccccaatgcttattatgcatttatttaggaagtattgaggtagttaaacacaagtgatttttaaactggacattaattttttttaaattatacattaagttctagggtacatgtgcacaacgtgcaggtttgttatacatgtatacatgtgccacgttggtgtgctgcacccattaactcctcatttacattaggtatatctcctaatgctatccctcccccctccccccaccccacaataagccccagtgtgtgatgttccccttcctgtgtccaagtgttctcattgttcaattcccacctatgagtgagaacatgtggtgtttggttttttgtccttgtaatagtttgctgagaatgatggtttccagcttcatccatgtccctacaaaggacatgaactcatccttttttatggctgcatagtattccatggtgtatatgtgccacaatttcttaatccagtctatcattgatggacatttgagttggttcctagtctttgctattgtgaatagtgccacaataaacatacatgtgcatgtttctttatagcagcatgatttataatcctttgggtatatacccagtaatgggatggctgggtcaaatggtatttctagttctagatccttgaggaattgccacactgtcttccacaatggttgaactagtttacagtcccaccaacagtgtaaaagtgttcctatttctccacatcctctccagcacctgttgtttcctgactttttaatgatcaccattctaactggtgtgagatggtatctcattatggttttgatttgcatttctctgatggccagtgatgatgagcatcttttcatgtgtcttttggctgcataaatgtcttctttggagaagtgtctgttcatatcctttgcccacttgttgatggggttgtttgtttttttcttgtcaatttgtttgagttcattgtagattctggatattagccctttgtcagatgagtagattgcaaaaattttctcccattctgaaggttgcctgttcactctgatagtagtttcttttgctgtgcagaagctctttagtttaattagatcccatttgtcaattttggcttctgttgccattgcttttggtgttttagacatgaagtccttgcctatgcctatgtcctgaatggtattgcctaggttttcttctagagtttttatggttttaggtctaacatttaagtctttaatccatcgtgaattaatttttgtataaggtgtaaggaagggatccagtttcagctttctacatatggctagccagttttcccagcaccatttattaaatagggaatcctttccccatttcttgtttttgtcaggtttgtcaaagatcaaatggttgttgatgtgtggtattatttgtgcgggctgcgttctgttccattggtctatatctctgttttggtaccagtaccatgctgttttggttactgtagccttgtaatatagtttgaagtcaggtagcatgatgcctccagctttgttcttttggcttaggattgtcttggcaatgcaggctcttttttggtgccatatgaattttaaagtagttttttccagttctgtgaagaaagtcattggtagcttgatggggatggcattgaatctataaattaccttgggcagtatggccattttcacgatattgattcttcctatccatgagcatggagtgttcttccatttgtttgtctcctcttttatttcgttgggaagtggtttgtagttctccttgaagaggtccttcacgttccttgtaagttggattcctcagtattttattctcttagaagcaattgtgaatgggagttcactcatgatttggctctctgtttgtctgttattggtgtataagaatgcttgtgatttttgcacattgattttgtatcctgagactttgctgaagttgcttaacagcttaaggaaattttgggctgagatgatggggttttctagatatacaatcatgtcactgcaaacagggacaatttgatttccttttttcctaattgaatacctttatttctttctcctgcctgattgccctggccagaacttccaacactatgttgaataggagtggtgagagagggcatccctgccttgtgtaaactggacattaatttttaatctgagtgtaacaaggatgagtgtttcccattcctcttaatccttgttgataggtgcaattagaagccaatttacaaatcggtggacaagaaaccaaggacaaaacctcaataagagatctcttgtcctttatcttgggggtatttctttttaagtactatcgctagtcatttagaatcggagcatcctttcttagagataataatctacacatactattttttctttcattttgcttggtagaccatcatatatctgctcagccaaaacagaaatgtctcaaagatgttacagtgcaattgagtaggctattttttttttacagaaataactacttttcctaacttaagaaagtagtaacacagtaattatttatttctgatgaaaatttcatttctgttttctaaatttgctttcttcttgtttttctctttacttcttttacattgaatgagttttcttttgactcattgttttttcccctccattaattggaagttataagctttatttctctttattctttaggggtttttatggaaattttaaccagcaaagttaacaagatattgataaccaatattttacccttcttccaaacaatacaaggaccttaggaagcttagactgatcaaccattctgctgacatctgctattatattagttctaatctgattctttcgtgtttagattgaacatattttacacacttgtttgctttacttgccatttattatttatttcttcttatagacagtcttctgtggagtcctgttttcttctagaattacatatatattgtgtgtttatgtgtttgtgtgtgtgtgtgtgtgtgtgtaaagatctctcatcttgggatcaacattacaaataaaaacttaatttgagttcacataaaatcagaagcctgtatttaggaagtcaaaatttaagaagaaaacatgtttaggtgagcctgttaattatgtaaatagtaaaattagtttgaaacacgaaattgtcatttttgtaggctaaaatgaagtgttacacatttcatataacctaacctgtacatttttcctccttataatgtctttaaaatgtttgcagaagcttttcttaccttaggacctaaatatacaacattaaagattaatctaaaaaagaatctggatccttttttataaataataattgtgatagattcctttctggtatttcacaagttttcttaagaacccagatctaattagaaatgaaaacaagtctaaatgattaaaatatggtttccttagaaaacaaaaacaaacacacacacacacacacacacacacacacacacaaaacctcatccctgcagcaccattcagggcccacttattctgaaagtgccagaggcctgtcaccattgttggaagcttagcaaagttcaaagagagcttatcaatgcacagtgagatttaatgtgcactactcattatcctggtgagaccctttgttaaaatagtcaatttctatgctgtttgtaaggttgtgcagttgtaattcctggatgactgccagaaatagccttagtaacaaaacacccagcatccttctgttctcaaatcaatcagtcattgtgtaaagaactttttgatttataatgaatcttgtggccagtatttttaggttatttcactacactaagtcaacagtatgttacttctaggtatgttattataaatggactcattcccctacatctctatacataagcttcttatgttatggtttgtcataacaggtgaagttgaatttgttaattaaaagagtatgtaatatgcatacaaataataatactagcattctgatatgcttttgtattccctctatacaaattatgggccacttaagaaacaaatgagcttcatagttttcctaaagtaattggtgcaatgttacaactaaacacagacgaacacacacacacatatatatatgtttatgtttatgtttttatacttcacatatatatgtagagtatatatgcatatagatgtttatgaatacatacagttggccagttggccctctttatccttgggttccagattcaatcaactagggatcgaaaataccagggctagggaaggatagttgtgtctgtactgaacatgcagactattttttgcttttcattccctaagcaatgcagtataacaactatttacatagcatttacattgacttaattattataagcaatctagagatgatttaaagtatacaggaggatgtgcataggttatatgcaaatactatatacttcatataaaggatttgagcaccgatgaattttggtattcgacaggggccctgaaacccatttcccctggatatcaacagatgactatacaaatatgacatttatgtgtgtatatgtacgttaaaaatagttttaaaagaataaaaacatctgagtacaaaataagtatttgaatagactaagattcagtattttgtcaaggacaacaactcatgtttaaatgtcaatattaactttgataacttagcaaggaactgatacatctatgtttgctttttttgttgagctctatttttcaattcattgttccttaatacattttcattctatgtggagagataaacagtccatcaaatgtattttgttttttaaaaggctttgtaactgtaacctgtagaatgacttgggaatcagccaagttttcaaatctccctccactctttatttgaagtgtgatcttagacaacttggttatgttctctgagcctcacttctctcacttaaaaaagggcattgatgaaagcacacacttcatagtaatgattaaatgacctaaaatgtatgaagtgcttagaatcgtgccaggtatattatattatattatattatattatattatattatattatattatattatattatattaatgtactgaataaatgttagctgtcatttgtatttttttcttgatggaaataatagcaaaatttctgatataaatgaaaacataaactcaggcatctcacttcctcaaccatttacccaatttcccatggaaattatcaatagagtaaacaaataagtaaaagtttgcattctcaatggaatctagggatggagccttcaaagtgtcaagtttttttttctatttagtctagtgcatataaaattagagtgaaggaagaatagaaggttggtaactgatccccttcataaaatatcagtgtgtctgagaattacatgggaggccatgagaaattgccatttgtattcccagtagtgttttgttttaaacattaaaagattctgtgttaatctaaacacaatatacctcacaaatttattactattagatattttaaacaattttgagactctctggtctgtttaactctctctgtatttttatttccagaacacattgagctctgttgactttctgacttatcacgctttctcttacaagtcattcgttatcgtctctgaattctcagtgtcctccattatgagtaatctcccttcattcctaatctttcttcattatttgctatcttgtttcacttctcttctattcaaactgctcattccgtagctctgccagtgctggctgctctgtctctcacactccacttattttaagagtctggttcagattcttttgactacctggatcaagcagtatgtactgattattttactgttataaactcaaaaatcttagtagtttatacctacagagattgtttctcattaacactgcttataaagcataggtcagctgaaggctctgttccatattttctcactcaaggactcaggctgatggagccactaccacgtggtgtgcttttacttctgggaagcgaaatgagagaacatggtgaactgcagaccgtctctcaaaagtttctttgcagaagtgaaagtacacaacttctgcttacattccttgatcaaggtaaaccatattactgtgctcaacttaaaggtaagaaaagagtacaatattccatgtacacaaagaaagacaaagtggaatgtagttaaatagccctaatgcttaacctatttcccattgctgttttaattcatggtttctctagaacccagaaaaaaatacatgcttctttgaggctcatttctctggatataccattcctttcattcttatgttatcacctactcactttctgatcacaattacatatgcaccatttattttgggaatggactcatagcctttcactttaagagagccaatttcatagttttatttgaattcagtgtccttacggaagactcatccattaccctggactctatgcttcttgggttcttgaacctctcagccacctagtcctaaagtcacatcatagtcatgatcataacctaaaggacagcgacaattatatcaataatctgaaaattcaaatcatttctgcttgcttgttaatttggttgatctcactacatttttttttttttaccccatccaacccctgagttgggcaactggaagaagctgtattagcatgaaaataagtagccccagaactccagaaactgtgtgcctttatgggctgatactcctatttcggggtaggtaaacttggaccacagaagttcactttcaaatggaaagtgaggtctcacgatttcaagcagtgaaactcaaaaactcagccagacaggcatcagtgacgttttgactttacaagaaattggaggaaattttgtccaccaacccatagcctaaaaataaaactgctgactcaatagggccctagattcatatggcttattttaaataaccgacaagttgaaacatcatgttgtcccttggactactgtggctatctagtgtcagagccaactacacaaaaactaaactgaatgtgatcattctggttagtgggcagaactcaaggctattcttatgtctagctatgatccttgagttgtttccagtgacctgaatatttggtttgctcatcagactagcagattaaatatacccttctttggggtaaccaaatatagaaaaacattgtggctgctaattggacagtttgggtcactaatgagttcagaatctgtgtttatttactgctatattgctctttctcactcataagttatctcaaatattccataaatcttctcctaaccactccactgatctcttgcttatataatttattgtgttcttatagtttctctgggtatttcttgcttcaaagagttgtgtataagctctgggagggatcatgtttaaatatcttgacattcttactctgccaagtctatcagtggatactgattaatagattctgtcatattatttcacagtcgagaaaatagaaatttactgtattttactatgagatatatttatatgaactcttttaactagtgaagggatgataattaccttctgaaattagggatatttaacatttttataattttgtcttagttccaagtcttatttttatatctaaacagaagagtaatttgattgattattacttcattttattcctggaaaaactgcatgaacatatgagaataataagaattggtagcattcaaacatagtagctaacaacatcccacaacatattactttatatttgatatcagagattccatctgaattgtttcaattaaaatatatttataaaaagagagcttagttttccttgtcctcaaaatatgcaacatattgtcttcatttcagcaactaaaaataaagcaaaacaatcactaaactatttactcatttcatgtcttagtagtttattttcagaaaagagttgtatttgtactgaagtcactctacaaacttaggccaaataaaactttttatatatgcatctcaatcttcaaagtcttaaatttaataaccataaaaaattttgtggacttactttattgtttatagttgtgttttatttgattaatgtttttcaagtacttgtttgataaatatataataacattacattttaagtaatagccttgttttggttttatgtatgtttaaatataataattatagaatgtaacaccatattttatatataggtaattatctttggcagaataacttttttcacttaaattgtgatttcaaaagatgctaattacttcagaatcaagaaatcagtaatagctaaatcagaaacagaaaatattagaaacattgtttagtgcagcactatgctcatgaacaataaaaatgacagacatagtaatatctattataataatagaaataatacatatttggagtattgatatgcaagatctcagattatttttaaataaaagtttagtcttttaggaattatcactgtgaagaaaacaggaaatttctgcgtactgatatttttctagggaacaaaagtaacttgtctagtgcattaaatataaattccagctagcctgtgcaacattatcagaacacatctctaaaaaaaaaaaaaatagaaaaattggccagatgtggtggtgcatggctgtagtctgacctacccaagaggttgaggtgggaggatcccttgagcccaggattttaaggctgcaatgagctatgattgagccactgcaccctaccctgggtgacagagcaagaccctgtccctaaaaaataaataaataagtaaataaatttgtcttagtccattttcacgctgttgataaagacatacctgagactgggtaattcataaagaaaaagtagtttaatgaattcagttccatgtggctggggaggcctcacagtcatgggggaaggcaaaaggcatgtctcacatggtggcagacaagagagaatgagagccaagtgaaaggggaaaccccttataaaatcttcagatctcatgagacttattcattactatgagaacagtatgggggaaaccactcccatgattcaattatcttccactgggtccctcccacaacacctgtatattaagggagctacaattaaaaagagatttgggtggggacacagccaaaccatatcaacatttattccatggaaatattataataattctagtatagagaaatattaatatttatgaagcatacaattgagagtgcacaacaaaatcagatttgggtggggaataaaacaaaactaaactaaaacaattaatatcctcccccaaaactctagaaacattttagacccatagttattctgaagacatcagttaagtttatttttcattgtcattaatggcaagtttgataagtttactcaatattatttgaaattattagcaggcttatttcaccattagcaagaaggaggtgctgaagcagcagctaaatctattactttttttttttaaatgatttcctattcatgccctacaagtgtgagggaaatctctgaattttataactcaattgcccactttactttctttctgttgggcactgtgtggtaactacttggtttggtgaaaatgaactaaattaatatttctaaaacataagtttatgtttttgtaaactgcaaatacatattagattttgtatagtatgggaaatatacaatttaaacaagtttaatttttttatattttaaacttacgtagctttaatctcatcagttttttcttaaacaatacctagtgagtgctgacataaccatatgcggtaacttgtttatggtaataactaaaacagttaatcacagagatatttatgaaacattttagcagttattgactattatttatcatagcaaaaattaaaaatcatgcacataaaaaatctcattttttaaaattattttttatccttttatatgatcccagtattaaccatataatccagcatttctcattcatgctgccagagatggagacctcaacagaaacagtgggctgaagttgttggagagatgggagggttgaagtacaaggacgtttttattaaatatccctacctttactactatgcggtctttacaacaaaaatgacccaacagctaatctaaaagaagtatttgggtgaaaaaaaatcaatgaaaatacaaacctcaagagtattctctttggcaaataataataataataataataataataataatataataaagggggtcctgagggtagaattaccatgtgcaatagtgatagttttattcattcaaaaaatagttgtttagtgactactttgtgccagtcactgtactagacactggagttacagaattgggcaaaacagtgaaactccttactcaaaaggaacttacattctaatagaaaaagactgacaagtgacaatgtctgtttatggcacatttcatgaagaaaattaaagtactgtatggagataaagagtgatagaatgagtgttcaggaaagacccctttgagtaattgtcaggcaaatgtgataaccactatgctctggaaaccccattgcgaaagtgacatcaaagcaagcacatgaatgaaatgaaagaataagccatttgtgtgtataaagggacgagctttccagggagagggaatagcaagcgtaaggcctggaaaaaggaatgtgtacactcacttgaggattagcaaggcagacagagttgttgaaacaacagtgagaaagaccagaagaatgatggaactaatgttgataaagccatatcttgcaatgctttgtaggcaaacatgttctataagtcattggaggatactgagcagaaagtggtaatctggtatgtgttttagaaagaaccttctggagttaggatagaaaagagattctagttgggcaagaatgaaaataggggaccagttggagtccattgtaagagttcaggcaatgtgactaggttggtagtggcagagatggtgtgccatgtgtacagaagttgagttgtgttttctttcaagtgtacacagagacaaattatttgttcacattatgcattgtggagagtttaggaatgcgtggtattacttacatgtgacattatattgaatatggataattaactagcttaagtgtcttagttagaataaatattaccaatttattcgtatgaacttactactttaattattttacccattttattaagcatttaacaacatcatggaaaagaaaacaacgtttagaactgattttccagcgttaaactgcaagaacctttagaagtatgcataagatgtttcactgatgagatcatgtattataaaaataagatcattatgttctttgatttctgaaacttcataaagaagaaagcttcacaacatattcaaatttggagtcattgtgccattcatgaagatatgctttgttatctaatttttggtttaagtttccagaaattagaccaataatttttaccattgctttataagatataatcagtagattgctattagttatgtaactctgtaaaaagaattaatctgttctatctagatggttagttcaattgaaattatattattgtacaaataaattttatttctagagtaagactagaaaaaagtttcaattaaaaattctctgagtggttttctttgaaaattttagtaagttaaattgaaactgtattcagcaaacatttactaagcagttccttggtgtcaaattttatcctatgccttagggatgttaggttcattatgatcacaaagatgaataagacaatttggaagagtttcacatagaatggtggaatattaaattagtgcttattaagttaataagatagctgctgtgtaggtgtctttgttagatttccagggagggaaactttaccattccctcagtttagagttacatgctttgatcgaagggtatgcctgccggctttcaagtgtttttactctcacaggaactgagacaatacagttacaataatatgtgcattcaaatttctcatatcttattggttgacttatatgtgaaataaccagaaataacacaacataaattattgctacatgttaaattacatgattctgtttataaattatatacaaattcactgaagagaaattaatgtggatagagtattcaggaggaaaagaaccagagatgtgtcttatagaattcgaatactagagaaaaaagaatatcattttgggcagggaaataacaaagccagtaaaacaacagaaatggatatgatatatttgaatggttgtacagaaaaatagtgggaaatgagcattgttaagtcatctttggagccatactttccttaagatctcaggtttcgggttagctattctggttttgtttttcatttgtaaaaaggaaatcacactacaaattttgtagggttgtagtgagtatcaatagaggtgaaaatcttccaaataatatagcacatttttccctcataatagacacattaatgctagctattactatgatattcatttttctttccccttccaccttcccagtccagggctgcaaacacagcaaagttgttttaacacaatatatctactaactgaggatatggtaaaaacaacatattgttatttaaaaatatataatttattttttagtgaaatttgaggtttacagatgaattgtgcagaaagtagactttcctggaccccctccctttccatttccatacacattttcccctattattaacaacttccattagtgtagtacatttgttacagttgatgatttattattgatacatttatgattaaagtccatagtttacattagagttctctctttgtgttgtacaattttaatgagttttgataaatgcataatgtgtatccaccattatagcatcctacacaatggtttcaccaccctaaaatccttctgtgctccacatattcagcactatctcaattcttttgaatccttggcaaccactgatcttttactgtctctataattttgccttttcctggatgtcatataattggaatcataaagtacatggccttttcagaggctctgaacttgaccctctaaattctctggtgtctttcacttagcaatatgcatacaagtttcccccatgctttttcatggcttgaaagctcatttatttttataaatgaataatactattccattgtatggatgtaatacagtctgtttgtatattaaacttttaatgaaatgtctgaatgtgtctatctgtatccttttttttaagtggctaatatctttcataattaaaagtattatagtattacataatttctatttttctctttcatatttggaatagaatttttattttaagcaatgctaaataaattttaaaatttaatatatgactattcaatcctattaatatattcctatattacaacttttttggaataatgtagctgtgttcttttaatatgtgttatttgaatttttttctaacttttttgctgtatatgaattagaaatattttaccatttttcaagaatgcaatatattattacctataataatcattttatacaatagatctcttgaacctatttctcctatccaactgaagttttatttcctttgaccagcatcttgacaacctttcccgctacccctataatcagcccatcccctagtaaccaccattcttctttctacctttttttttttttttttttttttggagacagagtctccctctgttgcctggctggagtgcagtgttgcgatctcggctcactgcaacctccacctcctgggttcaagtgattcccctgcttcagcctcccgagtagctgggactacaggcgtgtgccaccacacctgggtatttttttttttgtattttagtagagatggagtttcaccatgttggccaggatggtctcgatctcctgacctcatgatcagctcacctcagcctcccaaagtgttgggattacaggtgtgagccagcgtgcctggcctcttctctctacttctatgaaattaattttttaatattctatataagaagagagtggatgtagtattttcaccataaaaatgataactatgtgaggtaatgcatatgttaattagctagactagtcatttcacaatgtatatgtacttcaaaacatcctgttgtgtacgataaatacataaaattttatctgtcaattaaaaaataaaaagttaccactttatagcatattcgcttatatggtttgtatgtgacaaaattttgcttttcatgtgcctaagagaaaggaggttacagaatgaagtaacacatacataaattgtgctgtgtagtcaaccctccaaacacagacaaactactactttatgttcattttttacctgaagtctatatttcttaaaataccactgcattagtccattctcacactgctataaagaactacctgagactgggtaatttatgaagaaaagaggttcaattgacttacagttctgtaagctgtataggaagcatggctatggaagcctcaggaaacttacaatcctggcggaaggagaggggaagcaagcaccctcctcacgtggcagagcatgggagagggggaagggggaagggagaagtgctacacacttttaaacaaccaggtctcctgagaactctatcaggagacagcagtagaagactggtgctaaaccatcagaaaccacctccatgatgcaatcacctcccgccaagcccgaccttcaacacgtgcagattaaaattcaatgtgagatttgggtgaagacatagagccaaaccatatcaactactttatttctgttaacaaagttgttcactttttcaaacaatttttagtttctcccttacgtcttagaggaagtgctgtttccttcctgcagaaaatactccctctgtctgcactctacacctgaacctctagattctgaaagactgtaatctatcaatcactagagttgtttctatatatttccctttccatctgtacaaattattgaatgaatgaatgaatgactcttctatgattccattgttggtttttgagatgcatgtcatggttacactctaggtatagattcccacaccttgactttatatcctggttccaatgattaattaactctatgaaaatgaacaagttttctaacttcgcaaggtttcattttccttatctgaaacaggaaataatagtaggattatgtaagttttatggggaatgtgacaattcctgtgaagttcttaacatagtgctgttgtacagcagctacctaaagaatattagcaattattgttttaaattgatattttatttgatttatgaatatgaaatgtgatgatgctctcccccagaatttttaaaacctttttcttcctagtttttagagaaatatctttctccgtagcccctctcaaagatactctttccaagcatttcaatgttctttctctgcacaccaccaacacacaaatgcacaaaaacacacacagagaataatattgtcaacaaacttttctaagtttcttcgttaagtcctttgacattgcctgagacaagaaaacatggagggataatttcatttttttatgtctttctctaactcttgacggtgaacattttgttctttactctttgaaagtttttacatttattaataataaaatgaatgtagcaatatagcttctcatcacagatgctttcattattttaaaatattgtaattatttcttacaatatattagagcttaagttcatctttgacagatgattataacctggtgagtgaaaagcattactaattcaacatatttaagctactgtggaaaattagcaactttgtgaaaatggaaaaactcatttcctaatgcgatttaggcaaggctgcaaggattttcattaaataatataaaacaaattagagggatagaaacaaaattcagaggtagtaaacagaatcacactgagagatgtttcaaacaatattttaactatttaaagactaaaatcttttaactgtattctatattttaaaatcagaaatgtctgttaattctcagctatataatttgatgtagttattattactattataatttgaccaatgtattaagaaaataattaatattaaatagatttttaaagtttaaaataaaagcaattttgaaaagtctagtagcataattcatgtactgagtgtacaatagtttcttcagttttttaattctatgaagtttttttttctatatctacttccaataaatgctgatttgctaatctagaagaacatagaaatgattagtgcaataaatcagattctttacttcagagtaaggaatgctttaaattttaacataatcgttactgaggcaattaagtgtaaagcctttgttttatttaatttgattactgattttttcttgtgactgaaaatcaattttttctctctttctttctttcttttttttttttttttgtttgtttctgtctacagaaagctgaccttgcagttgctccactggctattacctatgttcgagagaaggtcatcgacttttccaagccctttatgacacttggaataagtattttgtaccgcaagcccaatggtacaaacccaggcgtcttctccttcctgaatcctctctcccctgatatctggatgtatattctgctggcttacttgggtgtcagttgtgtgctctttgtcatagccaggtaacatgctcacttttgtgatttttttggcaattgttacctcctttatctaactaataattgtcaaaagtcacaatcaattttactttttctgttctttattttccatggggtgctgagaaataatgaaattttaagaatcacattcatttattaaaatgtactgtcctgtctttgtgggcagagagcatgctggttgtgtcagtaagctataagtgttatagggattactgttttcttaaccagaatataaaagctttttaaatcaatatgataaatgaatcattgcctcacttcgaagatttctgaagaaccaaaactaaaataacatgttttactaacttgagttaataattcagttataagaaaaaccaaagtactaaaatttaaaaggaggccttttttaaggaaccaagacatttataataaacattctaactataaaaggactaccttagtattctacataatatttgtggtttttttcttgttttttcacagaataaatgtcattaccaaaagtactttattgtcattgacatgtagggtatgtttcaagtcataggatcagaagataaaatgccaagctggcaaggtggctgatgcctataatccaaacactttgggagcccaagataggaggattgccttgaggtcaggggtttgagaccagcctggtcaacatagggagactctatctctataaataataaaaattaagaaaaaatgcctaaatgaaaaatatataaattttatattttaatagtggcctttaaaatctgtgatacagatcaatctatgttgatggtattactttattttactctcggaggtgtaaatttataatcatgtttatttatgcctacctcactatcaaactttcaactgatagattgtgtcaatatgatttaatttaacttttgctttaattaagaagattagtattgtgcctcaggactgatgactctattgacatggagttaagccacatattcattatattctttgaatttttacgtttttttaaatatcaaaaagataactctgaattaaaaatcaattagaattctacacataatttttcatggagataaaaatacctataaagtgtacatatatatatatatatatatatatatatgttttgtgctgtataaacaaaattaaatatgcagtgccttttcaattacattacatggattcttttgataaatttatcagtaagggtatttgtaaataatcgaactcatttttcaataaggaattaaacttttttttttccaatgaagtaatgtattttttttctagccataaaaatctttagttcattcagttaaaaattgatttaaatcaattagaagtagcataatattggccgggtgtggttgctcacgcctgtaatcccagcactttgggaggccaaggcgggcggatcacaaagtcaggagattgagaccatcctggccaaaatggtgaaaccccgtctttactaaaaatacaaaaattaactgggcgtggtggtgtgcacctgtagtcccagatacttgggaggctgaggcaggagaatcgcttgaacctgggaggtggaggttgcagtaagccgagatcgtgccactgcactccagcctgggagatatagcaggactccatctcaaaaaaaaaaaaaaaaaaaaaggtggattatatttttatatatttgcacacagataattttttacatatttatatgtaattattttacaaatgcattatttttacctaattagttagatattaagaattgtgttcttcagataattattatttgcatttgcctaaaactatgtattggaagcatattgccatatagcatttgaagctgtacagtagagcttattaaaattttatgtgacttttggggttctccccacagtaatgagaatttgaagtatgaagttcctaacattttagctccagctttttctaccttctgtgaaaataaaacagccttcacattttttatcatctttagaccaactgcatcttttttatagtgacagacacagccactctagtttatgtgttcagagaaataagtgcaagagtttcagattaagcaattcagtgcctagaaaactcttcagccagcccacaggtcaaacagaaaaataaatactccaaaatatacaaaaagtcttccttaatgtttgcatgtacccttgtttttttttaaattaacaaatttcccaggaggatagaaataaagcctagacgaaagtgtcatgagacaacttcgaggtaactgtgtgggcattagtcaagctgaattaggtctaacagtacttttctggaggtcttagacacagagttttgggttacttcaaatttgtattaggaaatttagttattcctaattttccaagcccacggcttttgaagttagattcaaagcaaatactgaaacatctggtttcctttctagcttaaaaaagtacatttgcaaatagaggcatatggatggatatgcacttatctaacttttcaaaatatttctgtaactcacttgataaaccatcatagacagcatctgtataattatggtaatctgtactgattttacgtgaaagaaattcaagtatgtcatcctatttgagaacataaagtcagctaatgtaccagttttttttttactgctactgcttttatattttgaaatgttactgttatattttgtcatagtttttaagtgaacagataggaaaatgatactatttcagcttcttattccacaatttcaaaacaaattgcctcataaaaaaataagtttaaatcatcatttatgggtgaattaatagatattgcattaagtaataatggtagacaaactgtattaagcaatatataatattagagattcttggtaaagtaataacacaaggataaatattttctggattttctcagaatattttgttcaattttcaatcttaaaataatcttgtttaaaatatttctgaatttgaaaaaataaaactgaaaaatcagattaaaagcaaagtctgaatatggtcaatttaaattttaaattctgaacatccaaaaatcaaatgaatttgtttaattaaaatatactctgacatagtattgaacttttactataaaagaagtttgtgacatgcaaaggcaaataaaatgttcaagtttaaactgtataatttaattgcctttgtaatttaaatggaatcactatctgttagaatttaaaatacatttattttaatgcttcctttagcatttttattttacctatcgaaaaaattatgtcttatgtcatatagaggtcactgatatactcattgacataattgttgatatcataattaatatggtattttaagtatattctttgtctccataacaattatagataaaagaaagatcatgtttcaaaaaattcttaagtatgtattttattttcattgaaggtcacagaaacaaaggcataaaataactaccactttaataacagatttcgtatttattaattattggaatctacataatattaactgttagggaattatgtaatacttaggaataaaaacgctgtatctcaaaactaaattataatgagtgatttaaatattgtcaaaatttctcaacattattaattttacttttgttttggtcattatctgatgtcatttctgttattattattacaattaacctgctatatcttcttagctaccaaaccacacctttgattggttttgtttcctcttttgtttaattattctatcaactgctcactcaattagtcaaatatttgttgagcctctagtaagcactaattagatcccataaaatattaaacatttatttctcatttattcatttatttattcaacaatatctattggctacccgtaagtactaagagttgtgccaaatgcttgaatcccagaatgaacccaactgaatatgttattttcactaataactcacaatcagtgcatatatctggcaatatatatctattacccttgaataaatttataataatacttaaatcatcttaaattctgtaagaatgccatgtattttaaatacgcttttctgaaaaatatcttgtaatatatattttgctggagagaaacatacaactagaaaggaaatatgaggaagattgttatgttgtcattagactactagattagaagcttattgaatatctgctctactatcatattaataatattaattttattacaaattaagatctaataataattgttagaatttatgtttttaaaattggatttaaaagtagattattttgtcaatgccttttaaaaatttcccctcacatgttaagaaaaaatatctaagaatacttaataaatgttttaaatatatttaaccaatactgagaaggagatgtatggtgttggtttttgtctccatatagttttatattttatgatctcctgtaagcagttatattattatttatagcataatgacataatcagcatgcttatctgaattagctctgaatgttaattaagagtaaggattagcctgggatagtgctttctagacatagaatgaccttatcccaaaattctaatggtagctctttgctgacagagaattaggaagaaatcttgtccgggatgggttcatgcttactcagattttcccctaaatgttttctcctcctttttctttctcttttctttcacctaggcatatgattatagagatggcagttagtcatataaaaagtctggttagggcacccaccccttacattaataataaaatatatttttcaccttgcttcaaatatttattttattaaactaaagctactattgatataatagaaaatgtttataaaatgactccattaaaattcccatatatgttaggttttttttcctcttaaccatatatatctccaagaaaattgagctgttctgaaattcattattggtctagggttcttagcagtttgatgtacagagatgaataactgaagaccaaacctaaaagaaaggaataatggtacacacatatccctccaacaggattgatgtaaccttaataattattcactaagtctttaatagtgcatatcttattttgaaattggcatttacaaatacaaataaactttggagaataaattactataccaaattttgcaatatgagtactattacataaaaatgcattaggctatttaaatgaacaaatgattagggtcaaatagaggagaaagtgtaaaggaaggcaaacagtattaagtaacctggacttcttagctagaagagtaaatcaaagaatattcaatgtgttacatgcataacatttttctaagttaaaagaatataggaattttttgtgcatttctgtatataattgcctttaattatttttagagtattagaatattatctatcatattagtgggttaggcagcagggcatggactccccagaatctactcaatggtttattatttacagtgaccaccaacactgtcttaactttatattttggcttaactgtttgatggttgaactgactttagaaaaccatatccaaagtgcttacattaacagctttgatctcagctatggactagcgtgcaatagctttcatatttttgtcacagtgatgggtgacatttaatgtacggtgaaggacaacattgaattattatgcacttaaaaatagataactgttttggtgggatgttcagtgttaaactaatccgctgtcaaaacgactgttgtcacattaaaatgaaatgccaattttgttgtttgtctttgccaccaacttgccagctttttaccaaaaaaaacgatttcaattttaactttccataacataactttagatatattttatttttaatgtcctattttttacttaaataaattgcagaaaagcctatttattattattcttcacacttagcaattttcctaaaatttactgaaaatttagttttaaatacgtgctgttctgctaatatgcctgtcacatattaaagtgattgctaaaattgattaaatattgacaaatatttatctaaattatggacctaaaagtaaacattgatgaaaattagatatattttcaaactgtggattaaaatatttccatagtagatgaggctacttctgcactaaataatatttttaaaattattattttttgttacaatgtacctctttattttagtggttccagtgatgtttatggttgcaagtatatgtggagtcaccaacccagaaaaaattcttagtttgtatctttagtagaaccaaaccaattgaaactaagttgaatcaatgacttcttttcagttgtgataaatatggtattgaggtaattgaggcaacagagctcttgactgaaagtatccatgtaggacaaagaagataatttaatcttcagaggagaaatcaaacatattttccacctctcaatttttaaattatgccagacatttacaggtgtaaaagatttgagaaaaaattgagtaagacaaaggcaatttaaaattaatgtgctttttctgtaattttctgtaatcaaatgctagttggcattttttaaggataaacatgcttatttattttttagaagtatctacatcaatctacaaattatttttttcacataaatataatttattgttaggccaaaattaagtataaacgcaagagcagaaatttgatagcccatctttatttttcaaattctatggataaattattggcctctgtatccttctttgcctccatcaccagaattgagtggaaagactcctggaagcaaaaagacttcctctttctagtcattttaagtgtttccactggaaaaatatcttggccaatgaacttctgagaactatggtcatctgtgatgatttgtttccatttagaagtttcataatgtctagctcagtaaatcacaaaattaattataataagttacagtttatggggtgatatgaagaaactcagagtgctaaaacttgaagtacaacgcttattaaattcttatatttgctaccaaaaaatggcacctctgttcttaatcaattctttatggaacatgtcattgtatttaacacacacacacacacacacacacacacacacacagacacatacacatgcacacacatctgataagagcagcacacgtataaaaaatttttttaaagatttggacaatggagtgtagtgggttctttggcagttactaatgtgtcttttatacatttctcactagctaattcaagctgagaagctaataggacaagaataatactggtttatcttccactttattctttttttctttttcctttcttccttttttttggaccagaataaatatttttttgaggtgtcttttaagaaccaacaggataaggaaaaacaatcattttttaccaagtgatacactttttcttttatgttttgttgtttctagatagcaacattttttcatagcggcagaatactgtgaattgcttgtaagaatacacctctccaggctggtctgtctgtggtaattctcaaaacaaaatttcacttctgttttccatagccactggaaaaatggtgcccttggtctttttggaagctttctcagtcaacctaagaaaggtcttctcaatctgaaacaactattccagcaaaatcagtggctttaaaaaatttcaatttttttaaatgaaatattttaatccacaatgtctagtaaagacaggcgacatcttttatatgaacatatacctttaaaaagtgaagtctgtgcaggaagccagtgacataaagataatgaagaaataaagaattgtttactaggtatttttctttcattctgtatgtcttaatgattaggagtactgtgctcataaaaaggcaattgtcttgagaaatgtagaaaaataggtcagtattttttttctttaatgccaaacatgacacttaaattagttacaattttacttggataaagctgtccttttgctgtaaattatttggggtaagagtcctttcaaatggatggttgtctatgcagtcttgtaccagagtggtgggtcaggtgagggacaattgagagaaaaaagaagaaaactaatacgtattgcatgtcaacagtagccagattatatttgagaactataaagagattcatttattacctttttttaaaattagtaactgtgtgtttttatgatatgatttaaggaataaatacatatatagcagcccccagcccctcaccctcaccacaaatgagattagagatgttttctttttgttgaatgctgttattgtaacactttttaattttaacttattatgaagaagaatgtgacactaaagaaaaaataaatttagaagaaaatggaaaacatattcagaaaagcatttgtatcacttgatttgttttgcctatcatgttaactttaccttctagtttttcttcccaaaatttagaaacttggcagttttttttatttaaagtatgctctattaaatatttttactacatgttagtagtatacggttttacagtaacagataattccttgaaaaaaaaatccttagttagctgtacttaagaagtatgtctttttctttagattgcaaataagaaagcttgaaaactttccaatcaactgggcacctagacaggagacattagcaaccaaatgtgtagatttgctttataaagctagtctctggaaatgctaacactttttccctgaaaattattagctacgtgttataaagctagtctctggaaatgctaacactttttccctgaaaattattagctacgtgtattaaaagaataaaacaacattgtgagtttttctgaagactcaagtggtattagtattgttttttcataattcatggatatgagagaaatatcaatgttaaataataatgtacagacaaaattttagtgataaatcacatctttctttatactaagtaaaattatgcactctatccaaataattaatgagtaggagatatagtgtcatcaaccagtgtaacttcattcattagagcatctcacaacaccttaattgctataattttttacattccattacataattacatcattcaagttaaactgttttcatatcaatcctgttgggtatacatatatagaaagagagaggtttctttttgttgtttttgttttttttttttttaagaaaaaatatcgtggctgtcctaaatagtaatgggaatttcaatatctttggatagaaatatcttggttgatctatttcgtatataaatataattagtaaaacaaatgaccatgcaaactattctattaacttttaatatgtatagtttttctagttagctcttgtgtaataaagctgactatgaaaatataaagttatctctctaagaaacttgttgattttatactcatttttgaaattttgtttggaagcccagaaattcacgtttcattcctaatgacagtaaaccatattaatgaagttattatatgtatttgcatttcaagcctatagttattttttctattttatttaatgagcattgattgaaacagactttcagttttaataccttctaacttatataaaggatgatttttctctttccccgcctggatataacatagtttcctgctattctttataagagatgttaaatcctaaattaattacttttaacatttcgctttctcatgggcttctgactacacctgagatgataaaatgagatgaacgcatttgcagtaaattttcctattaaatggataaacttaatatttgaagcaaaggtgaaattgtaggttttgaatgttactggcatgataaagttataaacagaatagggctacaactgtcatctaagttggttcagaatatgcacctgaatattattttaacataataaaattaggtaagtgtttccctgcttcccttactattcttggtaatggggggtgctgggaggtgtatttcagtataagttcagcaattcactagactgaagatatgttttggaaactggtaataatctagtgattttacaaaataagaaacattaaaaatagagaaaattttgcttgtaaatggacatacaaaaataagattcatacttagagaaatgtgtatttattttaaaatgttgatattactacttcaattttcaattagagcttcaatatttaggaagatattaaaaataatgttttaaatcatccacctaagaatttaaacatatttattttggagccaggcgctgtggctcacgcttgtaatcccagcactttgggaggccgaggtgggcagatcacctgaggtcaggagttcaagaccagcctgaccaacatagagaaaccccgtctccactaaaaatataaaattagccgggcgtggtggcacatgcctgtaatcccagctactagggaggctgaggcaggagaatcgcttgaacctgggaggcagaggtagcggtgagccgagatcgtgagccgagatcgcgccattgcactccagcctgggcaacaacaacaactacaaaatatatatttattttgatattttagttgaaaacaaaagtaatacatgatttccaaacatatttcagttgttttaggtagtaaactgtgtatagaatgcatatatataattttaaaatattttattgatttgtttgatacaatagagtgtctattttcaaaagacatttccaatttatttagtggggatgtagaaaacccacaagtcattcagctttgtgaaagatgttataaaaattatttttataggtaaaatttcctgcaaaaaagaaaactttacgtgccttatatcttgatggtagctgtggctatttttgtgtcatccagataattgcatattagttaattcaatttaaatggccagatgattttatcctttccaatgctagcttcaagtccttgttgataacatcatttacttactgagtgtccttgtttttttttttcttaaaaaaagcatagttttattttttattattagaaatctcttgaccttctgacttatctgaggacagtctgcctgaagtctgttaattctggatttactgctattaaaatccttagcaagtttttactgcaagctaaacatttgcttttgacctgtgattaattcaaatgtaaatcactctcatagttcttttaaaataactactttttaagtttggtattttatttgcaaataaatagctatattggtaagaaataattttttacaagacaaacctatgtttttttatgtaatattatatgtgagccattttccttactattctcaatttaaagccactcttaatttgattggacaattgggtgttttagaaaaaaaatgtatattgatagccagtgaatggaactacatgatagccattgtatattaaaaaatagaatccagttttgaatgtctaattatagtttttattttactttgacatttgtaaaattgcctgaattcatggcaaacaatattatgacttttcttcagaaatcttattataaaatgatcaatagatgattataataatttgtaatcccataacaatctcataaaataataatctcataacaataaggaataatcttggctacattaaataaactaaaatacagtataccattataactttaagtaataagaataagtcataaggatctgtaatcagcttattgatgaagttaatttcctataacaaatataaattttaagtggaagttagaagtcataaattctaaagttgattattttattgtttttagttatccatttaagactaaatcatatttatttttcattaagattatgtattttaaaaaattgaccacgatttaaatttgttatcactaacatattacaaatcagtagaactgatcattgttatcatttcactaagcctttcaaattcatttggatctactaaataatacatttaatagcatattattacaatgttaggtacaaaaatccttctacttcaccatgtacatctggtaactttctggtactaacactaccaattaaataatgtcgagcaattcatgaatcatctataaaattggcttaaaaatttaaatgatatttattgttcagtgatgtgatgatagtttaataattggctatggcagtgaaaagggctttcctttgtagcatttgccaattttcatagtttaaatattcccacaataacaaatatcaaactaccaatgggagggtcaccgaatacagatttgggaaaagagatgcaaaattagttattgcaagccagaatgagcaggccctaggataccactaatatgtaatatgttcaagagaagggaaaaacagtaagctgtaaaagttaatagcaggtagttcgggtggaatgtattgacatacaaatatacacaatgtatgaagaaggatatgtggaagataatgacaaggttgtagagccttgaaagcaaaagtaaaaagttaagttgttattaagataattacaacctcggaaacaattctaaacttaaagtaaatgtcagtttatcctcttgctcatttaaataagtttatacctaaacaattagcataacatttttgagttaactgtatatgaacatatctatggacaagagaaattataccaggaagactttagctatatgatgttttcagggaatgagtcattgtgaatattaatgttttcttaattattgagttttcaatactaaattacaaaaatttaactatttacatggaaatttttttaactacaacatattctttcctgcttataatttttaaccaaaagttcttaaaggaataaaactctttaagataatttagttgcaatattataaacatcaattatttttacctgaaagttcagtaatagcttcagggcctgtattagaagaaataggttccctcgcgggtaataggaaacttcaccatgttgtttgaattaataggggatgattgtgttcatagtctcaaattagacaaaattgaaacagcagctgaaaggtgttatcaaggaacctaacacctctatctacctgctacatcattcttagagacttttatcctcatagttacaagatacccattgaaaggccaggcattttatctgtatcccaggctgggaagaagggagaaaagagaaagagcaacctgcaaaagtcttcacctttttattcagaaaggagatgcttcctctctgtatatcttattaactagaattattttgcttagatcgccctagctgcaagagaggctgcagaaatggctttcttttatctgagcttactgccacttcagttcttttgttagaaaagtgatattattgggtatgttattggcagtggctgcccatagggatttattgaattgtgaagtaatgattcatcactcatgcaattctctcaaaatttttatttcaagtgctcatttctgaaattttctttttccttcattgtcatcagttatcagaatgcctgtctctaagcagtataactgctcccttcttgtttgttattttaaaccacattttctttaaaacaagttaatgaaacgtaaacaacgtatgaatagtaagtgcaagtatttcatgtcttagatttctgttatactttctttctggttctggtttatattgttgaaattcaaatttgccgaactagttttgtgtaagaaacatgaatcattactctaatattttaagtgatgctaccaaaatgtaaatttttaatgttgtagaaaataactctgatttattttgatgtgggatattcaaatacatcaatgtttttcccaacttctctatagccatgaagaagttggagcaaaaaaaaaaataatagttggtaaattgatacccttcataatgcccatataatataaatgcatcatagcatattttaggagagcttttacaaatcatcagatactaagctgtttctaggggaaaatatctctatgatcaaataaggtcaggagaactatgtagtagagttttcttttaggaattcactattaacaaattaaaggctctgaaaattcttgcaataaagaaatctgattaggtttgttgaactagcattgccccaacacttagccatggggccttttttttttctctgttaatctattatctctaattttatgttctctattagttaactttctgaatcaaagatgtgaagcattgctttaacatataagttcacttcaatttttttatcttcatcgtacacattctaaattgattaaatcacttgtaacaagactaagaatctagtctcctgattcctaatggaattatcagtgctcattttgctgatgtacatggaagcataagatcgtgtcacatctatttaagtgatagtttatgacttcatagaacttgtgtatagataacaatttgaagtttttaaaaaaattactgaaacaacatcattgcttcaatttttaatatcttcttttaagaaagtacatacaataaatgtgtaaatttacatttagttataaaattaaagtcatttaattttttaaaaaaatggctggtcttaggacaacctgttattatttattagtgaacttggtcagaaattcaagttttgttattaatcaaaaagataatcattggatacttaagaattttctaaatgcataaaaatttatgaaatcattagaaagttgggaaaaatcctcacaacctagcaaacaaattcccctttttaatactgtcaaatcataatttggaagcaagcatatgattaatgtaaagtccaattttgttagtattattaccttctgtggtaaaggagaaagtatgttagaaaacagttgataatttattttgtgtttattgcaagaatgaaattagttatctattctttataaatgatcagtactcaaggtggattaattatgtagattttaatttcatccacagttgtgaaactatacattttttacgattataatctttttgttggagtcttattagtctagcttatgacaaacaatgtacaagcagaactgaaagaaggtcattgtattttaaatctcatttacatgttagacaagaaatgacaattattaatgttctacttttggaatacaagtatatagtacaaaaagctaaaagagaagtagtgaattcagttcatatgtgagtctagagtgtctaaaacttgactgtagtgatattaaaatggtctgtttagagacaactagcaatttttatcttcatgtctctagtttgctcatcttgtgtaggttggacaggtagcaattttgaatggctcatcttaaaatgaatgcaattatcaaaggattatatggtccatcctgcaaggcattcactcattttaatctttcatttgcagctttctgactccttttatacaatttcatttatagttaatgggaagtgttatagcttagttttagcttactccaaataaaatatgtcgttagacaaaagcttcataaatagcagttattctttctcaaatttgaccaagtgttgtttgtttcttaaagttagtaaagttatattatttatttagtttgtgatcataacacacaaaacagcatgtatccaaaacattaaactgattatcataatttatagctagattgagattatataaattcatattccatcctaaacattaatgcacttgtttttttatttagtgatcttttcaccacctaaaatttattactactacatctatcaatcatctacctacctatttctattcatccatgcatcaatttatcaataagtattagcatataaatcagtgtgcaaaatttattttttaatgtctcgctcattcataatttctaatatgtatatatttggaataacctgccagtcactatacctactctttcagaaataaaaaatggaatttttatttattgtttgattaaatggaatagtactacatggggaaatgatgactttatgaataaatattctggataataaaagtagtttttactagagcaactaaagaaaatatgctgtagtttaatacagcaactaaaaatagtttgattttcttaactcaaatattaaagtgcgtttagatattttattgtataataaatcatatacaaaatattgtttcaaaaattccactcattgagagaaattaatgattaatgttctacttcttttggaatacatgtaccatagtacaaaaagctagaaaataactagtgaattccgctcctatgtgagcctagaatattgaaagcttgactgtagtgatattaaaattgcctgtctagagacaattagcaatttctcttttcatttttgacccagggaatttgaaggacttttgtgtgaaagaatttcctgcagattattaaactttcttgaatcataactataaaacaagatctgtgtgtgtgtgtgtgtgtttgtgtgtgtttaaaccttgggataaagactgtaaactccagagacttaaaaccatttactcccaaatttttgagtatgctctcactaagaagtgtggagaaatgcaaacgtaatgcatgttctgtctaagtggagggatttaaaatttattattgggaaaggacaaatgtacatgggaaggcaccagatgctattcaattagtccacctgaagatagcactgtaaaaggcataaaaagcaggctcaagaagtagttaataagaatggatggcatttcagtgttgagaattgcctgcagaggatgtaatcctaatggtatatttgtctataatgtatctaaaaacaatacaccggagtacaacaagtagcaattttatttgtagtttctgcctctattaaccacctgttgtctacctgagatttgatttacttgacctcataaatactggtccgcactagagtgtggtagcacagcaaagaacaacaaattgttgattgctatttttcctcatatgttattttacaaacttatcacttgttgcacagttgtgaactttgtacaaaggcaagaagcattttgaataacatggtaaaatgactacaatcataaagattttgctaacagtttctcagagatttgcagtataaagctaatgaaactgctgaatgtaattctgaaaatcttctggatatgatattttgaaagcagaggtataaagaagtgtatcaactgtacaacatgttaaggaatatatattagatatataacatttaaataagacattgggacataggtattttattttctaatacaaagtcttaagttcttgaaaaacttttaaatagaccaaattaggttagtggaataacaagaatagtttataaacatcatctgaatgctttaagacatttagggaaacttaattgtgtgattaaaaacgataaaagtgcatacagcatttcaaataaacctatggagttctaggcccctgtctgatttaaaagaaaaaaaaaagctgagcatatcattattggaacctcatgcttgaatgaagaagctgaaacttaaagaaataagatgacctaacaagaatccatatttaatcatagaactggagccagattggtgaccgcctgcagtgcaccacagtacgaaagcaacatttagccacccagtgacagaactttactttcacaactgtaagtaaagttcaaagtttaagtcttgagcatgcaggactttaatactcgtagctaacattgggttttgcggtttttaagaggaatctgtttcttcataatatttaatgttactttaggtattaggttattcttttttatctttttttctttcttcttttagaagatcttaaaatggtttcaatccataaaatatgactacgacataaactttagagttctatcagctatgtagtgtgtagcaatatgctacattttagtttttcacttatttcctcatttatcctttaagacattaagtagacactaatctttgtgcattcactcactgtttttcagggtctttggaattttcttcctcctctccccttttatcttcctcctccttcttcattttctgtaagaatgaagagcacatttctgaatttcccctttctttctcttcctactgtttcagtagttactgataggagcttttcagcatgatttggccactgttttttcagtcctacatcattctgtccgagctgtcatttagtaaagattaaatttagaagaaaattttatttattatattgtatttggttgttttaaaatataaataaaaatttgaagctggactagatttaataagaaattgttgagtcattttattatgtgcagctagtaagttggtgcaaaaataattacggttttgccaaaagtacattaaaattaatggcaaaaaccacaattattttgcaccagcctaatatttttacatactagtatttattgaactttttccttattatccttcatgcagcttagataatatatgaatgtttatatctaagctaacttgaaggaggaaagatttttgttgtagtcaatttacctattccttgattattatctttttagtacattacagataaatatatttacctataatgctatatttatataaaaattttaggacctataagttaatgttaccataaaaaagatccagggaagaggaagagagtaaatagatattagaacttacaagaaatagtaaataattatataaaataatgtaggctaatttattaaacttgctgtctttcaattaataaatttgcaaagtgtaatatgtttaacaaatgagtgcatacattcaagtaaaaatatttctatgaaaagacagataagataggaaggataaaaatggagatataatgttcatagcacattcagacaaactaaggcaaatgaaatatcaatcatattgagaacatcataaaattcttttggaatgaaaaggtgtttttatgcccctcccttgttttatacataagataactgaggcactgagtggttgaaagacatactagagatcacacagtcaaaggtgcaagaggactggaaatagggctctcaactagtatagaaattaaaggattctcttcaaaaaaataattttaaacagtgtttgaaattattagtaaaacccaacttcaaagtaaaaaacacaaaggttattctgtaacttttattaaggtactaccagctgttacacagggataaaatattattaataaaaataattgacctcataatcagtataaaagagattttgatggtaaatatttggacagattttactgaagtacaccaaataagaaaaaaatatataaacatgattattgttataatgtcctataaatctctataaataggaacaggaaggaataatttaaatgcctgcaatgagggtttcagagtgagtaaaaaatttttggatgctgaaggaagatagggttttctttttcttttttttttttttaaagatcatttgggatttagggaaaaaagtgtctactgctataagaagttggaacagttctatttgtttagtgaagtagatagtcaagcttgagatgaaaaaatattttgagaaattaaataactgatagctcaaagaaatgagtagtcacagatggacttcttggccttctttcgtgagcacatttcctgttttattggctttggataagtaaagctcctcaaatgaataaaaaatgaagaagaaaaaagcatccttgggaaatgcataaaatatgttcattgcctttttgaaaaaaataatgtgtgtatgtgtgtaagtgtgtttctgtatatctgtgtacatatacacacatacagatatatatgcattgtgtaatacagaacacaatgaatagatatatatagattaattctcattaaccagaattcataaacaattctcaaaggcattaagaaataatgcaatttttaacatctacatgtagagaataaaaaattttaattatgtaaaataatataatgcagcactatcagaaataaaaatctgataaaatcagaaatgttatgagttttgagaacagataaactgatagaagtgttgtataaaatctctagtaattgttttaaaaataatgtattattaaaactcttagtatatgtagttatagaatttgagtattaaacagaatcacttaaattattttaaatatctttataaagaatcagaaacatttaataaatattggcagtggtatatgtttctaaattaaaaatagaatgtctgcttataatcaaatgcataaacatgctgtatatgctaaacagtttagtcagtttttgcactaaaaactattatctgcaagttaaaatattataattaaacagtcatttttatgactatctagcaatatggcccaagtgactgggggattttgtttggtttttttaaatcttgattttaaatttgagtcaattgttactaatttactattattatactctctaatgtttgctttggccataagtaataacataagaaaaaatatattcttccattcttaaagtgaaaggagatagaagccaaatagttaaatatgaatgtcatcagttcaaatcaagtgttagcaatgtataattttgtgaggtttttcattggtaaatacatagtacttatttataaggaaagaacatagacctaatcatattgtatatttgagcatgttgtacatgtgaatcatatgactttcaggtgtattctctgttttttattttatacaaataaaataatagatctgccttttaaataatagatcttaccatttatcttgaaattgaaacaaagaagatcattagagagctacagaatgccatagaaattacaggaaaagaattaggtgactataactaaagggggtcacagtaaaataataccaacatacaccacacacacacacacacacacacacatacacaagcattggctaataatttttcaggtatctttatctaagataaataatttttcaagtatctttatctaagataatttttgttttacccttcagtggatttacttcacatatatgtatagtggccccttaaagagaggcagccaaacaaacactgcatttgtattattgctttcttatttctaccatataaaatgtaagggctgttttgtcttctgttggggatacagtaaacaagggagaaatgagctggtaaggagaggataaactacatctggaaaagtcagagctagtttgagatgggtaagcatgtaaagagaggaagaaagaaggaataatgaatgccaatcaggaagttggggctatagccaagaattttaactgtagcctccccagcaatatgaggtgcctgtcacaattacaaaactgtttgcctcattacatgaatcagtcaaatgatcagaccaaattggtattacatttcatcaatagattcttgatttttactgaatcaagaatattattatttatagttttataaaattcaggaaaatatgtatccactcttgtaaatgtatttgggtagctttattgtatctgctactggttcagaatgttttattttgggagatgctgacttaaagattatcctagacagcctttaaacttaaaggtaatcattatttgtaacactttgatttatttttaatcaactattttaacattgccgttcctttacctcatattgaatcttaacttactggaagcccctattctcaaaaatttgcctttaatactattcaaataatggtcccatccaaagttctcacaaaacattgtttgttttctacgtaaaacaacattcaaagagtaaaaataacttgagaacatttagtctaatatgatcatttttcagggaggaaaagtgaggtgaagtgactcatcttattacacaataatacacacacataatttaagtatgtaagttgaaaatcatgagctttaattgcattattataataaaggttttacaaaatcctgtcctgcttaagtaattacccttgtaatgtctacccttgtgagtgaatagataataagtaaggatttattttcaaaaagataataaacttgtgggttatcaattctagaaagaagctttagtgattaccaggggcaacgcacacacacacacacacacacacacacacacacagacacaaacacacacacacaaacacacacacagagaccgagagagagaaatcagcactatagacaagactatataatctgttgtatcaagacaactatcaattatattttttattgggtatacggctaacttgcacagacatcctaaaacattatttaaaaaaatggttggcaaatagaacaagtaatcagaggaagagcagaacctttaaaaaactcgttttcaaggcagcaaaaaactctaacagactctcttaagaagtgttttagctcccactacttagcattaataagtgtgaaagggattcccagtctcaggcctacatccctgtcagctcttagtatttacgtgcagctccttaattcatgctcaaagattatgttatcaacaatgattaccagtggtgggaaagccgggcttgaaaaggctgaataatggctaagactcgcttctcttcgtgcacatttaaaagcagtgctttcattgatagccaaaatcctgctaacaggggtgggtattattgtgcctactcctcagtttcatgaagagatctgttgtttcttagaatttccacgccacctcatctagtttcatgttgtttttccttgtgtcattaaaaaataccttgttcccactttttctgagtgctgtttccactgaggctggccatccagcagtggcctgaggttcttaatatttctctttattttttaaaggaaatgcatcttatgaggtagtgtttacaaaccagtcatattttagatcccaccactcattctgttgaagaaacttgcacttaagatgagagtaatgcaaagctcatttaaaaattctttatctttataggttaataatcattctgatattttgtttatttttcagaaaaatatgttactcgataaaacacagaaatagtatgattctggatatattttatttttgaatttaaagcagtaagattgattccatcagtagtttaaatacaaaataaatctgctcaagaagtagatcacaaaaaagacaggtagactgggtaaacaaggaattcatacaaatactctttgtccaaagtgtccaaaatttactagctatcaatattactacattgctctcgcttaataaaatacacacggaagaacagatacattttagtgattgttttattaactctataatacctctattatgcccaaggaactcctgtgtgcaatttattgaaaagcattagtatgataattattcatggaaaaagcagctctgctctgaatcttctacatccactggcatctacattctacataacactgaacaaagtgctaaagaatttcatttttctgtgtatatggacccaatgaaacaatagtatttttgagcacttattctattttcagtattgttctaatgctgtaagagatgtaaaattaaaatgacatacttcattcatttaatctattagtaagtgaattaaggctttaacatatgaaaatgatatcaaatgggcaataatgaagtgagcattttaggtggaggaggctaaaataaatatggagtagcatatttacctttcaaggagtgtatcatccaataagtgaattatgctttaaaatataagtagaatattaatgagctgtaataaaggaacatttttcctgggaggaagaacattaacaaagtaaagagatcttaatatgaatgctatgtaagatgttatatgagtgtcatgtatgagatatttttgatctatttagataaaccataagactcttgttagagcatagtagaaaaaatgatatgactcagctttctaaagccttgaatattgggcagaagaggttagagtttataaaaaagaaatattggtttcttgcagattcttgatcaatgaataaaaagtattaaagtttgagaagatttacttaatagtcataaatagaaaagacaaaagagatataggtgagagaatcaaaagatagggagatgtgttggtttggaggtaattagagcccaccaaaaattgtagtaataaggggagtgtgaaataaaaatggaaaggcaaattcaggaattattttgaaaaaaataggcaataaactttggtgatgtactagatgtggatatttaagaaaaagatagatgattttaagaattctaatctggattgtgggacaatgcttggattacctgccacattggttgaatatagacaggttgtcagtttggtatggagagcatgatcaatttgatattggtcatgctgagtatgaagtatagcattacccccagttacatctatctgtggtcagatgtaatatggaatgggttgagcactggtgagataccagtgaattcagctatatagatattctagctaatccaaaatcggcaaggggctattccaagaaaagagcaaataggctagctgtatattagtatggatgataatgactatattaagaatctgtcgacattatagtccttgcaatgtgggagttactttggtttggagtgtgagtcgtattactgatcctgacaatgtgttgcccccccaccacacccaagtgttactctttctaattggaaaccttttggcatagtgctaactagctaatatgctgcattcacttttatttactcttatcaaatgggattatgagtgtatgatatcaggtttcttgagctttcagttatattcaattgaaccaaatatatttacattcagttgtgtttattttatttaaaaccatcttcctaaattgtaaactgatatattatttcttagcttacataaaagtgttttctaaatgttttattactttcattcctttcttaaccatagtttaacttcatccaacttcaaaacatcaccatatcattttacattatgaagccttttacatctaagtatagaaaacgcattatagccttaactaacatcctgctcattaatgatttggaaggtaactgaaattaattatagctaggaaaatcttttccttagaaactaactctaaaagtacttaaatatgtacaattaaagaaaaaatgatacgggctgtgtgactcaaaactaatgcacacacaattactttttaagtaatatggataatttattgaacaataaaaatattttgggatatatgttatttataactaacaacagaagatgtataatagcaactgataacagaataacaaccattcttattgaaagaaattgccatgcaggttacataaactacgtatttggaatgatgactaaaaattttcaggctaagaagattgtttattattcattaagaaagtaaaaaattaaaaaaacaagcaaacaaataataaaacctaaaagtgaagtggtacttgctgaatataagaagatcacacagtttcacaggataatttggtatgtttgcagagcatgccactgaaaagaaacctttattttatttactatggaataaaacagtattttaggaaattatttcttagacttgtaataacattataaaagataactgcacagacgaaacttcagggtggcaaggatatttttacagaagattcttgtagtgaatccttgagtttcatatggatattataaaagaatgtaatggcagtgagtttgatatggtgccttccccaaagttacatgacattatgtttgataattgtttatcgtagacacatacaatgttttaagcttacttcttaatattttattttctgaaatcaatgtcaattaaaaattaatggttttgaaaaataagcaatctatcccggaaggtattttttccccctctcttcaaatatgtttagttaaattcctttaatttgatttatttcatttgagagatactgtgatctttcagaaaaattgctggggctcttgcttttagtatttcttcatggatttaaagagataactttttctaacagtgtaaaaaatagcaatattctattccatgtgaaaaataattcaaattcaggtggcaatgttaaaatatagtacaaacataatactgtaaagtttaggcttcaggtaaatttgaatgttccttaaggatttcatatctatgcatatattatttaattttaacatttgaaatatttatattattaggcttgatatggcagtaaataaaaaataacatttattccataatatttttaatagaaattagttaatacacttattaactaaagcatgatcttttcttgagcatttgtgacgttttttgtattctgataatatcacagactttatgaccaaatcttaattattgaatgctctcagtgtgcatgatttggttctacatagtgaaggatataaatatgttaaaaagtgatgaagcaggaagtcttctattcgagtgaaaattaaggaattactcattgattggaaagtaggaaaaactagaaatagtattcctctataattaggaataaattagatcataggaattcccttttcttgttttatgggaaatgataaagattgaaatgctgactggaatggattgcaataagagagtaggaacattttcacaggcgatctccattacagacctgactcaaaccttctgtgcacttcagagatacctgatttatacaaaactgaatttttatactaatgtaatagttttcttaagtcatttgttacagttcagaatgagacaatatagctaagtttgtttcataattggcaagtgtgacacaaacatcaggtgatgttattattcattatatgtaacattttcaatagtttattatttaaatttgccatctctgtaatgcctcaccttattctttcatggcttgttttaaacaattttagtcgcaggcaagtctgctttacaaaggcttgagatgttcccattttatgcctgatcccactacagatgtcatgaaaatggcataatttcagcagattgtacttaacagataggtggtaaggttgtctattatctgataagcctgtagagacctcatttcctttcttcctgacatttaatctaattttctgccaagtatgatagttgttataactggcccttctcaggccatttatgggttaaactaatagtaatttcataccctagaagtagagttaccctagcaactctcagtccatctagatccaatttctaaaaatactctctcatttctggctattttcttttgtactggagacacaactatgaagtccatttccacgttctgcttctcaagaaaatgccaaacacaccagtggatccatgctcacttgtgttggcaccaaactggcctgatcacctatgttgaaaaagcacatggctcatttaaataatgctgaaaagttgagcatagctgaagtgtaggatgattttaaaaaaatccagagttgagcctgaaaacatggcttatagtcattctgtgaaagtttttaacgtatatgggtttttagtgtagcaattacctgttttccatttctctcctaaataaccaagttagcattaccttgtcacttgcctttttttttttaagtttggatgatgtaacttctcttattaagaaggactactgtattttcttttgagaattttatatttttattcaacaaagtgtaccactccttagcaaatagtaatcatccttcaaaatattcttttttccccacaaatacagaagtaacaattgaaaatttgaatatcaaattttgaatttttaaattactttggaaattaaagtaaaaagtagtaagagatcacgtcttcacattattagtttaactatatgcccatgaaaagaaaaacaaagtcacagtaaatatgaaaatagtatgtaatgaaaaaaaaaactttgtattcctcgtactagaatgtttgtttatacttgattttgaaaatgattgtgtctattttgtttaagacaaattaatgtgaaaagctatttattttccctattccaatccatttactcccatctataaaatgaggtggggaattaatatgtcaacaaagcaattaagtagaacaaaaaaaccagaatattaccgttaactgctgttaaatttttaaacaagatttgctttgaatttttcataacacgtgaaagttgaggattgttatgtaataatgatgatgatgaaaaaataaacacatattgaatttaaattctgacatataaataggacacattctagaaaggccatttcagcttaaggaaaaaaagtgttcaaatgtgtaaaatatatcactaattggcttaaaattatatatgttataaaaatcatttttgtactcttcattagttgtaatgtagtttgcctgtgatatgacaaagtgttcaaattaatgttgaattagcttttttttcaaaaaatggtaatgtattccctcaatgagtagtagattattttatatattttctaaattatttctttgctctaaaggtctagagtaagaaatctttaaacaaggattatatactttcagctaacatttatgtagcaatatgtagtttgaaaacggctttgcacatattatctctcatgctgagttttcccgcctcctctttagaaataaatattcagctcagagagatttagtgatctgtcaccacatacaaagtatgtatttggctggaattcaaaccttccagtctcaaaacttgtagtcattctattatgcctcttttaggcactgaagtaatgcaagtgctaataataatgaggaggaggagaatgatttttaaaagtccatctctcaaaggcctcatgaaactctggaaatacaaaattgatacatgaaatcacattagtacagcaaaagacagtaggtgataaatagatatttgaaacagatcaacttttgggcaaaagcaaacactatggaatttcagaaaggagtagcatagaagccagttgggtgaattaactgaagaggaagaggacttttcacttaatagaaacagcataaacaaaggcataatgagacaatgggccagtctacataatagtttgaataaagttaaaaatattgagtcatattatattgagccttgaaattcagagacagagaaagttaaacctaataattcagtagttaatagatattgattctacacaaggggagtttcatgatgcataacttaatatgaggatagttttacaagacaaaaatggagaaaaggagaatcaagtagagacagttttagaaagtccgtgattaagaatggaaacaaaagtgcaatgaagtcggtaagatgaatcaaagatacatttttaaaaagttgacatgtcttaagcatagtttgtatttaagtaaaaatagtaaaagaagatacactttaagtctcaagagctcagagaagtgacacatcaatttagaaaaggagaaattgggaaacagagataatatgggggaagttatttggttcaattttaaacattttaagcatgaggtaatggtgagctacctaggtaggaagttacagagatggatggaaatccattgagggagaatttatggctgtaaattaagagagttttgtaatcatcagtatagaagttaaagtcatgagtgtgttaagtgattaaggaagaaggaaagttttgagagctgaaacagagccatgacagattatctgttagtggggcagagagtgagaaacaagggtgcatgtcagaagttcaaagggaaggcatcattcaataataatggtattagaagttcaaaaatggttaaaaagtagatttgaggaacaagacaatggatttaaaagcaagattttaaaacaatggaagtttaggattaaggagaaattaggtgtaaagatataggagaataatcattttagatgtttggccagaatttgaaaaagaaagagagaagtaaaaggaacatacaaataattcaaatatgtttcaaatgctcacttttttaaaaaccttgtgctaaaaatttgaggagatgcaaagataaataaagaactgtattgggatgtattcaattacaatataatggaaaagggaaaagatgtgcattaatttatagtgaagaaaccaggctgtgataagtatgacttgaccctcttcattttataaatatggagaaaagaaagatatacttgggttacacaagtagtggttaagcgtctctaatgaagacagcccaaaataaaatagcttgaattagtggacatttatttctctctcatccccaatcgagagaacagtccagctctggtgggacagctctgttttcctcagcaaggggcttctaatacttctctatttagcaccatttcctaaaatgaggaagattccagggcaaatgtctttaatgagaattttcagaaagttgtgcatattgcttctaatcgtatgtcagtggctcaaattgggttgaataacaagagcagatgagaagtacagttttagctgggcatcaatgttactactaaaacccaaggaggaaaacaaatactgagcgatagtcatcagtctctattatagatatcctccatgaagagagaatgaggaaagttactgaatggtagtactgggtagtattgaaggatgggtgtaggatttgaatatctatggagtgaagagtagggaattacagggtaaatgacaatatgagcaaagaaatgaataagaataaatacagggctttttttttttggaaaggggggtcagagatcacatttgctaagaaaagtggatcataatcttgaaatgtttttgaaggaaagtgtgaagaatcttgaattccatgtttaaagtctggatattttatatatggacaatggacacaattaaagatttttaaaatagagatgtgatattatgggaattattccacattaaaatcaactgggaagcggtatatagagattagaaatttgaataaaaagtggaaagtccagttaggagactactgctatggatatgacagcctgaactagtatagtgccaatgggaataaacagaaaatgggaagggcaagaaatgaaaaagacattctagaagtttaccgacataatttgacaactgctggagttttgggttatgaggcaaagaaatataaagaatggaagttgattcaaaggatattaagcctaagtgatttaagggctagtggcagggccactgcaattgttcatttaaggatgctggcaggtgatggtattaacagagataagaaatgtaataaaagaaaaattagtaaaaattgtgaattaatataggacactgtggtattggagagtctactgtcaggacagtggaaattcactttaagtcaagggagtgaataggatttaatatatatatttggggaaacaaataattgtatgagcagaaaaatattaatttggaggccaattgatttaaattatgatttaaatttaaaaagtgaatccgaaagagttggaagatgaggacagatactgaagcaagatctggaaacagggaagatagaattcagtgggacagtcaatcttagaggggtgagatgatttagcttaaaaaaataaataatggagctagaataagagttgtgttcacgttaatgtgagagagataaggtagaccacagacaaagcaatgcaaggccagtgagtaagagtgtgtgtgtgttgggagatattgcttgaaagtgggaatcggagataaaaagaattgacttacctttcctcactattagaggaatggtaatgaatcaaattgagaaagaggaaaagcttcccaagtattgccataaagagcaaattggaaattcatattggagaccatttttcttagcctgtatttgtatcttttggaagctttatccttttggatatcttcagtttaagaaaaaaagcagagaatgtgaggtaaaacatgtacattattttaatttaaatatcaatttaccaaacatttatttttttctcttttgaataaattatacaagagacttccttgaaaccagtgtcagtgttcccagattcttccttcctacctttctccatttccttccttccttccttccttccttccttccttccttccttccttccttccttccttccttccctcccttcctccctcactccttccttccattctttccttcctcttcagattatatagtctgagaaaatagaaaataaatttttcaaatgtatatgtataaatttggatatctccccaaccctacaaccacgtctcattcctctcatttcccatggaatcccttgaaacatctatataatacttcagggcttaaggaactctatgaaaaaactagtgatctcagtcaaacaaattacacagtctcactatctttagctatgtttctaggagttgtcatatgggaaaactaaatctagcttttatagaccagtttcatgttaatagctaatatacttttaagagtaggaaaaatatgttttaattatcaagaaattaaaattggaggttgaataactatagttgaagtcatagcatctaataatatttacttgctattattgtgtcaaagtattgaatatttgccacctgctggcactacattaacccatacaatcctttagaatacgcttatgggttaggtcttcctatttttctcatgctttgggcaggggaactaatggcatatggctgtgagggatggagatgggtgctctagcagcagagcccgttcatgatctaaccactaaatcacattgtctctcatgagcaatcaatgttttagatagttaatttaaagcggtaatattttttaaagaacacattcttgtataaagactgatggccaacattctgttacttggaaatactttaaaaaacgtgtataaactattctcattagcatgaaagtaataagggaatttaaatgaaaataaaatgtctaaaaccaaagctagttctatttcagtcagacacaacaaatcaacttactcttcaatcaacctttctgtttagtgtgtcagtttaacttagagaaccaaacaaaacacttttttgtttgtcaaggataggctattaaaacaagggtgttctaaaattgcattagaaagatgaaaatgatttgtttaatcttctgaattttcatatgtcaggaacattattgtgaagaaaattgagctctctgaagtgacggatacattattcaaataactttgattggatgtaagattttttttaatgctttcacaaagcggacatattctaatttggtttataaaagagtggctttaaaatttgaaatactgggaaaaatatttttttagttcaataattagacaaagcatatttaattgtgggtgtaatgtttatggataattccattaattgataaatatatctggattataattagcataaattatttgcaccttaataagtcctcagtttgaactacattagagatgttaagatttctaaagtcatctacaactggccttaaaaattagatttgattttttaaatcttaaaatagtggttcagataagttatagatttgaaacaaaataataaatggaaaacagtgagcctcagtatgaattcctgcttctaaaactgctttgatggctcggcgcggtggctcacgcctgtaatcctagcactttgggaggcccaggcaggcggattgtctgagctcaggagtttgagaccagcctgggcaacacagtgaaaccctgtctctattaaaatgcaaaaaattagctgggtgtggtggcatgcacctgtagtcacagctactccggaggctgaggcaggagaatcgcttgaacccaggaggcggaggttgcagtgagccgagattgtgccgctgcactcactccagcctgggggacaaagggagattctgtctccaaaaaaaaaaaaaaaaaaaaaaccacaacgctttgatactttgatatcatgctgattggcatgttctctgaaacctataataatgtcagaagcgtgtattagaatgcagtagattcttatttttttgtttctttagagttgagattttacacataaatatgtaaattcatagaatcattttgttagatacataattctgcattgattattttaatctctgttactttggtggtttctattatagcatgcaaaattcttatgatgattttatatttttttctgtctttaaaatactctacggtctttaaaaaatgtttcacaactaagtttgttttctactttaatgactttctagctttcaaatttttataaatcctgtacatacaatgcctaagtcttaaaaaatgttattggtttactgatatacagattttcctctaacaaataatgtatagtaagaaaatgcaatttcttactgtggaaattagctgataaggacagggatctttaaaatcgaacacttgcaggcacgtatatgaaatcttgtaaaaatgtctgtttctgctttctacttaaacttatctgtctttttgtttcttttgcagcaaaaaatgctggatagaatttcttcccactgcaatttaaatgtattcttttttctgtcaattaccacaggtttagtccttatgagtggtataatccacacccttgcaaccctgactcagacgtggtggaaaacaattttaccttgctaaatagtttctggtttggagttggagctctcatgcagcaaggtatacgattcagcctgctatttcctttgggcaccatgtcccactctttgctgggggtgacagctcttgctggcacaagtcgcttgcatgggtgcctctgtgcatgtaaccataatccagcttttccatcgacctaatgcatttaggccttctcaaatcccattcaagagagattctgagaaaataattagcttttgcaaatccacatagagtatactcatctatttttttccttaacctacagtagatacattatttcatagataaccaagctaacctgatcattagccagaagctgcatttaaactactacaaagattacatctccttgagacaagaatacagtgttatgctcctgtttcttgtctcattttgatgtaaaatcttctctttcatattaattcttggtgattagatgcatttgtattgcatgattagtaaatttactgcctataaatttgaagagttaaaatattaaaacatgaactttttgagtaaaatattagctgcatttgatagcatataagaatataaaatattgcatgctcggaagtgcatgcaaaaatactttttcgtaattatttaaactttataatatacatgttaaaattaaggctatatcttagaaaatgagataatacatgtactaatacgtcttaatggtttatatgtaactatgaatctactattttagtctcagtttttttcaagcagaattttaatatttgatgctatggtttcttttattaatcttttcacatttaaataaagtttaacaaattgctatgctagacctattactcaaaataaaatattttattagtcaaggtctaagactagttttgccaatttaaaatgtaacattttaaagttttaaaattagtaaataaagcaaaaaaatcccaaatttgaaaaactgacagtaaaggaagaaaaaaaaacatatttcttcataagagttatcatacctatcataaggtttgattttaagtttttgttgtgtatttaatatccactttgaagaaattcatttagtgattgcattacagatctgaagaagtggaaatttatgttgttataaaatgttgtttctaaaaaaggcatcgtgctattgcatgtttaattttatgcagaaatgcattaattcattactgtttcatttataaactatttcctaaagtgaaaatacataactacatgtcaaaagaaaaagtttaatttaccaataaataatctttaatacatattgtaagcatggcctactaaattgaaatgtttattgtataattattaatatatatgtaaactatatttttatatatagtttatgaatatttaaacctaaaacttgaaaatccagaaaacttttacatgagctaacctaagtttgtggcatctctttctaaataactcaaatgaagaatcagtagttatatttttcctttcctacattttcttacattttgggtccaagggttttttttttttttttttttttttcccttaggcttactctacccttagaagacattattgtagttctttcaaaataacagaagtgaatgaaaaagcccgtcatatggcacaaggttattttataagtagtgttgagtaatacaagtcacccaggcaaaactgctagtcgtctgttaataattagtagtctggagggagttatcctcataataaacatctgaccatagcaagactttcgttttaaaagtttcatatctctttgacaaagaaaacattctttttttctacttatattttaaaaaaatatttggaggtctttgagaatttgtatgctcataggacaaacttgctattagtagtatttaggaattagaggtaaaactctatgttattatctctgaagataatgacaagcaattcaagcaatgaaaaattcaaatatacatttgcttcgccacataactacgtcactgctggtggatacatgaaagaggaacccatactattctggctgatgcccagcttcccaggaattagtgggatatagtgctggacatgacgttaccttgagtacatgacagtcagcccctaaccaggctctgattcacaagactaggaggtactcgctttaagtccttgggtaagatatgaacttgtggtaattgggccatttatgtcaaatgtctccactattcttttctttcccagtcttgtttgactttattggtgttgttgtttaaacaaaacaaaacaaaacacaaaaaaagcaaaataggcagccaatgctgctcatcatcttgggagtatttagtgtttcagtgtccgagtgtgtgtctgacagggcctaggagcaactacatcagaaaggtacttttctgtttttttttccttacagagctgtaggcagaatctggagctggagttggctgtcatgtccaagtttgtctgcttttaaaattttgtttgtttgtttgaaattgcaatggtaagatgaactgcagtataagatgggctgttttgatatagtgcagtcataataccacttatttttcaagcttcacatgaataatttgttttattttttattccatctaaagatgtgttaccttactgcatcagagattatactaaagatatgactgtaagtccgtctttgcttcattccattttactcaaacacaaataaaattaagtacttttagtctatgctttcttgatagattcaaaatgattaaaagtgaacagtaatatatgcatatctacaaatttagtataccttacttataaaaaaatcacacatactgatatatgtttatttaagcattaagaatataaacaatgtggtaagctgtaattaaaatttaaataacagaccaaattttaaattggtaggattttgttttatagtctaaatgaattaaaattaataatagtcaaaagtaaaatataattctcagatcccattcttttattaagatcatgagcaggcaactccagccgtacattctgatatagttataaaagatttatatatgtataaaaataaatgtgacaatttagctatatattcttattctaatttttttaattgatgctaaccatagtgatgggagatccttgcttatacaggagaacataatttattatcttattttaaaataaacattacactaaaaccccacatcatttcaagaaatgtgggcaatagtagttattttattattatacgtaacttttaaaaataacaagatagacaaaatgtttgagctacatgcacatgaaaagtgaaatttacaaaaagcttaagaaagggatccaaaagtatatttaagcacttcctctgaaaccctcataactaacaaaatatgaaaaaacaataaatgtggtttataaaccagaaagcctaaaaaatctcttctaatgctatttttattaaaaatgtttactcattaatattttaattggaactttgcatcatctcaggtagaacatgagtctcctgtcactatatttaaacaagaatgtcctaaaagattgtctattttctgaaaatagcctctgctttcccaatggttgttgcttgcttactaaagaaatatgtaaatctttgatttaagcttttattacacagtgattccattctgccactgtgacaaaaagtatctgattgctgatcaaattctctatattcgtttcacctttcccccactctctgttaggttctgagctcatgcccaaagcactgtccaccaggatagtgggaggcatttggtggtttttcacacttatcatcatttcttcgtatactgctaacttagccgcctttctgacagtggaacgcatggaatcccctattgactctgctgatgatttagctaaacaaaccaagatagaatatggagcagtagaggatggtgcaaccatgacttttttcaaggtaagttctgctggttacctaaaatttacaaattaaaatgatagagcgcaaacttctctcgattcacaaatgtaagagtgtaacaacgccattatttgtgcacaattcttaataatagcatatacctcaaggggtggagaggtgtacaactgaacgtatgctcatcaagaccaatcattttaatctctgaaaatgctaaggaggttttgctttacaatattttgttcctgttttgaggaaaatcagcccaagggtaacattttttcccagtaagcttttctttttgaataaaacaaaatgtattttttgaaactgtaatagtaggatgttcagattctacaaaactttgctattccagaagaatagaataattactcggaaaaatgtttcccatacgtacatttacttttgttgaaatgaggcaagatttaagggctgaaaatacagagacagtccttattatctatacgttcaccaaggtaatagtctgggagacacagagttgaaaggggctgtcccattgaactcacagtggtttccagagagacagccctgtggaacatttaaatgaaagtgtgcttgtaaaaagtttctgtcatatagagtgccttgccctcgtctattttttctctcttctccttactcttgcctactcactgggccaaagtagaccagttgagggatttcactttaggtagctattaccactttataattccttttgtatcttaccaagtatttttacagtttttgtaggttgggcaaattttaaaacattgatattttctttctgtgttcacagaaacacaactggcagttcaaatgtacagtggaaatagtatttttttttaaaaaaatgattaattcaagctataaaataaattatttcatgaagcattcatcaggtttctatcgagtgccagaagttacacgacacattgagtattctaattctcactatcgaggagattatggtttagttggagacagaataataaacttaaaacatcactgaatttggttttatgtgacttaagtcagtattttgtcaaattatgcaactttgtaaaaatttttataaaattaactttaaaataaatttctggaggacatccaattcccccaaaaataagataaattagatttagtcaaatatttaaaatttaattattttcaaagtgaatttctcatatgactagattaagtattggatatggatttcacatttacttggaaaatcactgttatttaatcaaatttattgaataatcaaatataagcaaaacaatacgttcagtatggtcctatttgactatattaattgcgatggatcagtttttcttaattgaatattgagaatttataagatttcctttcttatcaaacgtgttaatatttttgtgtttttataaagaaataagctgctaggccaggcacgttggctcgtgcctgtaatctcagcactctgggaggccaaggtgggtggatcacttgatcccaggaggttgagaccagcctccataacatggcaaaattctgtctctacaaacagcccaaaaattagtgtggtgtggtggcatgcacctgtattcccagctacttgggaggctgaggctggagaatcacttgagccggggaggcagaggttgtagtgagctaagatggcgacatagcactccagcttgggcaactggagtgcaatcctgtctcaaaaaaaaaaaataaaataaaataaaataaataagtcgctgaaattgctaaacgtgcgttgttagtgtcaacaacttgaaggaagtgaatgcgtgatgcatttaatttattccaatatccaagtgacttttgaattgaatttgtaaaatataataatacaacctattgtacctaacacaaaaatttgacaccagaagtgtttatttctggttcataaacatttccgttttaattttattttttccagaagactcaaatattttgttttaaagttcaaatatactagtagcaaagttcatttttgaaaaatcagttaccaaacatatgtattttttctttataaaatttttatttttaagcttattttcttaattctttgtcttttcattctttcgttctttttttaatagttcaattgctttctgctatgcaatttttgcctactttcacttttccttgctactgacttttcttcttactcttttttatctcttgtttttctctcaaacacgagtgcctctagcaccttgagaaagtcgacacgacacagctttctatttccaacagcacatatattatttctttagaattgtatttggaatgtacacaagtcacaataaaaaccacacagtgataattactaagttgacaactaccttatgttgctaatattatcacatgctgagttctattttcctactgaaactaggaaaagaaaattagaactcacaagactacattaaatgttgatatttttggtattttaatgtagccttaaaagattccaatttcaatttcatgttttcactttttaagtgtatagttattccagctatggtaagaaatttaaaaaaaattctagcagtctggaattcaaaaactacctactcattttgaaactgtacagtgaaccagagactattttgtagtgtatttacattttatacaattctttcatttttcatttaacagccacacatacaaacactctaggaagcatccctaagacattgacttctaaaggaatctctatcttgtttttactaatttagcaagaccttgctgttaactaattgttctggaatacttccttccagaaaattattataaaaaacgatacagttttgttactactagcaagaagagctggctccagatatctggtgttaaagggtgtaaatcctcagcattgcaaagacatagcagagttacatagctgttcttcaacatcgaataattccatttccaaagaccatgattgattttgttcactgagctcaaggtgctcaaagcatattatcttcaagaaaaattcttccttcttttttctatatccattacacaccacacagactctcctcagagataaatgtaaagccatgactggaaaaaataattcaaaataggagatagtggttctcacattattttcatgtaagcaatagaaaactgcatggtatcaccaatatgttcttaatcatatttagatagtaaaatggatgacagtccaagaattttattaagaaacattaaaggaggagtcaaaacctacttggaatctgggaatttagtgtactagaactgaagtttcacccccgggctaaccattatgcaacatgttaccaagcaacaggaacattcttttctccctgaagtataaaggctaggagaatggaagcctatacattataggatcaaaaatcactcagctatagcctgtaggtgttatggctttttttgagaatgcttgtatttttgaagtgagtcacatgttttacaaaatgataccgagtgcccttgtttctatgaaatccatgactcaagttttccagtttttagaaattatttgtctggatttggcctacctgaaatctctgactttattatgtgcactaatacatatgtccatctaaaagatatagtatcaaaggaagaaacatgtgctcttttgtatggtcattaaacaaaatgttggcacatattttaaaaatgtaagctccatccaaattgatgtattcctagtcctgtgttgcattctatacctttacatctctttctctaatgcccattatgctcttttttcatccccatccacctctaccaacctaattggttatattctctttattccttagattctaatctatacatcacttattccagggaaactctcctgacccttttcataccaaaatctacccagtctgggtacagtgctcctcttttacattctttgaagttttttttttttaaacttacattattgttaaattactaatccaagatatgttttcttggttcctgtatgtttccatactctactgcacagcaggagaatagggattgaatgaatctatatcattcatttttgtatctctagttcttggcactgaacttacatgtcttgagcttgtgttaattattaattgccaccagaatattgcttaacaaacagccaaaaacttagtgacatgtaacataaacctttatttatcttccaagtcagctgtccttctcacagaaacttgagagcccaagtttctacatttacagactcagttccttctacaccagggtgacagtgcttttaccagtacaatttcttcttaacctttaaatgtgtctaactgaatctacttatactgtaaaagccacacacgccgttcttttaaaggcatgcctctcttcagactgaatcgttgctactttgggctagaggatctttatccaaatgagaaaatctacaaggtattgccttgacttttttagaggttctaagaaagcatctaaggcatcacgcttaatttgattcttaattaagccttgtggccacgttgagaaaattttaagaactttcgctggcagaagattagaaatacgtttgttatccaaccatgcaagttttatcccctctacatcacctctaaattcagcttgcaaagtggtcagtacttttaaattttcttttcctctcctcctcttcctcctctttttccttctccatctccttgctgttgtactgattactcgtctatctctttcttgtcctaccttacatgtagctaaaactagccagctgatactttgaacattttgtcattttgtttggctatcttttggctaaatccaaaagattattagttcattttctatctttcaagtcactacaactacaacgtgtaattaaaaataatattttcccctgtattcatggattcctattttcccagcctccccaaatgatgatttgattattatctgctatgtgtgccctaaatcaatgccacagcttttctttattgcagcaccttgttacttttgtcaaattccacacagttatccattggcacaatgaattttacatttactgatggaaaacatatgacagaggctttcaggtataacgtgattatgtgcaaaattttattattctacagggcagtcaaaggtttattcaaaacatagagccctctatagctttcctattttaattatctgttaaaagtcattgattttgaagtgtaggtaatgaagttaggaatgaaaagcaagtgggttattccatcctaggtagaacgttttaatttttggtactgagcaaaagaggatttttcttgggagatttttctctttctttcttgttttctctgtctctctctccctttctttttttttcctttaacttttacagccttcctctgcaaagtacattctaaattccagctcatttatcttcagacaacttctaaggaaggtaggaagcaattatcattatgctcatttaacagatgaggaaactgggccacaaagaggttaagtgacttattaattataacggctataaccaaggaatgcatagtatcacaataaaggtaataaccaaagatatcgtcacataaaccatcgttactcaaaagagctaagtgtattgatcattttggctcacccacatgacctcaactgcttgattatattaagtttctaaaacatttgccttacagcattggggcagatacagctataacatgttctttatagtctgccacttattctgatcttaccagctcaatagtcttctaaaattaagttatgctggggtgattgtatatgatagtatatggtggggtgatagtatatgttttgaagtctgaattgctagtgtggcatgcctgcaataatttttttgagagcttgagtgattttgctttcagtatactacaagaatgtaagtaacttttccattgagagataaaatgtaaaaagttggtagtttactgcaagtccttattagatctaaaaacatatactattcattagagattgctcctaattttgtaaatataggcaaaacagaattgttgtccgtttttatttagagcaatggtggtaatataagtataatatatttactgtgaagagatttactcattagcagagtaaattctcaaaattgcaacgatagtgtgcttttcacattgaaaaatgtcttctgaaatgaatgtttattttcctcttgctatattggtggtaaaatattttgaaagttccactttgcatatgcagaaaattaacctaaaaataatatttaaagatgagaaatattatctagaacttttttgaattttagatatgtttggttttagagcttattctttaaatgtttttcatattttatatagcaagatttctagttaagtgtagttgtctgtaggaaaaggtttaataattatttgtcagcacatggttagaaatcaggttatgtcttttagtttgcacatgtttactattacgcggattctaataattttccaccactatccagaaggaatgcttttacaatatgacaattagaaattctttatggtacttcagtaagtatagggaggatgtgtaaatagctactcacttgagttggcttgtttatttaggtgctattaactagccacatagctttttctcatgtcatttttatttattttgagttgaatagggagtcttttcccttttgagcacttgtgtttctcagagatgtattttattttgtatgtctaagtgaaaattgagaaaatacatgttctcagggacctgaggaatgaacattcatcttttctttgtaaacctttatcgtaggtttttctatcatggggattgaaagcataaaggtccatatttgagacttgggagaattgtacatgagactttgtgtttacctaatggagactgaattaagaagagatgacttttaagtgatattaaggacatggtattaattggcctactctatagatttatattgaattgggttctgagcaagagctttgagatttgtgttcatgtagttttcttgcctgagcttattttactaccctataatatttagtgaactacttctgctcctttccttgttgtgaaaaaaagcgctattttaactggcaaaagtaaattagtacacaattctaatttacatattgctttgtgttacttgagaacccctcaatattcctttgcagatctaaactaaaacaaaatgttcctcaaacatgacatactgttctgacttggaagatgaaatacctaatatacttaggcttctaagccaaaaactattcttgccaacttgctcacaaattactgattaggaaatagctatggctgtttaggacacatagaaactttatttttaattttttgtttgtctcacatattgaagtttatagataatcttttttttttctttgtgctttaatgagttaaacaaaacataaaagcttgatgtggttgatcaccaatgtatctgggcagtaaggttaggttaatggttaatattgttaatgaaatttttgtttgttcatgttgctgtgttcttcattgtccatcagacatttttttctagaagtctggaagaaatatcgcagtaaagatttttatagtcatataattttcctaacgctcccaaattatttttcctttattaatggtgttgaaatatcgaatgtgggaaattcactaatgttaacattagattacgtggtagtattttgttcaataaaataaggttggtattttaaagtgtcattatatttttattagtgtctaatacagttttaatataaattggtcatgtttgatataaatatttaaaacatgactatttattatgtctttgatttatttgtgtagtaaggaagttatttttactcccagaggttgtctccctccccctttcctcatctaacacacaatttattgtacgtgaggcctgatcctatgtttattacagggatttgcataaggactacaggaaaccaacaccattttactatgttcccattgcaagaaataaaatggtgcctttgagtaaagctgcttcatcagacactagttcagcatgccaagttaaagccatcaatggtgaaacagcagatgtgaaggctagttggcatgaaagcatatgagtcaaagactttcctatgggaaagaaagtgcttcattacactttatctatagtgagaacattgggtttatcaagctgtctgaaaattagaatatgatgagttttattactcttgctctgccagagtgaattcaatggttaaaaagaaagcaataacaccattttaggaattataagaagtgattaggtttttagcgtatttaaacttggaaggagcagcaacttttatcttcgaaagtagcctctctaaaatatctaagggacagaagtttaatccttttctaattgctacatttgcaatatgtattaacgcagctttgggcgctttaactgaataaagaagttgtatgcttgactgaagtgtaaaatctgagaaacaatgttttaattgccttggaaaacatgtgcatgaggccctgccactccagcatacactagtatgctatggttctctccctcccttgtcctccctcctttactctgtgcaaggaccattcctgctgtttgtcaagtcaggttggcagctcaaacactgtgtcccaactcatcagtcttaggagagagggccccacagggagtgagaaaactcaaaagtcagttaatacagtgatgttgagctaacatgtcaagtgctggataatggataatagttgtcactgcaagagttcatagccactggttaggcaacattctgaaggaaattcaagaaggacatattttggatgcaaaaaataggctgagataaatattatccaaaaataccttgacattctaaaaattttagtgctttatatcttacataaaaaaactaaaatgacaaattccatttcttctatataaattgctgaatagaagcatcatttggtatttttaaaacaaacatacaaacaaaaaaacccagactctactttgttaatgttttgaggaaattatacttattgacattgtggctatgaaatatctattgatcgttttgggggtggggggtgttgctgctctgacttttgagtatcagcaaagacatattgttctcatttcttagatagcccattaattacaaggtgaatatcctgaaatttgtacttaatttaaaatatccttggcagtttaatggtcttgattttccacattattatgctgtcttttcagggagaagctattcttttgttgcaaaggcattttagactaattagcatctttggtcagctgaattttcatttgttcatttgttttcctgtctctttccaaaagccacattattctaaaaacagtaatatcactttgttgtttgttattaagagctgattgaagataccacatactagttaagttttttttttctttctttatgaagcaaaaggagatttactattatttgctgctactgccatcttcaatattagactcttatttaaagataatactgtactatttttccccttgggagcaagcaagatgtcaagtgatgcacccttctgatgctcaataatcttaccactttatcatgcatatttgcaaggatgaagcacagtttataaatcatctctgtttattttacattcttccccttaactccagatagatcaggaaaaggacaaaataaattttggtgcttgttcataagtgttgataactgcaaactgaatataataaattcctcaaaaatactgctttaagaaattaaacttggtcaaacattgatggtaaatgtcttattcttaaagagatcttattctgaaacaacttgaatctttgtttttatgctgtgatattagtggctgtggcagtgcctagaattgtttaattgcctaatgcacaaaggtgagcactttgattgatgtgtattcagagaagtactttaataattttataaataaagaactctccagatgactgaatgtgtctgtgtgtgtatgtacatgaagagtgtgttctgtaagaataaggtatgctttcttaatttgagttaaattatggatggttatataattcatttttctatacccagtttccatcttaaatctatttagagaaagaatagttcagggttggcgataaaatgtacttttacatttcctgatagtatttgaattatgcttctgattgtcattagcctattgtatacaccatagcacaagtgagttcagtgaaaagatttgattatctctaaaggtaggtgtttcatttattaagtattgtaattacagctaattagaagctacacattatattagtttgctttgtaggtcccttgactgttttcagaacactatgagcttatggttcatttcaatttattacaaaaacaatttaataaaagccaaagaattgggaaacagcattactaatggatataatttattgttgagtcaatataatagtttaacataattattaaaggcatagaccaagttgtggcgtgaaatcctacattcctcaatcaatacagatttatttaatttctctgggtttctgcttttttgaatttatctcccatagataaatcgagagtatatgtcttatatattgttcgtattaccactgaacatgtactaaattcccaatatatatttgctattatccttattgtgaggagcttaaatgttgaattgttaaatttcggtagcagatgaaaccatttcccccaatatgaataccgtacttttgcaaatacaggttacctatggttaatgctacaatctgacactcagttgcattctcatttcattaataatttggtcctgattttagattattaataaacaaatattctggattactctctaatctcactgaaaagataaagtacatcaggaatctgtttccatgtacacattacagatagtcaatcttttaaaacggattttattattttagtgcagttccatggtcacagcaaaatcaacatcgtgggactttaaatatatcaattcacattcttcaagagtttttgtcagccttctctttcaaaaccagaaaataaaaacccagcctgactccaacaaatagatataactaaactgagggacttaggattccatattgtcagaatgaaaagtggtgacaacccaagatggttatgactgagtgaaatgaattttattaaacacgaccttttttatgatctacctggaaaattttaacaattagggaggtgtttcagaaaggatgcccccaatttggtggtgatagttatgatgagagttgtgttgaaggaagtgttgattgtgacagaagcccccttggaaatttagaaacaaatgtatgtttgtgagaaaaaaaataattaactttcagataaacagcaaaagttcttcacaagaagccaaatatactagtattagcaaaaggataacacttccaaatttagaaatatgtctgcctttgaagctggctgagaactaatttttgtgcaggcaggattcttgagatcactgtttgtggcttttgttttaatgaagcagcttatgagtagcatcaagtcttccaggctttactttcaggactgctgtttccctgggggcctaacaattgcaagtggccctttcattgatttttattaccaatgccagagtgtacataatcattttagtcaaactcttacagctgaaacaagtaaatctattgcattttgaaaataaaaatagtggctaacctgttcccatctttatttattattattattttttctgcattgttagtaaccatgtaatagctgtcacgtctacctttctcactcatctttattctgggtgatgtttctttcctaatctcaggcctaatgtgttgcccctgctgtgtcctggaaatgaggttgcagtgatttacttttactagccattagagaaacactttagtattttgtcttatttcccttctttgaattccacaaacttcgaaagtatcaaaagtagtagtgtactctaaaactcttccaagaaattttactatgtaaggctaaggaataaactagatttttattttcttatggcttctaataaaacatgtgtggttatagagcacatgtaatacatctagtgcactgaggagtaaaatatgaaatttcaattatttaatttttattaaattgaaattttaaaaccaaagcagtgcaagacatttttgcaataaacttaaacatatatttcattttaacctttgcctcatataagatgttgtattatagagcatgtgatttgtgcatgagttgtttccaacacatcagtgatgtactcagtggcaatgatttgattcagtttaaatgatttcttctatgtactactgtaacattgtaatgtgtttatttgaatattttatgtaggtgaaataaattacaattataactatctaaaccatatgattattaaattgaaatgcatactattattttaatcaaaatataattaaattatttttctagtttaaaaatacatatgggcaaatttctaatttaaaatgaagttacactattaagaagaattaaatgaaaatgtagaaactggtactacaactggaagagtaaagaataagagagtctggataaggatatgttaactggtttcacaatgaatgaacattgcaatttgctgcaacaaagcaaaatggaaaagttgtttgtcacatatatatttttaagatattaaactggtcattatcaacatacattctcagaaaatacaaactgaatttgatatgcaattttttttttcttaatagtaaaaaaaagaaacaaggaagttaaccaaagttagagtcaaatgttcaatacatttaaaaatatgttttgacagagtctgaagttacacttttggactgttatacaatggcttggatttttaaacaaagagaccatttttggatggaaagatggtaacatatgttatttcaattatgattagtttgttacaaagttgtaaaaatgagattaaaagaaatattgtaaataagcaaaagatctttaattaatcaactaaaaaattgcccatagtttacaatagctttctaacaataggaaaaatcagttgatcctaatttttaaaaatggcaaaccagtgccttttttaagattagaatgaagtatacaatatgagaaactgtccaattaatactttgggtacattttttcctcaaatgactcccagatttaggagaaaaatttcaatttttgaaataaataaagaactagtggcataggttttttttgtatctcttacagctattaaatattaatttcagctagaaatagaaaatttagtttattacaagatggtcacgatgatggatgctctagctatgttaggttaaaaaaaaacacagatttattataattttaaaacaaaagactgatgtttttccttgatgtgatttggctctgtttccccacacaaatctcatgtcaaattgtaatccccatgtgttgaaagagcggcctgatgggagatgactgaatcatgggggcattttctaatcgtttagcatcatctccattttcaagtagttctttatagcactgtgaaacagactaatatagaaattggtaccaggagagtaggggactgctctaaagatacctgaacatgtggaagcaactttggaactaggtaacgggaagagatttgaacaattctgagggctcagaagaagacaggaatatgtgggaaagttaggaacttcctagagacttgttgaatggttttgaccaaaatgctgatagtgatatggacagtgaagtccaggctgaggtcgtctgagacggagatgatgaacttattgggaactggagtacaggtcactcttgtaatgctttagaaaagagactggtggcattgtgctcttgctctagggatctgtggaactttgagcttgatagagatgatttaggatatttggtggaagaaatttcaaagcagcaaagtattcatgatgtggcctggcttctactaacagcatacagtcatacatgttcacaaagagatggtctgaaattagaacttatgtttgaaagggaagcaaagcataaaagtttggataatttttagcttgaacatgtggtagaaaagaaaaattcattttctgaggaggaatttaagcaactggctgcagaaatttgcataaatgaagaagagtagaatgttaatagccaagataataaggaaaatgtctccaaggcatttcagagatctttgtagcagctcctcccttcgcaggcctagaggcctaggaggggaaaaaaatggattcatgggccaggtccagagctctgcagctctgtgcagcctcaggacatggcaccctgagtagcagccactccagctccagccatggctctaaggatccaaggtacagctcaggccattgtttcagagagtgcaagccccaaaccttggcagcttccatgtggtgttgggcctgtgggtgcacagaaggcaagaatgaggtttggaatcttcacctagattttagaggacgtatggaaacacctggctgtccaggcagaaatttgctgcaggggtgaagccctcatggaaaacctgcagtaggtgtggaggggaaatgtggggttggagcccccacacagagtctccactggggcactgcctaatggaaatgtgagagaagggccactgtcctccagactctagaatagcagatccaccaacagtttgtatcttgcacctggaaaagccacagacactcaacactagcccgtgaaagcagctgcagaggctgtaccctaaagagccacagaagcaaagctgcccaggccttgggagcccacctcttgcatcagcataccctgtatgtgagacatggagtcaaagaaggttattttggaactttaagatttaatgactgccctactggattttggaattccatggggcctgtagccccttagtcttgaccagtttttccctgttgcaatgggagcatttacccaatgcctagatcttcactgtatcttggaagtaactaacttgtttttgattttacaggctcataggcaaaagatacttatcttgtctcagatgaaacttggattggacttttgggttaatgctggacactgttggaaaagcatgattgcgttttgaaatgtgagaaggacatgcaatttgggaggggaaagggtggaatgattggtttggctctgtgtccctacccaaatctcatgtagagttgtaattcccatgttttgaaggaggggcctggcaggaggtgattggctcatgagggcggtttttaatggtttagcaccgtcctcccaatgctgtctcataagtgagttctcatgagatctgataattttaaagtgtgtggcacctaccccttctctctctcctgctaccatgtaaggcatgtcttgcttccccttcaccttccatcatgatcatatgtttcctgagctctccctagccatgtagaactttgactcaattaaacctcttttctttacaaattactcatttttaggtagttctttatagaagtgtgaaaatgaactaataaatccttttagctttactatatgacactgaaattatttgtgttcagttttctgaagcagactctgtgacaagtgtcatagacacagttgttaatattatttagtgtatatgtgtaagtgctatgactcattgccagtttgtagaactattgaaagaaatagaagataacaaatgttaatggttttgtaattttttgccaaattgctctttggttgagtcaaagaatacaaagatttactgtattgtctattcctactcaaagatgcatgaaattaaattatttctagatattcaataatcaaagataaaaataatagtttgttttatgttttttgtgctaatatcacactgaacaaaagcaaactaaattgaatttcaaaagaaaaaaatattttttatctagaaagctgtaataattcattataataggaaattatcataataaaggtcaataaaagtgatttttcacatttttttaaagagtcaatatacagattttagttgctgtcagcagtattatagcaaacttgtagtctcaaaaactacatgtaaaatttaaaaactttgttttgagattgataaatttagagattttcagtttatacaattttcctttgacttcagtgttaataattcttagttgatgtaagcattagtaaattacttcacttggaaagataaacagacataacttttgaacaagaatatgtgctttgaagccaaattaattcttaaaaagttaagaaagatgaacaagttttaccaacatgttgtgtatattacaggaaaattgcttttagtacttagttcaattattggaaatttgtttgaaacaacttgggtatatggaactagtattttaactgatttttttttagctttttaggtttatgcaatcaatacaacttaagcgtcttaaatgaaaatttagtgtctgaattgagatatgttttcagtgtaaaatttacgttggatttcaaaactaaaataatgtgaaacatctctctaataatttttatattgagaatgtctcatagtcacttaaaatccagtaaattcaaaatggagtctttatttgttcccagtttcatcattccatgattattctccattctaacagagggcaatgccatcaatgctgttgctcacctctcatatctaacccatgagcatgtacttttggttgtaccttcaaaatacattgcatctaaaagctattcacagctctccatatctatcgccaacaccttaatctaagtaatcagtaagccatttagtaagctcaacaccttaatttaatcagtaagccatttagtaagcttataagtttactactattttgtctgcatcatcagttgttccatttcaatcactttcctaagagtatttaaagggatcacaaacaaacaaataaatcaacataactcctctgtaaagtgagttttctctttactttttacttataacacatgttccttccatgataacattctaaattcattgttttcatttatgttattcttcttgtgactagaatgtgaatttcatgaggtcaaagacttagtaactagagcattctggtagataatagattctctatctactgtttttttttttttttcatttttatgagatagcaaattaatccttgtaagtaaattaatcaatataagattattaatcataatctttaatcatgtttatgatatagtaaattaatcaatataagtaaaataagccaggataaaccattttacataccctaattgttacaaaatataacatatacacagaataattttccaaaacataatttgtataacattaggtgttttgagattagtaaagttagtatgttaagaaaaatttagaaagtgaagaaaatggaaataagacaataattattaatgagaacacaaacatgcacacatatcttctgatatatataatatgtatgtgtgtgcatacacacacatacctatatctgtaatgaaattggggcaatgctataaacataacttcagaagattttctaagcctgggcaacaacccccatctttacaaaaaataaaaacattagccagggtgtggtggcacatgactgtagttccaactacacaggaggctgaggtgggaggatcatttaagcctgggaggttaaggttgcagtgagtcgtattcacctcattgcacttagtcttggattgctgttgaaaaaaaaaataagaaaagaaacattttgatttttaattagctattatgaataatgcttatttgtaaatacgtaacaaactatctaatcattgaattaaaggaatatgacagtgtcttcatcgaagccatgactgcaccagaacaagttaacacaggcaaggcgattattgtagtaaagaggagatgccaggattcagtctgaactcaattctactgctcaaaggactggagggtgtttaaaagttggagagggggatggaggcagagtggtattgtaaaccatttatttttgctagttggtcctacccaatggaaaacaaactttttgatatcttcatgacaggagatagttctacaacttggagcaaggtacccactgaagttaaatttctaccctcccacagagaatgttacacagggacactagcttcctagatgattacagttcaaaaagggctcctaggaccttgagcaaaacgttgctaccttgtaatattagcaagaaacttttaaaaagatttacattccaaaagagtcaaagaaataatttacgattataatttttcaaaggtgtgctctgagaaaagagaggtcaggggcttagagtccagaagaagcatgcctaaagtttaatcaagctgaaatgaatgaaattgtcttgatcacttgatacaacaccctttagagacattgaagtaatttttaatactaacaatatgtaactgggtgattcttcttcctattctcatttttagtgtgaattatagagtattgagaatttttaatgagggaaatattatcattattttattttgaattgttttgatcataacaggaattaaacattttaaaatgtttataacaaagaaactttaatcttacagacttaaatgttggaatatcattattttaatttggtttaaaaaattgtatgcagtctgcattccactaagtttcttaacctataaaacaagtattttttaaggagcattataagtacagagattcatgctaatggcattcagctcattaataattatgttgtagtaaagctgagaaaatgtgatataagagaaacacttgcttatttaaatatgtcagttttatttccttctgtttgctttgttaaaacatgcatataattttggataaaaatgtgttggatactgaaagcctgcctcttattataacaaaggcattaattagacatgagaggtccgcaccatgatcccaaatgttatatttcaatacacatgttcagaaagtaatctttcagacattagtaggtgtgttaaatgactataatcctgagcacctacatcgacactttatcctttgatatttgtcagacatgcttaaccccaactaggagaatgttgtttttattaataattatttcaggtaatacctgattaggtctaatgagtgcttggcagtcttcatattggaatgaagtctgtgtgaacgtttaccaaaatgtagaaaccttggaatatttgacaaatgtttatttttaaaaaatggcctctaatctcagtttgaatttacacttattttatttttcagtttatttgtttggaaaatattcctattacctttaaattgactttttagagaagttttacaaatacattatttttaaatacaagaacaaacaggaaaacggagttaagttttatatggcagtggtgatagaatggttgggtaggagcatgaatactgagtaattatatttattatgtccttattcctgtgtcttcaaaacagaaaatgatttgaagaatcttagaactgtctttttttttttaaagtctcttccgtttacccagtaagtgacataagccacaagttactattttttacatctaaatcagagccagtgttaaccatcagtgccattttaacgtgtgatcagttccttaactaatatatatatatatacacacatatatagttatagttatatatagttatacataatatagttatatataaatatatttatagttatatataatatagttttatatagttatatatatacacatacacacatatatatgatacaatatatatgcaagcagatttttcagacccagaataaaatgttaaaaggtttttttattgttttaattaaatagagacagggtcccactacgttgcccagactagtcctgaactcttaggctaaagtgatcctgctgcctcagcctcccaaagcgttgggattacagggatgagccactgtgcctggcctaaaaagggttttaaagcaaaacaagaaaacaatcaaatttcatttatttattaaagaaagtaaataaacagatatcaaattgccaatatgaggcaaactcagggcaaatttaatttgcacctgggcacatttacagaattttgacatggcagttacttgactattcatcaaatgtgtaatttcctccagtcgtagcacacccactgtttaaatttgtgttctgaaaatataaacccaccacttaaaataattgcttattttattaattcaaatatacacacccattgattcataaattatcaacagtttaactttatgataaaaataatgtatatgttctatcttgtctcatcatttcttctggctatccatgatggaaagggagaataagagagcttttgttgttgttgttgtgtttttgcgattttttttttttgtgggtaccaacacttttcttttgcctccataggatttttaaatgcagccttataaccatgttaaatgcctagatttgattataatagaaatttatcaaattcttttaatttacacactcaggtttcttgtcaggtctaggaactcctctttgattatcttttttttgttatccttttaagttctggaatacatgtgcagaatgtgcatgtttgttacatagatatacacagtggtgtgctgcacccatccaaccgtcatctacattaagtatttctcctaatgctatccttcccctagtcccccatccccaaccggccccagtgtgtgatgttccctgccctgtgtccatgcgttctcattgttcaactcccacttataagtgagaatgtgtggtgtttggttttctgttcctgtgtttgctgagaatgatgctttctatcttcatccatgtccctgcaaaggacataaactcatccttttttatggctgcatagtatttcatggtgtatatgtgccacattttctttatccagtctatcattgatgggcatttgggttggttccaagtctttgctattgtgaatagtgctgcaataaacatgagtgtacatgtgtctttataagtgtagaattatttataatcctttgggtatatacctagtaatgggattgctgggccaaatggtatttctggttctagatgcttgaggaatcaccacactgtcttcatctttttgaaaatattatatgtctcaatcatgctgatttcatgttcaggaacagaacagaaatgagaaaatgagaaatgagtgagatctgacattggttttatgacctctatttattaaataactttctcattttttatttctcattttaatctcctgattttaagaaaatcagcctgttttgtaagttttttctacctgtttcaaaaagtcttataggcttgtatcacattgggactacaaaatgtgtttccattttgttgttgttgctggtaataaatcattttctaaaatctcttctccctctaagttatcaagataatactccttttcttgttttttggaccaatttttatagctttatgtttatctcaatctttggtgagaggaatttgattgggatttgtggttgaccagaggtcacttgaataaacctctctctctactaaaacttgaaagcaggcctacatgcaaactttgtagtccagttatcaatctcaggatccaaaattgttgttttgtgttttaacatggctctttgggcctgagatagaatggactcttaccctcaggaccttaaatctgatactctgaatgatgaagcagccccctttttagggcttctcttatcttccccacattttcatgacaaatgaagactattcccacctgcctctggaataggacagtcttccctgcccactacttgcttagttatttcctatcagttgtagcctctatttttttgtttttcatttttttctttatgtttttttattttgtctttattttttgtagcctctaaattagcacagaatacaagtactaacagtagtgggagccaggaaacacattccactggattcaaaattaatatctacaaaggtgaaggataactgctaagtgtactggatcagggagaacttataggtggcatagtgtagacaaagaaacaatggtatgcctaacacctttcaacatggtagtagcatttgacttcaagcaagggcgggccatagattttatttttaataaagtttaagcgtcattgtagttaaggacatttatttcagacttcagcaagaagttgtgtgtcagttccaatgttctgttgtgaatcgtcatttgttgtgtcttaccatattaatatattttactgtgatgttagtagagaaatcattgagtgcagtcatccaaacaccttttaaaactggaaatacataatctttaatgctttaaaatgtatttgcatatatgtgaaagtatcatctaaactgcaatcattataacccatgaagtgtgaagaaatcctgtattttctattttctttaacatgatggataaaaggtatttaagagagttgagaaactaacctttagtcctgtgtcaaatctgatagaattcatctttcaactatctgttaccactttctagacactgccaatagtaaaatcaattgttgaagtaaatggaatggcttttggtataatgcacaaatgggtttaaattgaggattcagtatatgcgtgttttgtttaaatatttttgctttaggtgtaggttcatatgcagctgtaagaaataatacagagacattccatgtagactgatatggtttagctgtgttcccatccaaatctcatcttgaattgtagctctcataatccccacgtgtcatgggagggaaccagtggcccagtggcaagtaattgaatcatgtgggcagatttttcccatgctgttctggtgatagtgaataagtctcatgagatctgatgattttataaagagtagttcccctgcacatactttcttgcctgctgccatgttagacatgttttgctcttcttttgtcttccaccatgattgtgaagcctccccagccaagtggaactatgagtccattaaacctctttttctttacacccagtctggggtatttcttcatagcagcatgagaagtaactaatacatagcctttaagagtcccacaatgtaatatcatgaaaagcaataggacattatcacaacgatgttggcattgttagagaaaagacaggtaacatttccgtcatcacaaacacatcatgttttccttcaacagtcataaccttttttctcccacatccccttcgttagctcttgacagtgcctaatctgttctccatttcagcaattttgtcacttcaagaatgttacataaatggaatcatcctctatgacggaaccatccagtatgtaaccttttggtattagctttttccacttagcttaattctctggaggttcatccaggttgttatgagaatcaatagtctgttcctttttactgctgagtaaccttcaatggtatggttttaccacagtttatttaagcatttactggttgaagtacaactgggttgttttggggttttggctattttgagcaaagctgctatgaatatccatgtacaggttttgtgtgaacattagcttttctttccatgtgaccaaagcccaagtgtgcaattgcagagttgaattatagttccaagttttgttcagttttttttttaaataaaagctctattaagatgtaatttatataccatgtaattcacctgtttaaagtaaaaagttcaagaatttttagtatattcagaactgcataatcaccacaatattttttttttttttgaggcggagtctcgctccatctctcaggctggagtgcagtggcacgatcttggctcactgcaagctccgcctcctgggttcacgccattctcctgcctcagcatcctgagtagctgggaccacaggtgcccgccaccacacccagctaattttttgtatttttagtagagacggggtttcaccgtgttagccaggatggtctggatctcctgacttcttgatctgcccatctcggcctcccaaagtgtcaccacaataatttttaaaactttttcaacattttgaaaataaaccatgtactcattaacaatcattccccatttacttaaaatgtccactctccaccatacctaataaaccactaatctgcttctgactataaaacttcttagtctgaatatttaatgtaaacagtgatatagaataaatgctctttggctttaactgaactttcatctgtgtttcagtgtgtatcaaaattttattcttctttttgcagaataatattgtactacattgatataacaaattttatttatctgtttatcagaggatggacatttgaattgcttccactttttggatattataaataatactgctataaatattaatgtatgagttttggggtagatgtatattttaatttttcttgggtctataagcagaattcatgggtcaagtggtaaatatatgtttaaccatttgaggaaaatcaaactactttctaaatggctgcacaattttacattgcctttagcagtgtacaagggctccagtttcttcacatcctcaccaacacttactattttctgtttttatgattatagccatcctagtgtgagaaagtgctatctcctcatggctttgatttgtacttccctgatagctaatgtggttgagcatcttttatgtgcttattcaccatttgtatatctttggagaaatgtttattcagatcctttgctcatttttaaattaggttgtctttttatcattgaattgtaagagtatttttacattttatagatagaaatccctcatcagaaatatgatttgcaaaagttatttttccattcttgggttatcattttactttgttcatcgtgtcctttgatatacaaaagcttttactattaatgacatttattataattatttattgtttggatccttgcttttgatgttatatcaaaggagacttttcccaacccaaggtcctaaagagttactactatatttttttctaagagttttatagttttaacttttatatttagttctacaattcactttgatttaatttttgtgtatgatgtgaaggacaaacacaattccatccctttgtatgtagatatcaaagtgtcccaacacagtgtgttgaagactattctttccctctttgaattgttttggtactctagtaaaacaagaaatgaccataatgtaagggtttatttctgaacctttaattcttttcaattaatctgtatgtctatccatatctacataccacatggtcttgcttactgtagtttggaaattaggaagatcatcagtttccttttttatttcaagattgttttgactatgtcaggttccctgcatctataagaattttgggataactgacaaatttctgcaaaaagccacatgaggtattaattttatgtttatttgggaagtattgttatcttaacaatattaagtcttttgatccatgcacttgagatgtttttcaaattatttaggtcttctttaatttctttcaatgtgttttcacttttattattagatcttgcacttctttaaagaatagatccctctgtattgtattctcttcaatactattataaatataacaatttttataatttcattttctgatagttcaattttatatatagaaatataagtgatttttgtatagtgattttacatactgcagtgggttagaactcttctattaattctcaaagtgttagtagatatatctggatttcctatatacaagatcctgtcaactacaaagagagatagtttaaggttttctttccaatctggatgcctttgtgttttttttcttgcctttatggcctggcaatatgagaattacagtataatgttgaatgtaaatgagaaaggtgtacactgttatcttgctcctaatatcgggggaaaacatttttccttacaccattattacattaggtgtggatttttcacagatgccttaaacaatgttgaaggcattcccttccttcattgattgagtgcttttcaatcactccagaggtactgaatttgtcaatgcttttcctgagtttactgagatggtcctctgatttttcctttattttactgataaaatatattatatttatttgtttgtgcactttaaaacaacctcacattatttaattaaatcccacttggtcttggtgtataattatttttctgtgatgctggagtcagtgtgctggtattttgttgatacattttgcatctatattcataagatatattgatatgtagtttgtttttcttgtgatttttttggggggttttgatatcaggttgacactggcctcatggagtgagttggaaagtgtccctgcctcttttgctttttggaataatttatgaagaaatggtattaattttgctttaaatgtttgacggatttcaccagtaaagccgtttggtcctaagcttttatctccaggaagtgttaacaattatatatccagcctgggcacagtggctcatgtctgtaatcctaacactttgggaggccaaagcaggaagtttgcttgaatccaggagttcaaagctaccataggcaacaaagtgaggtgagttcccatatctaaaagagaaacaaaaaaaagcagacaggcatggtggaatgctcccacacacccagagtcccagcctgagcaacagagcaaggccttctctctctctctctctctctctctctctctctctctctcccccccatttcttttacagtcagatttggtagtttgtgttttttaaggaatttatccatttcatctatattgtctaatttgtggccacacagctatacatattattcccttttaatcctttttttttctgttagattgtaggcaatcatctcactttcatttctgatattgataattttgttattcttgctaaaagtttgtaagtattgttgatcttttcaaagacttggctttgtgtttctttgattctctctctttttcaagttgttgcttcattagttttcattctagtttttattattttcttccttctgctttattcgagtgtactttgctcttctttttccactgctttatgttgaaggttaggtcattgatatgaggtcatttttctttttaaatataatcatttacatttataaatttctctctaagcactgctttaacttcatcctacaagttttattatgtcacgtatttttattcagctaataatatgtccttatgtcagtgtgatgtgttcttttatctttaaattactaacgcattttaaatttccataaatctatttctttctgttattaattctttgtttttaccctttggcctaagcaaaaaacttatgactaagtcctcatttctatcagaattttgggataactgaccaatttctgcaaaaagccacatgagatattaattttatatctatttggagaatattgttaccttaacaatattatgtcttttgatccacgaacttgagatttttaaatttatttttaaagatttcaggggtacaagtgcagttttgtttcatggatatattgcgtagtggtgaagtcttggttttaatgtgctcatcgccccaatagtgaacattgtacacaataggtaattttcaatcctcactcccttcccaacctcctaccttttcatagctccggtgtctattattaccctgtctatgtccatgtgtacccattgttaattcctacttttaaatgagaatatgaggtatttgactttctgtttctgaattatttcacttaagatactgatctcctgctttatctatgttgttgcaaaagacatgatttcattcttttttatggctaagtagtattacatggggtgtatgtgtgtgtatatatgtgtgtatatatatataaaattttcttatatatatcaataaaaattatacatatctataagaattttatatataagaattatagatatatacatatatatatataattttctttatcgaatcatcagttgatggacacttaggtttattccacaactttactatggtgaatagtgctgtgacaaacatgtaagttcaggtgtctttttgatatagtgaattcttttcctttgggtatatacccagtagtgtgactgttggattaaataactgttctatttttagttctttgagtaacctctatactgttttccacagaagttatgctaatttgcattcccaccaacagtgtataagcattcacttttttctaaatgtgctacaacatgtgttaatatttgaggttttaataatagccattctgtctggtgtacgatggtatttcactgtggttttaatttgcatttctctgataatttgtgccgttgaacatttttgtcatgtttttttggctgcttgtatgtcttattctgaaaaatctcttcaaatctttcacccactttttaatgggcttgtttttgtcttatagagttgtttgagttctttgtaaattctggatattagccctatgtcacacacatagttttcaaacattttcttccattctgtaggttattagtcttttgattgtgattttcttatttatttatttttattatttatttatttatttattttttactgtgcagacactttctagtttaagtcccttttgtctgtttttgttttagttgtgtttgcttttgaggacttagttataattttttgttgtttgttttggccaatgtccagaagacattttcaaaggttcccttcaggaatttttatagtttcagatcttacattcaggaatttaattcatcttgagttaatttgtatatggtgagagatatggatctagtttcattcctctatgtatggcaatccagttttcccagcaccatttattgaataggatgtcttttctccagtgtatacttttgtcaattttgttgaagatcagttggttgtaggtatgtggctttattgatgtattctatattacattccagtgatctatgtgtctctatttataccagcaccatgctgttttagttactgtaaccttgtagtatattttagacaggtaatgtgatacatcaagctttgatttttgcttaggattgttttggctattcaggctatattttggtttcatattaatactatgattgttttttctaattctgtgaaaaattatataaattgcattgaatctgtagattgttttaggaagtatggtcattttaacaatattgactcttccaaactatgagcatagaatgtttttccattcatttgtgtcatctacagtttttttcatcaatgttttgtattttttcttttagagagctttacctacttgtttaaatgtattgctacatatttgtgtgtgtgtgtgtgtgtgtgtgtgtgtgggtccattgcaagtgagactgcattcttagtttggttctcagtttgtatgttattgattatagaaatgctactgacctttatacattgattttgtatcctgtaacttttctgaagttgtttaacaaatctagaagtcttttggatagtctttaggattttccagttgtaagattttatcatcagttaacatatatcatttgacgtcctcttttccaatttggatgccttttatttcttcctcttgcttgattcctgtagctagaaattccaggactatgttgaatatgagaggtaaaaatgtgcatccttgtcttgttccagtttttaaagagaatgttttcaactttttcctgtttagtatgatgttgcctatgggtttgttatatatggcctttattattttaggtaagtttatatgatacctggtgtgctgagtgtttttatcattaatgggtgctgaattttataaaattattttttctgaatctattgagatgagcatatggtttttgttttaaattctgtttatgtggtgaatcacatttattaatttgcatgtgttgaaccattcttgaatccctgaaataaaacccacttgattatggtgtattacatttctgatgtactgttgcatttggcttgctagtattttttagaggattattgtgtttacattcatcagggatattggcctatagttttctatttttgtggtattcttgcctggctttggtatcagggtgatactggcttcatagaatgagttagggaggattctcttctcatcaattttatgcaacagttatagtaaaattgataccataaaattgattgataccatcaataaaattgatcaattttatagtaaaatttatactggtatcaatggcttcatgtggcaatcatatggcttcacatgtctggtaacatttggctgtacatccctctggtcctgggctcatatctgttggacaattttttcattactgattcaatgtcattactcattattgtctgttaaagatttctatttcttcttgttacagtcttaggagaaattttctctagtttttctagtttgtatgcctagtgatactcatagcagtctttgatgatcttttgtatttctgtggtatcacttgtagtcacacctttatcttttctgattgtgcttaagacttctctccatttttcatggttgatctagctaacaatctatcaatattgtttatgatttcaaaaagccaatttttattttgttgatcctttgtatttttttgttgttctcaatttcatttagttcttttctgatctttgttatttcttttcttctctgagctttgggtttggtctgctcttgaatttctattcccttgagggacttgttagggttgttaatttggaatatttctatctttctaatgtaggtttttaacaccgatgaaaattttgttgagagtccctttagaagtgattagacacttctctcttgctgcttttaggatttttttccttcatattggctttggataacctaataactatatgtgataatgagtttcatcttgtaaagtatgttccaagtattcactgagcttgttgtatttggatacctaattccctggccagaccagggacattttcctggattgttcccacaaataagtttccccagctttttcttcttctccctcaggaatgcctataattcataggtttggttactttacgtaatcttttatttctcaaagcctttttttagtgttttgtttttttttttttgtctgacttggttaattcagaaggcttgtctttaagctctgattatttttcttctacttgctctaatggtaaggcttccaaatgtatcttgtaattatttcaataattttttttattttcagaagttctgtttttttaaaaattatctgtaataatttttaattaacatcctgatttttcttctgatttctttggtttttagctttctcttggatctcattaagcttcctcacaatctatattttgaattctttatctgtcatttcagaattttcatttagttttggatccattgctagacagttagtgtgttcctttggaggggttaaagcactctgtttttccatggtgccatagtttttatgttagttccttctcatcctggagaaattgtcatttattttttaatttactttcttttagatggtacttttttaaattttttctcttgagggcgtaactgtaatgtatgttgtgtagggctgtttggcttcaattctgggtgctttcaggggccaagcctctgtatgagttccttggttgtagataaccttggttataaatacagttcctttatgtggtggctttttcaaatgctgattatagtagcaatgtactcggcctatgagcaggactaacaccttctgtgggactgaggttatggaagtctcaggaaacttaccttattccgcagcacaatgctcttctgacagaagatttttaatttgattgtgcagtccaatctccagttcattaggtggtagttacgggtaacagctgtctgtggtatatacttgatctttgtttactgagaagggctctgttgtcacatgtagtgggctggtctgtcaaatgactggtgtcctgacttccctgctgaagggtacaggtgggacaaagctgggcagagctggaccaccaaactcaccctcagataccccaatgataagttaatgtatccaccttgactggagtgacagggagaggttatagtgaaagcctcccatgtttctcccagttccacatcatgggcaggcaggaaagtggtcaacctccacatcacacccttcttccagggctcaggactttcatttcagatagacattgtagttcatcttcaggactcaatgtaactgagggttccagcaaatccctaccccatagctaccaacaaaatgacctcgggagaaacctctttcctcaaccccaaacagacagctttgtggctcactcacctgtactctgcagcgggaatgctgctgttctgtgtagagtgagggatggactccaccattcttgcaagctgggctaatggacataccaggagtgggagtgcaactcctcctaatagtcctataatggttctccctaggcatacccatgccaacgccccccacgaaagaacagctagctgcagctgcatccgcagctgtgggtcggcaggcagaagtccccctatccatctttgttcccaggcaccagtgccacctgctgctgggatggaaccacactctccctgacatagcctagcaccatgcccacatttctcatgcaatgggcgcagtaatcttcagctcacaagtggggagctcttgtgcagaggagagtgcacactccggtttttgttgttccaagggcacttcggcatgtgacactctcccttcccctagggagagctcaccctgaacgttagaattccgggaatcccacagctcccctttatcctgctggtcctttctggttgctgctgtccaagtagattctaaggaatgtctataagggatctactggtgttgaggcaagagctgagactctttgggtaggatagagatccacaatatgtgcccaactggtatggcacctactacctcagcttgggtcttgagagtggagggatggtaaaactgcatgagctagcagcctagtgctttgccctcaagaaatttgtaaacacaacccacagcagtacttgggttcatgagggcagaggggctctctgacattccagaaatcagcagtatgacacaggggtgaggggagcataaagtacccccatctaccttatccatgggactccaagatcttcaggggtcaatctctgccagactcttgcttccttctttttgtgtgccccagctttttcccatgggttctttaatagactgtggcactcttccctcggtattccactcaggatgtgattactaactggcaactctggttcttctttatgaaaactggcattcaatgcctctagtcagccatcttgaaaaaaaaaacctcaactctgttattaatttgtaatgttattccattgtagcaaggcacatgctctgtgtgctttgaattatttcaaatgtattgaggcttgtttcatggcctggaatgtagactaccttggagtaccatgtgtacttgagaagggtgtatattttgctttattttgggtggagtgttccataaagacttcttagttctatctatcctattgttgttcaagtcttctatttcctaatagaacttctgcttatttgtcttatccattattgaaagtgagctactgaagtcctcaactctttttgctaattctccatttcacattttaattctgtaattttttgcttcatattttggggttatgttgtttggtgcatatatatttataattgttccttttttgataaattaacattattaaactagaataacaaaattgatctcaatataactataaaatatattttttatatctagtgattgtttttgtttttcaaacctactattccttatttctgtatagcctctctgtcttgtgatggccatttgcctgacatatcttttgctatctttatttttaaccttcctgtatctttgaatataaactgggttttctagataaaacaggcagttgaattttttttttatttttaatccagtgtgataaactgccttttgatttgattgtacaacagattagaatttaatgttattattgatatagttaaatttacatctgccaattaatttttatctttctaatgtctcttttgtcctctctcctttaccagttttgcattaagataatattttcttgtgtaacattttaatttaatgatttttctttgtattttttgttattttctttgtggttgatttaggacttatatatcttaatttataagaatctatttcatatttatacttatttaggatttttttttttttttttttttttttttttttttttttgagatggagtctagctctgtcgcccaggctggagtgcagtggcaccatctcagcttactgcaagctctgcttcctgggttcatgccattctcctgcctcagtctcccgagtagctgggactacaggcgcctgccacagcacctggctgatttttcttttcctttcttttttttctctttttctttctttctttcttttttttttttttttgtatttttagtagagatggggtttcactgtgttagctaggatgatcttgatctcctgacctcgtgatccacccgcctcgccctcccaaagtgctgggattacaggcgtgagccaccgcgcccggccacttatttagtttaatatagaaacaatcctagaaagctctatttcctcttatccattttatgctctaatttttgtacatattatatgtatatatgctccaaacccaaccatacatcattatatatgctgcaaacccaacaatacatcatggagctagcagtctccacttaattgcttaccaataaaatttccattatttcagagagtacccttcaacttgaacttgcctacattcttttctaaataaagttaactcttttgggcagaacttcagaattctcagttcttattacctggctctcttcttgggcaaaatatgcaccactgctctggagctaatgggaaggagggtatgggttaaggttcaaattacatagatgcttgctattgttactgagatttgtgtttcttgaaaaaaaatacatataatttgctgtatatcttagaacaatttctggagactttaaatgtagatatataatatatacataattatatttcattaatgtataatatatacatactatatcattacacatataacatcatatataagattatagatacatgatatataataaaacaatgctaacacatatatgtataattaggtacatgattttgtgtatgatataacatatatgtatattattatattattgttatcaattgtgaatgtttcactggagaggaggtttgtgaaggtcctctgatcccagttagaagtggattttccttgtgttttaagagcctctagctattggggtttcagtaccagacctgttagcaaccctgtcctattgggaaatgaaggagaactagacatgggtgtttacagtgtgacttttgtgggatactacttctacctgctaggcagcctaatgtctagttctcaaacccgtgaccagggggtctcgcacacaggaaaggtgtttatattggaagatgcccttgtggctcttgtttgatccctgttcagtttatgcctgcctaaccattgctgcagcactgggatcctgactttttgttcttcctggcatcccagggaaattctggcctggggaagctgtagttctttgcatggaaggtgcaaatttgatacaccaccacagtaagaaacaagctcaaagactttttacttatggatcctaggcagggagaacacaatgagtcaggaggacagttctctgtctccaggtcatgcaaggcagaaatgtagagtcaggcatagagagagagagaacatgtggcaattagcaggatacataagggcatagggtgtagattatgttaagtttgcgggaaaatacctgaatagtttttttaaaggaagtagccggaaaatggataacctggtctgctaggcaggagagatgcatctaagctcttatctggagcctctggattgaggcatttgggtgtggtgtagaactggaaactgagtcaagggtgaccaaaccctgcttttgctataagaaacttaaacctgtattcaaaatgaacaccaaggcaacataaaattataagaatttactatacttcattattcattttttgatctcaggacatgtgcttaactgctttgcatcttaggtgtcctcctgtaaaactggataaagtaccaggtgtatagtgctgttttgcatatttgcttagaaaaaatttgtaaaccttattttttcaatgtctgctcataaaagctatccaatacaatttagttccctgtttttctttcagatatccaaatctgtcactctcatcatgccatttctataacaagtcagagagtctatcttcagctttatctgtcattgttctccctcattttgcagtttgttccttgggttgaataatacctctgtaaaatgtttcacattagtcttaataaaaaaagtaatgtttatttttgtaataatttatgtaagatatagctcagtgaaaacatattctccttgcatgttatcacacacaattgtttttgaatgacacaataatgtattgacattttatacttctgatttcacagtatatttgccattacttgttagtaacaaagcatcagtcataaatttgaagtctgtggaattggttaattttacctcatttgagtaaatctcaaatgaggtaaagtataggaggtaggaggaaggaaggaaggagaaagggagtataataactaattggagaaaaatatatttgataaaataatccttgtctgtataaaacaattttcaataataactgatatgtttccctaaaggtagtttataatctattattctttttataataattatgatgttatgtggtttggatttctttgtaatccacattagatagcatagaaactagtatataaccaataaatatttcgtgactgcatgtactttgtgtataactttatgtgccaaattcttgatacaaataatctgtaaattttctcctcatcagaaaattgtattctttgtctaccgtcattttgccattatcagaatgtatattttacatggcattcccaaattaaagttaattattctcccctatgaaacaatgtactttgtattttaacaaattgtttagctaaggaagaaaacaatttatttaggtaatgcaaatatgtcaacagataattgcattatagcagaagtttaatataaaagacacaaaagttttaggtgtgtcctgagaagtgattgatttctgtagggcagaagtaaaggagaaatttaaaaaatatattatgaatgttgcgatgcccaagtagatcttgagagtaacagaagtaatagagtttgacaaggctggagttcctgtaagaaaataagcatattactaaatccactttattctaattaattatttgttcagatcttaacttttataacaggatatgttgaggacctgaatgttctagtcatctgtttcccctgagcacataatgcaatcaatggcctgtgataggtgctcaagaaattgtcaatgcataagtgattcaatggataaaggaagagggacgaatatttgacaggcccatcccctcctcacttgctctgagctgtgtcctgagattatgattgataggatatcttatgaataaatccatcaaaactgagcaaactgggaaaatattaacaatttaatggttgatttttagctaagtcttataatccaaggcaaatacaatttcctcttttatactctccagtacttgttatgtactcatgttttgtagacaataaaaataaacttaattttatgcttggtaatcaataatttatagtgttttattgtgatattatgtattcatgataagtaactcaatgtaatattaagctaagttttaagttacctaaagatcttgaaaattttgttcaagctgacaaactataaaacaaaattatagttgaaataaaaagattgagagaattatgattcaacttctttaaaatatatttttataatattaaacatttttataggaatacatttttattttattagtaacctagtatacaaactttcaggaattcagattaaatagacttttcatgaggaaccaaacctaaatcttataaaaattaaattgcctacttgtatattacttaacattgatactttatataaagtcatataactgtttttcttctttaaatcattattaaaccagttgcgatttgatattttatagaaaatgcctttggggaattttttagaggttatcacaattcatgtattagaaattattttaaaatattctatgtatttgggaatattcaatttacataagcactttttaaaaataaattataacagtgattctttagcttaagagatgccacaatttaatgtacttttatcctctggatatagaagtgaagacctttctcaatttcaaacacagttgcatagtcacaaagacgacttgtacctgcagtctcatcacttcagtcacgggtcaaaagtgaacacgaaaacccaaccaaaaactttctagtccggatatcaggtgttttccttcccagtgggcaggaaacactttcccagttgatttgagatctacgcaaacaggtaaacaaacaacaagccaacaaaccagaatctcattcatgtttaacccaataacgaatagagtttcattattcatctcatagaaattaccaagtggtcagaacagaaaaccaaaatcttagtcattgctctcactaatgggggataatttatgcaccaacaagatctagaaataaaaatcaaaacaacaacaaaccaacaacccctcccaccccccaccatataaacagtaggagaaataggaggaaaaaagaactggagagtcaggaaaattaaagttctattgacgcttgagattctctctgagaactagaaaagatgtgacttcactcaaagatccttgaatgtgcccttctccagtaatacaatttatttggctctgtcaagtgaaacaataaaatataattttcaaaagttaaaaaaaaaccatgcatcttatgcaaatataaactgaacacatgatgaagattttattcaattattaattatggttcaaaggagaattttaaggacataaacacataggtacacacaatcaggaatgctgaaatgcatttgctaatagatgcaaagctttttaaaaccctttatatgtgataaaataagatgtttaggagttatatttcctacagagttaaagcaatttttttctttactgaataaaacaaatttgcattgctattaacaagaataatttgcattagtgtcagttttttacatgacaacttctactcctacaaaattgctactagtctggtcaatagaaggtcagtcaaaggagcatatcattatggaatcagacaatccccggagagtatgcaggtaatatccagcactctacaatatgaaacaatcattttaatatttctagatcctcagtctcaagatttgtttcttcacattgatttggctgagaacataaagatacatactttatgttcgccttatcttctcactttcctttcacacttgcacttcttgaacttggtaaacataaatcacactttcatccacccatcaaaaatgtgtgttctctgaggggaaaaaatcactgtggcatacacaaaaatattaattagaagtattgatgtttaagaagacttctaaaatgaggatactgtaaacctaccccttatcttcataatagatgcatttccaatataaatttattcattgttcataacacaatgaatacatttgtccaattgtgggctaaaaatagttttaattgtaactcaatagagaagaatattttaaacattaaagactcatgacaataaattttaagtaatatttaatcttaacactatataaacattttgaattataataaagtgactgaataaaatatttgcaagcataaaatatatttccttagaataacatgttatagaagtagggaacaacaatataaaagaaaatgaaccacatataatttataactgttgaaaagaggagttgggttgtgtattttttaaatgcatgattgtgggtggcaaacagctattgtattaatattctacacaggatgcatttgaagaagaatgtaacacttttccttaaaatatgaatagtgaaagtatgctagaagttatgtttatgcattttttagttcaatgataaaatatttgaatttgtatagcttcaaaatatttgttctatagcctgtttaatttatgttatttctcagtggcttacttttaatttcaggttcatttttccccaaattttcacttgttattttttaagagaaaggcctatgaaaatatgaacaatgacctcaaataattgatttcaactcataaaaataacaaagaataaaggagtaatactgagacaattgccgctgtttgacaactatgatagagcatatgaaaggataatttccgaactgatagtttttgttcactaatggaattatttttgtcttcataggatatacttttagtcttaatgcataatatttaatccatcacattaatctttgtagatgaaatgtcaatgactacatatataggattgtgtgtcttagataagtccacataaaacataaattggagtaatcataaggagcagcatacgagtttggtcagcaactgcttggtttgcaaattgtatgtgaaagacttggagttataataatggctctaggcttaaaaccaccatattaaccctcttgtttttactatcttcaatttattatatggcttggagagtgtgttctgcatgtgtagctctgtctctttttcctataatgttctcaaccatctcacctaattcaattttgtcagcactttgtaaaggcctgttagaccaatcccactgaaatcacatgcctatttttatatctacagcattttatgccctttttttggtgtttgaaaccttatacacagagattttcctcaataaaaatttgttgaattcattaataaattaaaaaataaaccaatcaatcaaatctaatgccaaagggccagagtaatgatttttttttttctctaggatttttggggcaaaaatgtggccatctcaagcagcttcaacattttaatttagggcaagcaagccccaaaatttgggcttggcccaggatggttcttgccatcacccaggaaagaatttaggcagccagtgttattagacaacaaattttattgaagtagcagtatacagcagctgtagaggtactgctcctttcagaccaggtcaaccccacagacagtgtgcctaaagtagcagctcagaggcagtttggctgtcgtatttatacccactttttattatatgaaaattaaatggtggattatgcagacatttataggacaggggtggtaatttccaagtcatcaggtcattgtcatgttctttaaagaagcagtaacatctgagtgttgttctggcaagggtaaacgacatggcacactggtgggcatgtcttatggaaagctactcatgccccatcccaatatttacagatgtgaacatctgtaaacattctttctgcaaatacatcctgcaattgtatttagttggtcctcaatttcatctaatgtctgagtcctgtctctgcagttaagtcctgcctcctgagtcaagtcccacctcctacctcaatttgagtttaagttgaaaaaacaaattttgcagaagtgaaggcaaaaaatgaaggcatatccaaatgatacaaatgacaatcattgtcaattaatcttctgtttttataagggcaaatatgattccagaagctcagcattattttggcataatgggaactgtaggaaaggcagatgatttccatagtatttatcactgcattccttgctgtgtatttcaaattctcttggagtttgtacttctaaattttagaaaaagttgtgaattttgaaattttttcagaaattggaaaatatttgtagatcaaattaaacagaaagccaatgagatatattcacatctgtaaacattcttttttatttcaaatatattttgttagctaaaaagtactcctgttgttatattatttagttttacaaccatttttctaattataacaaaaatgtatttctgcaacagtgatatatgtgtttatattaagagaaaataaatgtaatcttcttgtaaacattttattttgaaacaccggtctaacatctgtaaaccaaggcagtattatgtttccatatacttaagaataggtactcccagtgggagatgatataggatagaatggaaaatgtattatccattggaaagattctgttatgtgggcatgtcaaggttattttctaaacatttgtgtcacatccttcaaaaattcttatttttttcttttatttttataattgcaacttttattttagatacagaggacacgtgcagatctgttacatgggtatatttgtgacatttgttcagtggtagatacaaatagttttaattgtaactgaagtttggggtatgatcctgtcacccaggtattgagaatagtgtccaataggtagtttttcacccattgcctgtctccattccttccccttctagtagttcacattgtctattattcccatctttatgaccatgtatactcaaagtttagctctcagtcatcagtgagaacatacagtatttggccttctgttcttgcattaattcaccgaggattatggcctccagctgcatgcatgttgctgcaaaggacatgattttgttctttttttggcatcatagtattccaaggtatatatgcaccatattttctttatctgttccaccattgattggcatctgtgttgattctatgtctttgctattgtgaacagcactgtgatgaatgtatgaatgcatgtgtctttttggtagaatgatttattttcttttggacatatacccaataatgggattgctgggttgaaaggtagctctgtttttaagttttttgagtaatctccaaatggctttccacagtggctgaaatattaataatttacattctcacgaacagtgtataagcattcctatttctcccgagcctcaccagcatcattgttttttgtctgtttaataatcaccgttctgacgggtgtgagatggtatcttattgtggttttgatttacatttctctgatgactagtggtgatgaacattttttcatattcattgtctgcgtgtatgtcttcttttgagaagtatcggttcatgtcctttgcccactttttaatggaatcatttgtttattgcttgttgatttattttagttccttatggattctggattttagacctttgttggatgcagtttgtgaatgttttcttctattctgtaggttgtctgtttactctgtcgatagtttctttaatttggtcctacttttattgcaattgcttttggggacttggccaaaattatttgccaaggtcaatgtcaagaagagtatttcctaggtttgtagtcgaaggtcttatatttaaatctttaattaatcttgggttgatttttatatatggtgaaaggtaggagtatggttttattcttctgcacatggctagccagttatccctgcaccatttcttgaatagagagtccctttcccatggcttgtttttgtcagctttgttgaagatcagatggttttaggtgtgtggttttatttatgggttctttattctgttccattgatctatgtgtctatttttgtatcagtaccatgctgttttgattattgcagccttatagtttagtttgaagccaggtagtgtgatgcctcaagctttgttctttttgcttatgatcactttggctctctgggctccaaaatctaatacacttttctatgtctagtagggactaactctctgcccagagtttaatcatgaaattagtgagccagtgttactaatagaaatatgacctatctctcagacataatagggcataaaaacttcagcggctgaaaaatcatctgaaagactttttaaaaatgtacaatctgagccatttttttctgatttactgtatcaaaaactctagagttggatctagaattcagtatttttagcaagcacttgaagtaatgtttctaaacactaaaatttcaaagcaataactccttaataaatgacaccacttttacatacatttatgactatagttgtaagtatgcgtaataaacattcaatctcaataatatccaaaaatgcaagaacataaagatcttctacaatgaaagacacattaaaacttataatgcaagacatagaaagattctcactaccataacctttcaggagaaagttttttgctgccttttcctcagaaatttagaatcactatgatattttgaaatctttatgaacctcaagatgtttacttttagatcttgttttaaacatactaccaattataagattgtttatattaaatgataattttaaaggatcaggaatgtgataatattgtcaagtattggggggaaattgccctaaatagcattataaataaatcatccaatcatcagtgttactcaaagttcattctttggaaccctattaccttcagatacagtacgaactaaaagcattattgttatcaaataggtgtgagaaatgatgcattgtatagcacatctgattgcagtgaatcacaatgcacaataacatatctaaggctctggagaggtcttacaagtgctcaaccttcccaatacagtttagcccaactaatacatagtaatatattgagaagaaatatacatttggatatactaatttatatgactcgtacaattggtccctttaaattggcaatcaacatatactttattaaattatactacttccaagttctgaaagttatttttaataatagagtctctactatacaaatctaactggttatgtctaggaaaatttagccatcttgtctttttgtaaataattgtgaataaaaattcattttataaaatgtaaataataccaatgagtattataaagtaccaaacaaaaaaaagacatgcaaaatcttttatactttattttaaaataatttttgagtacgtactatgtctgccagaaaatgtgcaagattctgtggaaattgatcaatagtagatatacgtcctgccctccttgaggttatgatatcatagagaagataaatgttaagatactattaggcatatgttgaatgctagctaaaaaagtggcgggtgctatagaaactgcattagtcaaagttctacagaaaaacagaacatacacacacataaagaaatttaatttaaaggattggctcacacaattatagggacttcggaaagtctcaatctgtaagcaagccagcaggctggcaactccggcaggggaatgctacagtattgaggaagaatttcttttctgagaaatcttagattttgctctcaatgcctttcaactgattggtcgaagctcatccacatcatcaaggacaatctcctttacttaaagtcagttgattgtagatgttagccacacatacaaaatagcttcaagcatcacctagatttgtgtttgattaaatagctgggtactaacctagccagattgatacataaaactaactatcacagcaatatataagggggcatatataaaacagttaatcaatcaaactgggaagctcaagataggttttatttaaaaatcgaattgaatttaactgagacttgaaataaaaatagagttaggtaaaaattaagggtaaattatagggtaaggtaggatcaagaagacaaaaaatcttatatagaaatattcaaacatgaaaagaatagtgctgattattttgtttctttcttttatataggaagcacaaaaaaaggaaggagtcaaggatgattttttgattccacagagtgagttatagaaccacaaaaaggaaaatagtagagaaaaatcgtagtttcagtttggggtctgttaactttgaaatacctatgagccctccacacagagatatctagtaagaatataagaatatgggcctagagagattaggtttggtgttgttaactcaagtaatctaaatcttgggaatagatgaaatcacctggggaagtgtagggtgaagagacaggtatttagtcagtgacctgtggcacttaattcaccaagatttaataggaaaataacccaaaaaaggagattgagagagcagccaaatacataggtaatgtggagtgtgatatcagggaaaccaagaaaagggcttgttgtaagaaaagtgttgtgatcaagaatgttacgtcctgctgagatgtcaagcaagacaaggataaagaggaatccattggactttctgacatggaattcattgcagaagcccaatttgaggtaagtgaggaaaaactggacttgaggaaatagaaacagcatgtgtgaaaataagagtggaaaaagtggaaaaggcctaagagtggaaaaagacctagtgtgccaaaaatgaaggtcaaggtgggcaggtggagtcaggtagtttttaggccatttatttgtaaacagttattttatctatgtgtctatctgtctgtctgtctgtctatctatctatctgtctatctatctatctatctatctatctatctatctatccctccatccatccatccattcaactgtcatctatttaatctatttttctttggggttaaattatgaaagagcaaggagagaagagatttaaaaactataaagacagggaataattgataacataacatccctgagaaaattgaagaggatgatatacaaaaacaaaatcatttagttttggatggagggtagaggtagaggggtctgtcattgtattagaaggagaggaggaaaaagaggtcaaagtgaagggaaaggtagcaagatccgacatttcaggaaaatggaaagtgtttaaagatctacagtgagaaattggagatgaactcactgggtaacagtaaacatagggcaattttgaacactcagtggaacttggagaccactgaagaaatttatcttctgttatgtaatatatttttctcagtggaattgagtagcttatatatactcatggaataaatggctatattttttccagattgtttagatgagtgtgacaacaggataacaaagctgaggaatttaggttactggaaaaaaagggcagtttaaagtgttctgtgcatctgggtgtggtggctcatgcctgtaaacccagcactttgtgggcctgaggagagaagatcacttgaacccagcagttcgagaccagctgggcaacatggagaaatcgtgtctctataaaaatattagccaggcatggtaacacacttgcattcccagctatttgggaggctgaggcaggatgattgattgagcccaggagtttgaggctgcagtgagctatgatcatgccaccactgcactccaacctaggtgacaaagagacatcctgtttcttaaaagaaaaaaaatggtctgtggaatatggatttagaatagaggtaagtgacattagaaaatagaggaggcatagggaagagaaaaatgtctggtggacagaaatttcattgtttaaaaaaaaaaaacaactgtagtgggataaaccaaatagataagtaagaggacagaatttgtagttgtgcagtagaatgacttactgaagagtgggggaatagtggaatagtggaatagtggaatggaggaaaattttgcagaagacaaagaagttaagcctttaactagctgtccatgtgtacatgtaattgtcatggtatcaaataaaaaattggagtggaaaacatgatgacacaggtactaatgacttaaatgagtgaggaagtaaccaggcaagtaggcagtgacagtaatgaagtgacaaaggaatttataaagccatatgatgtgaactaaataggagagggatttattattttttttttacaagagaggctataataggaaataaatagaatgtagtatatacctatttattagtggctatgttatgttatgttatgttatgttatgttatgttatgttatgttatgagtctgagtcttctgtgaaccagatgccaagatggaattagaagagccaagatttattgggaactatctatgggggataaagaagaaggggaggaagcagaagtaggcaaagaatgccttcagacagcaattcagccctgacatgtgtgaaaggagataaggaaggaagggatatttggtaggaaactcatgactacgtgggcattctgcaaaagcctcagccagaccaatgtggagtccccaggcaaatgtttctccttggaaaaatcccacatcaggcaggcatggcccagatttatagacctcaccatatttagtcattggctgtgagcagagcataggatgtgtggctttggagtaaaagccattgtggaccccaaggtgctggaggctgtcggccaactctgcttccacggaggattttctggaagggagattttagtggaagacttctaaaacctgcgtgcttcatcttctcaggcatcccacctcttccacacaatcctctaagccttttttgaccgcacttattttatttggtttgttttgctttctttcctagaaatactctatttagaaaatgacacctactaaataaagctcctcgagaaactttcctggaggtggactatatgacaaacatacttgaaatggactgaacaaagttattcttgtgagttagatgcagcaatccatatgcttacttgtagaagaaaaaaagtggtttaaattataatctggatgtaaaaaatcttaaaatcatgatggttacattcctgcctgataggaggtttttttctgagccccacatatttctatagtcagagactaagtccataagcctagcttccaggtggcttctgatcttcatgcagagtatggcttggatatcagtgtgttatggatcaaatttgatgggttaaaagtctgtatatcacaggtgtttcaagattaaaggcaggggagtggtctcttcatcagggaactgagagttgttatatgcacttaattatacatttctatatgtaattataaagagttttaagaatagtatatgcacatctctgccatggatgatctggaactttaaaaatggcatttgttatgaaatgactaaatatagtaatataattgctattgagttgtccttttcttgactgtcaggcagtaacctcatcatatcatttaattctgattggcagctgtttggtactattcatcttacttttttctccttgaacattactcactttgtaatcattgtatctttaatatcttgtgtcatacatttgaagcaatctggcagtttctgacagaaagaagttagaaaataaaagccaacttccctgtgtttttttctggtagaattgctgatatacctacaaccatagaaatattatgaaaaagtagttgaattaaacaatgtcagtgggttataaataataattggctcacttttataaaagctatgtatataatatttagaattatttgctaatgatcagttttctattcaatagaaaagctgtatttatttactaacaataaataaatgacaattattttgcagcataagctgctgtctctaaatctcccctctcccccagtttctaatactacttaatggcagacaaatggatatatttctcaactgctattttattcctatctccatatgttatcctaatcatgagccacaataccccactttccatggtcagttttggataacatatcttattttcaaccaattagtgtatccagttatcatataaaccgttttttgcatagtaaaaaacaaacaggaacaagccagttttatgctcccaaattcagttaatatgatagcaaacaaagggtaagagaaagcaagaaagttttaggactgaaagattgttggaaaaataggaagtagtagtcagagagtggactacaggaaactattatggaagagttgcagtttttagtaatggcaatgctcaggttatgacctgataacatgagattttaaagcatgttagagtttagagatgaacagaggaaaatggtgtgaaaagggcaatgatagaaaaagagagtcaatatcccatgatattgaaacaaatagctaccgctgcaaaggatggtggaggaagcaccaccttcaggacttatctgttaaaggtggaaggtgagtagaatgttcacagaagagattgagcatgaaaggacatttgctgaatgccagagggcaccctggaaaacttgtgagtgttggagtataagcagaggtgggtaagaagaaatggctccctcttaatccctcttgatggaggtgaggttgtccagggttcactttggattgctgtgggaggaatgtgcaagagctctaacttggtaggtaaagtctattggtgaagctagttcttctagcatgcacacccccttcatcttggtgatagagggacacgaaaaagtgtaatttgtctaagttagacattttctatatgttaagcccataaatattttaccttctctttattcactcatcaaatattcattgagttgctgctcagcatcaggtgcagcagcgagcgcttagtctctgtcctcctgctgcagcagagagtacggtatgggaaagagacagagccagttatttcacaagcaagaaccaattaaagctgtggcgatttctgtggtggagaagtgcatttggcaggaaagtatgtaactggaggcttagatttgcttcagttgtcagaggggcttctttgaaggagtgacatttaacattttttcgaaaggatgctggtgagcgggtgaggaaacatgtcagacagaaggaaatgaatggataaggatctgaagcctgcattctacatagtgctcttccactccctgttatatcccataccctcccaaaacacagagcttctgaggctgttcaaagagcaaatatttttggaaatctttaaagataatttgaaaagtacaaatgattctttccagtgggatgaaggaagaatgttttaccattttacttatccaactgcttttcttgagtctgagagaagagggagagctcttttttgagggaagcaatattttagagatctatcagtagaattggagtttcttagatttataaagtattttttgttagtgtcagaagaatttgaaaagcaggggaggaatataagagcagtattatggctaacttaagactttttacaacctttgctcttatctctataataaattgtacaaccaacaatctttaaactattagtaagtcagtagtatttcctatttcattactatgtgccaccaaactatgcacatttctttggtcagaactttttaaggatatgatgtgtatacttgtataatattaatattgtataaaatgcctcatttggatttctaaatatctaataagatcttttcaagtttctaatacagcttaatcatggttttatgaaacagttataatgccacgtggagtcatttaaaagatttgtattagttataagaaaataaacagagcatatagtaaataataaaaattacagttcttaaaagtataagcactgaagtaacaaattaaccattaccctcccattttttcctttttttttttttttttttagaacaggcaacttagattagtttctgatcagtcaactatcttttcctttttgttttcttggatccctacttggggagctttttataaggcttattcccaggcaacagaattccacttaatctgttatgtgaaacagtgatccaagttccattttgccaccttgcctggaacacatgtgttccattaaccacattagctgaattcccagccatgcctgcccagaagcagacccaagcaggttgatgacatcatcccactcactccttctattttgtttcaagtttataaatatatttatcttttttgggcatgaaggacttaaatttttctctttgtataatactattttaacaaaaatattctgatatgcttcttagtttatgaattgatctaaatgaaatcatgatataaggcagttttacattttagatgcctgggataaaccagctgagatccttcacttggaggtacagggatgtggcaatttaaaaggtaatacagtgcattgattgtatcatcttcatcattcagcccaaagatcaactgagcatcctcactatccagagtctactaaacactaatagtcaagttaaagagataaattatcttttaattcaaagattttacaatttagtaaaggtttcagctatgtaatacagtggtattaggaaaaaagaaagttagtacaacgatgacgcactttttctaggaattcaaaaaatgatggttaaatacaaaatgggaaatcaagaaaggagggagatggggacagaattacagagcatctattatttgaacaaggccttgcatgagagaaaagtttttaagggaagaaaaaatggaaaagaaagtgctttctcttcctctgagataaaatgggcaaaggagaagaaagtggaggtaaaaaaaaagtatatttcaagttgaagatgagaaagtacaattctcttggatggccttgattttcttagttgagcagatgaaagatagaagtgcatggttaggcaaaatgagaaagaaaatcaaaggtagaataattagatggatgcatagctggttagatagatgggaggaaaaatatagaaaatataaaaaacaaacactttttgaataattagtccctgccaggcactatattttcacattcgctatttgaagccaaatatgaagaacacagtgatactagaatcttacaatttgtggtggagctagggaaatccacttatatcaatttgtcatcaaacttcagcaaatagaattggtgggtggtctttttaatccttaacttttgtggttgcagatatcttgagtatagtcttttccttttagaaggcaaatactgtaattttcatgtctgtctcccatgtctttctctaattacttcattacctgaatggtctcttcagaaatataattttctggtaaaaataaaattatatggagttaagtgacaactctgtgctttttgtatatgcagccactctatcatgcagatatggtagttaagttgctcagttttaatttggggcaatagactgagcagccatttaagaagctgaagagtagcttctctttttcggttttgtgtgaatcgtgggtgtaatttaaaaggcaaaaatggagaaagcctttctggtcctggatagtgaagcttacaggaataagaagagaaaaattgaatttaaaaacaacaacaacaaaacatctgtttcctcagaattagctgctactacccccttcttctttttttttttttcaatgtgtacgagaatccagaatttcttcagtgccacaactgaaacaaaaggtgtctggattagacataagtgtagactacagcaaaatgcttcaaaagatccaagtggcaccacttacataagccctcaggtacccgttaccttacaggatgaatggcatctcattgcagcatgtaagaacttagagacagcatgggagccaaacatggtttggctcctctctttacttccacaaaggtaaatcagcttctttctatactctgattctatatttggaaaaaggaggaacagggaagttcccttagaggggaaaaacatgcctaaaagatggaatccatatattcatttttcctaattttcacctgctatgaatgaagtaatgtctttattttagcaaaattatccatttggacaataaatggccaccttattatcaacgagcttgaactttcaattgatttaatatgtacagtaaactgacagttttaaattggaagataataaacttggcaagtctactcagcaatttgcctttggttggttttctatccctactcccaaattccctacacatgccccattatcattggaaataaaaatttccagagcaaaatgaagttagttagagaaaatgatggttgtttttgcatgttagtttaagcatttaatcttaattctgccataccaatcttgagtagacaggtctgtgtgtaatacaagcagagtattgccacaatgtctctaatcaccggttttttattcacattggtgaatgtcatcaacttttagatcatccaccaaaaatccttagtgtaactgcaaacctagagtttttctctattttacaaacacactaatacatgtcctcatgttttattgaatttctaatgttaaatgacccattggcatatattattatctgggatagaaaatatataactcaatgataaaaatatattttaatggcagatttacttggtattcctcttacatttcatacaaggtatgcacaaaacagaaattttaacttttctcacctgaaatatctacaatttcttatcaatctcaaagaaaatacattatgtttgaatagggttgtcctaggaatgtacagaaaccatgtatttctaatcccttaaactaggtttgttgactttttggaaaccttagacttccaatacttaaaattcatacactggtctttacttttagaaaacaaatttgagaatcaccatatatatatttttgaaaattttggaaatatgtttgcttatagcaaggtaggaaaatagattgcttatagcataaacatcgttgacatttattttgaagaaaaaaagcaaactaagtaatttcacagacagaacaaagccaggctttcaaaaaaacttatgtgctctacatatactacagctacatgaaagtaacttgtaataagttttaatattcacatgtcaaatggataaaataattaaaaattctcaaaatattaaattattaatttatgaattaccttataagtgcttatttaatgggaaaagaccagcactttgaacctagagctttggcccatgttcaatttaaatgataacctgtgattctaaactagagggtttaacatccccagtagaaaggtcaatgggaaatgtaggaaatgagattttttttcagtcaccctaaggaattcttaactaccttgcttgggtataagataagtgtctgacaaggaaagaattgtcccctcaaaaaatccatctttattagcatccccgttgactggaacttaattaaatttatttatacttgctggacacaactgaacatctaagattccttccagctctgaaatactccgcaacagttacttaggaagaattaaactgatgcagttactctagtagaatcagatatacttgtggtttatatgtgcaggaatacacattaaaacacacacacacacacacacacacacacacacacacacacacccttcaactttaacagcatcttttctgtaaaggaagtcagtaaaaggctgctctatttcagaatcaatctaaagagagttatgcaagtaaaaatggtcttttcataacattttttcaggaagatgatccctatatcggaccccaataatgaaattaaactacattttagtacagcaattacaaaacatcttttttctttatagaagcaatgcatgctttttaaaataaaatagtaatacatagatagccaatatatacagtgaatgtaagttgagttcttcaatgccccatgatctgctccttcttcacatcttatcttcctctctggtggaaccccagagacttctttgttaaacccaaggcttcacataacacagtggaaaacttattgctataaattagacataactaacctcggttaatagagaataagcaattgaagtagattgtgccagtcctggacaatcagtagtggtagaattgaagtaaatttaaaacttcataccattccctcaaggattaaaattcaatgaaaaaaaagtaggccaaagaaaacacttctataaattatattttgtccttgaggggtatttttgtattgtattctaggctacatgctgttacatcattaaaggaaactttgtttattctttctaactagaacatttatcccagaagccagcaagcacctcaatattaggtcttataatatgataaagtttcacctccttttatcaatgtagagaagtagtttcttatcttccctggtgacattctggcttttggcatccttcttgaatatagggtataaagtctccttttgatttgaagaacttgtgccttctgatatatccctgcaagtttgggaccatatttggtatgcattgtgtgtaagctttgcttagtgaagcacagtttgtccataaacgaggctcatccttaccagacaaactctgggattataaatacacataatactcttagcccttagtaatagaggtcaaaagataatcactgggtgggataaaatgtgaaggtataatccagaatagtcttaaaagaaggttcttagaatagttgcagataatatacattgtagtagaagggtgtggaaaataaaattaagaaagaaagtaataataaaatagagaaaatggtgaatggaagtcaatgataaggtaaacatatctggaaattaattcatgtcaaattttgtgtatatataatattttcccctcattacaaaattatgccatatacctttctaaaaagagaaaataatataatgtaatatattgtaaaactcattgcatattttgtcctgatgctattaaaaagtatttcccacctaaagtttatgccacatgcattttatactatgagaaactgcatttgaatataaatttatgcacttttatctcaatgtctggatttcaacctcttgcaaattagcaattaaattgaactagatgcactcgtgatgtgatttaaatgccatttgactctttcagagcactcataaatatgattttattttcatggattataatgataaatcccccaaatgtagacttattttttatttcttcaagtaacaaaggaatatagaatttagaattatgaataatggagatttattcttaaagtattcttttaattttacattcattatattttgtgtatgtgagagagttatacttcacactcagaaaaagtgatatagctactagttaatgtggtagtgtgattttactagttactttacctgagctagccaaacattactcagttttcatattttcttctgcatagtttgaacgtgacagctctcttttttaattgcattagctttgacagtcataaggagatgaaagcattttaaatgataccataatgaaaaatacagaggtttgtttgctttttctattaggtatggttgagcataaaaactcatattttcagttttgttttgatgcattggtacttcacttccttgcatgaactgacggaactgtggaagagtattatgtctacacctgattatgagtatcggcaccagacaattagtaaagcttcattctattacagttcatgcctgaaacagtccccagcactcactggttgactaagtgaacctttcaaaaacagaagttcattacaaagatgaaaaacatttaaaagctaatcttagttttaaaactggccggggacagtggttcatgtctgtaatcccactactttgagaggcaaagccaggaggattgcttgaggctaggtgttcaagatcagccttgacaaaacagtgagaccccagctatattaaaaaataaaataaaattagctgagtctggtggcacgcaactgtagacttagctacttaggaggctaaggcaggaggattgcttgggcccaggagttcaaatttgcaatgagctatgatcatatgatcaatccacggcacttcagcctgggtgacagagaaaggcattgtctctgaaataaataaataaaaataaaaaagaaccttagtctacatatccctacaagagatgaatattatcattccctttatactaatttttgggaacaattttttgtgtggacggcattggtgaaaaaacacttgtggctacattttacattggttctttagaatcatagcaaataaattctaatagtatgcaaacaaaacgaaaacaaagaagtagtaatcctttattaatcacatagttttgctttagtaatttctatcatgttttatttgcaagcataatgcagttatatctttgatctttttaatagtaagttcgctttctgtaaaagtaatgaaaatttaactgccttttcaattcttattaggtgtatgatatttaatttaaacatataggattaattaaatatatactaagcctattaatgacatcctattaaacactattagcttcctgtattacaattaattagatgtatactaattattaagacaataatatataagtatatagttatatttaattatattaatcaatttatggaaatttaaatttatgaatttatattttaatatcttcattttttaaactagtaattatagatttgtaacatttgtaatatgtgtaggtaatcaacataaatacaatttctataacttttctctgtttctaacagatttaaattttttcatttgatttacattcatttttctgaaatagtagcattaatttctcttttttcctgagcttagactcctcaatacccctatttatagattccaagtccataacgtgttaccttggaaactatttaaagagcatcgtctctttactatttgtttttatcggatcataaaactgccttttttctccttcagctactgcttcaaataactcagtactgtgagaactgataagctcagggcttatgccagtattatagtgtgtgtgtgtgtgtgtgtgtgtgtgtgtgtgtgtgtgtgtgcgcgcgcgcgcgcgcgcgcgcgtgcgcgcacatgcaagagcattctcatgagtatgtgtagatatatgtgtgtttatgttttgtgagtgactactaaaaattaatcattatgtcttatacatttcctcacaccattatgattttgggggactacctgtgtgttgaaaaactggtttttgaaatgacttcttgtatgaatagtctaatatctgaatctgtagtatgtagtattttaccagtacaagatatatagcattgtaatactttatctcaggcagtctgaggttatttttagctctaattttctctataaaaggcagcacaatacagtgacaaagaatattagctctggggctgcactgcctaaattgaattctggttcaccacatactagttgtttgaccttggacaagctacttaatgctctgtgacttatctgtaaaatggggttaataaaagtgcttgcctcataggcttatcagtcaattcttgtaagtacctagaatacgtggttaatggatgccaggggtctaaccaactggcttgaaaaagattgatcttaaactttaattaatgcctgtggatatacactcctgatgatctaaagagaaatttaatttacatcaacaaattcacagtctgggtgttaaatgtgaataaaatcaaatagttaactgcataaatactatagatttcaagatttatttttcagtccaaattttgaagtcaaagtataatgaatttataccagaccctcaggaagttattagcatagtgtctggcatatgataaagtctcaataaagagtgaaattaataatcattgtgtgattgagactcactagcactagtaattaggatgataatatcacatggaggaaaactatcagagtccatacttgttatttttgtcaatcttgttctattatgaatcagtaagagcaacttatggaatgaccattcatgctttagcatgtgcatcttaacatctatagaatctttccatgatatgttttgttgtaaataaatatttattgacataatttattatttacttgtaataaggcatttagtatgcatatttactattgaaatgaagcaacattagggttttaaaatgttcctttataccagaccctcaggaggttattaattatttttggatatccttgcaaatagtccacttcacagtaattcacactggttttgatattttaagattcttactgtacgaaaggtatttattaattaagttagagtctttgagtatctcatctgcattatggattcagatatgcttgcccggataaagcattagatttttaaattcttcatgtcacttaggacatttttacttgatatcactttttaaggtgaattcatttgtaggaaaaaaagcaaatgaaaagcagaaaaattagttagttaattagcttgggattagccatggattttgtccatatgagaaaattcagtgaccttaagtaatgatttattttataagaactcacagacctttatttattactatgttacattgtaaaaatgcttcacctgagccttggtttcttcaatacaccatggagctaaaaagttttattttgcaggattctgtatatattgcagttttattataaagcacacttaaagaaggctaataaactcctcattgatatgcaataaatattagtttctctatttcctttgtggaaaccatgaaattatatatatatataatttttgaacacttttatcaaattaatttttaaaagcactcatttactaaatatgactacagtggaaagaaggacttaatagtaatttagattatgcttcatcaatcattagaggaaatgtgagattggatcaaagaaacaagtcatcttccaagaatagttgctctgaaactgtcattttttatttcagtgtgaatattacattgagtaattgcagtatattttgttctgtgtggcccctaacatttgcattccctcttattgggaggaaagatttattgctgccaccctaatagtacagtgagtctttattcagtgagtgttcactgtacaccaggcactgtgttagccactttacaggcattttttcttacaattcttacaaccaacttgcaatgtgagcattcctattatccacattcacatttaagcataaagaagttaaggtttatgggatgtaaagacttgcccaaagtcatacagatttaaaatgccagacccagtatttgaactcaggccttatttcagagcctctagtccatgcctctatgtactatatctctgttcattttctcactccaatttccacttaatattttgttctttgaaactaatgaatgaacctcatcacttgtaactgcacactttgaagcctgaatatctctggggcaggaaatgaaaacttagcatgagagagacagaacatgctatgaaaatgtaagtctgtgtgtcatgtcaggcaacttcatgagcagcaattccttcaaaattcttattctaatttcattaagggaagtgaaagggaggattttgagggtgcttctagttttcagctggtgccttagtgtcttgttttggaaatcactttcttatgtctaaggaagtaaataatgaaaaattacaatggacataaataataagttaataggatcattgtggggatacttatttcattgtcattaatttcttaatttttttgaccttccttagagactatgtcataaaaaggaacattttaaaaccctaatgttgcttcatttcaatagtaaaggtgcatactaaatgccttattacaagtaaataataaattacatcaataaatatttatttaccacaaaagatatcatggaaagattctatagatgtaagatgcacatgctaaagcatgaatggtcattttccataagctgctcttactgattcataatagaacaagctggacaaaaataacaagtatggattctgatagttttcctccatgtgatactatcatcccagtttctaatgctagtgagtctcaatcacacaatgattattaatttcactctttattgagactttatcgtatgccagacactatgataaatagcttacacataaattatttttttcagctcttcattcccatttcagaagtgaggaaatttaagcttgaagaagtttagtaacttgttcagtgacaggcaagtaatagtatgaagttggaatgtctgactccaaagcctagtatcttatttgctatgtttttttttttacaatttgttgcatattttcttttgttttgtaaataataatattgaaaaatatgaaacacaaataaatagaagtgtttgttgtatagctttttataagactaggtttttatgttagcaaaataaatataatattaaaaagaaaatattttacacctttaatgtaccaatggaaaattctttcaaaaaaattcagaaaattatagccaattgccccctaattatctgtggtgtttaattcaatgcctaatctattatctgtgaaatagaaaaaacaaaaatactttcatattcataattagactttagtactcagtagtaagaaaaaagaaaatattgcatatatgattctgttgttgttggtagcagcatgcaaatttctgcataccttgtttataactgacattaaaagttctatgttttcctcttgcttctttagcaaccatatcaacatgcttttggggaataagaaatgccaagttatatcatgtatgacagagttttcctggaaatatttgtacatgtgaagcatactatatatgtcatggggaaaaagaggatatatgtaaatgtatagctttacgtttctggtactgagcttggaaaaatggtagaagttttcagggatgccatttagtgttggattgctgcacagtgtatttgcattatttgcaataactgaagtatttagtatttgtgcaggcatccttgtatttaatattgttaatatttatgttaattaagagagaactataaagaagcagatcagtcagttgcagaaatcatctgtaaacagcttttctacaaaggttcaggatgttgctcccaaggaaagacaccgttacatgacctctgattaatctcttccctcttatttgatttctttgaataaatagattgctctacgttctcaaagtaaaaagggtgatatattctaatattgctgtaccattttaaattgcatagataaaagcctatttagtggggcataagatcaccataagcctcttggcagttttcagcgaattcatacatatcaaaagggactcaaagaaaaataacaaagagcaaaaataatgagcccgtcaaagcaaatgcttaatgcagctccactttggtattaatcagactgtatgtgggtgagggtcaaaccaaccgaggtcaatagagaggattttggtaaagacgaaaaaagaactaagctagtgatttcagacagattgaattttttttaaagtgaaataggaaggtcacaaaatcagattcagtttgcagaagcacagtgggcaagttttaatgacttctcagtagagctttttaagagaggcacttgagtttgaactatctaaactaaacttttaaaaaatcaacaggaaaagggaaggaatatttgtaaagattaaataaacttataaaacttgcttttattgaagaatttcactactttggaagattaaagtagcttccttaaaaaggagattttaaatgtgtgcagattttatttaacacataatttagatattgctttatgtcacagaagagcagtatgtgcatatgtgtgcacatataattgtaaagatgtctttataagatactttccataattaaatataggtgatttgaatatttataagactttaaaaatgtttctgtaaattgtatattctgagcttgctaaatccctctttgacaaatcctgaatgggagagagccaataacattcttttcctctatcaaaccattcttactctacatattcttcttctgctttctagcagaagaagaaaaaaaaagaatgaggaggaataagaagaggaggaggaaggaaagaagaacagaaacacaaaatcttactgtgtcattacatgacctatgattaatctcttccatcttatttacattttggataaataggtgactctattttctcaaagtaaaaaggaagatatatttacttacttgccaattatcttattgaagtgttaaagttttatttttctctggattattttaagatgtacttactattaattcattttattgaaagttgacatggtaaactatatttccaggactatagaagattcaaagatgataaaatatgtatggccttttcttcacaggctttaaaatctaatgacaatttcataagcaaccataaatttgaacatttttgatatctgtaacaatatagtactttatgtaaatggttatagcaaaaataatgccatagttctatgaggaaagaaattttaaaattcctgattcttctcctttagaaatatgtacatatttatctatctatgcatagatactatttcttgaaatatagttaaatctattatacttccatcatattaggctatatatgcatgcttctatatatatattaatatatatgttaacatacagaataaaaataaatatatatgttctactagcaaataatgtatttgctctattatttaatataaataggtacattgatatatattatacacacatatattaatatacattgtatacaaatatgaatatatacattataaacaaatgtatatatctatatatacattacatacaatgtatatacatacatatatacaaatgtgtatataaatatatacattatatacagatatatacattaatatacattatatacaaatacatacattataaatgaatgtatacatatatacattctactggcaaatattacattctgtccattcataatgccacccattacttcactcaagcatcctagattattgtataattggactttatgccaatagtcattcctaatctctccatgatacgaagttcaacatctgcttttttaggttccaaatgataggacctttaactacatttctagcctcattttatcttcctttgtatttttagtacataatgttatacatagcagtgttcattaaatgaaataattcataacaaatgaaatgataaatctttttcatgcatatgtatggttttcaagcaataatagtgaataatttgtttttctcttgctcctgaattataaaaattatggtagaaatgaactagcattttaaatactttttttatatcacaaaaatgactgaattcttattaaattatgtgatttttaaactcacaataatcttggaaattagacacagcaagagttagtattctgacttataaaggggaaattttgtctaagatagataaaggggtttgtgcaggatttctcccctagcaaatgatgaactagcactggaatttaggattcctgaccatctgtgctttgtctttttccattagagctaggatgaacatatgccccattttttccagaaaatttcacttaatacatagcatcttgaattgataattaattgtgccctatttcactctcctgtcctggtttaaacaataaattatagggcaaccataactatagctcacagtaagaaataagagaaaaatagaagtaggctatacccaggataagtaattttgatatcaaggttgatcagatcatattaacttgttaccatcaaaatatgtcattttaatgattcacaagttggaaaacttaccttgtgaatattgatcactactgtgatatagattcttattattttatcttatttgaaaactactaaattgtctatgaatgtttctgagtgttgtctacacaaatttaagacactacactatgtgaaaatgaacccatggtagttccaaactactcaggtttgacatgccagccatcacatgagatgagaacagagagtaacttgcttgatggaaactgagtcagattgggtgcttaatcagccactgattaatcagaatgcaggtctgactaggagaaccacaaatcaaaatgggcattaggctgtgttccctattaaattaataactgactataaagccaagtaacatttcaaatttcatttgattccatagatttaaaattggtggtatgacaactgaacgtattttaaaacatgccttttttttgaaggcaatgtatttctctgcagaaataaactcttgacattaatgatattgactctttcatccagtttcaaaactctattttgtcaagaaagttataattattgatactacttgacagcaaagagcagactgctttaaatgctcatcaacgtcttttcaaaatagatcattattcttctaatttatttccaaataagaaaagagctgacagaggttgagatttgttcaaatatttcaatcctagagtatgtatatataatacatatgcgagatgtgatggggtgtgtatgtgtgtgtgcatttatgtgtgtgaatggcacataatctttccaaattacctggagaaaattgtatctgacaatcctattatagaatgcaaaagacaggaatgaaaaatctatggtcatacctattcacaaaattgtttaagtctagtttaaacaacatactaacatcactattatttctatataatcccaataactatttgggcttaaaatttatacaattctatttagataaattcatagtatgctagaaatgaagatatttcaaggagaatataagaacggcaaggtctttgtagcatcactgcatgtgactggactaaaaatccaccgtgagcttgctgagtaaattgtttcagatttgatcccttcaagtgttattgaagattctcccacatataataccttaatgttactcaattcattgttctaaggttgttctaaaattgttctaaatttctggctatgccgaagttcatttctaaaataaaaggtaatgcaggcagttaacattttgataaatactacttcatacttttgatctcatttcctgttttttattacattagattttctatcaaaagaggccattatagtttagggataaatgcttgacaacagagtgtgtatgtcaggatatttcaaacggtgaagaaataatgtttttaactactttaattatgcttctttctttcctattggatttgataatcatggccaaattattcattaattacttttacagataaccaaaaaaatgccaaaaagtgctgtttctactaaaatctcttagcaggaggatcttcatgtttggattgtgcacaaaggtattttcatttgttcagagcacttaaacaaaatggacaaaatgtgtattttttagaaaattacccatatatgacagagcatcaccagtgacaaacacgttattgctgaagagtagacgtattttgcatctgcttatgtcttaatctgatgtactttattcaagaagcaggaagtgagggacagagtcctgtagttggccttaaaatcctgccccacaggtctgtgccccttacacttactcaccaaggcttggccgtgggtttgttatattgaatcactacttagaaacttagtttcctccaccattggccaattttcatgaatgttgtcaatgatagaatttctcgatttttcagatatctcaaatggctttaagccctggatgtaactcaattaaaaatattactttcagttatgttgttatctgttcacatttgagctgctgataacatctgttatttgagttgttaaaaaataattatttgttgatactcttttccatgctattttacagaaacgtgtaacttgttaaaagtgttagttctatcttttttctctgtaaaaagtagaattctaagaaaaaaattacaataaccaactaaggtaaagaataattaagtttgcttttgtttcttttatttataggtatagtgagttggattaatctcactcctaagttgcactattattagtctatgcaaggtctttcttttttatttgaaaaatagttttaaaaattttaattattaccttctcagccccattgagacccatgcccccactatctttacgtaatgaaccactctaacgtacattagtgtatgtcctttatcatggttatatcctcaaagaatatatgctggtacttttaatatgcatctttggtatttttaaattttaaatgtatatatttgttttagttttcactcaatgtgattattaattgttaattgtttctaatccacaagttttatacagtacctgctcatcacatagtatttatttcctagtgatggaaacttcattgacttcaacttcctgctgtcagaaactatcctttaataagagtcaccacacagtgttaattcattcctaatcaatttgtggtgccagttaatgtgtcaaagtatctgtctgtctatatttgtctattatctatcatctatatatcatctacattgatctgttttccaaagtcttaattacattctattgattttttttctatttagctccacttatttttactaaaaattttagtaggatatttaatattgactaattcctcttttttcttctttttcaaaatttgctcttctatggaagtttattatgatatgtaaactttggaatacatttgccaagtaactaaaaaaatctgctttatttttagctttcagatttattgagataaagttgacatacaataaacttcacaagtttaaaatgtaaatttgaaatttttaacatacgtatacatcagcgagaaaataccacagtgaagatagtgagcatatctatccactcccaaaagcttccttgtatcccttggtaatatggaccacacaccttttctcaatactgctcctaatcataggcaactactgatctgctttttgtcagtacagattagtttgcattttctaaaattttatataaatcaaattgtatagtgagccacaatttaaaacttatgaattgttagtttctgaaattttccatttagtatttgtggaccacagttgactgcaggtaaccatgtaacagcagataaaggaacattactgtgtgtactcaatttgtgctcctttttgtctttcttttttcattttgcttaaatattttagatttatctatgctactttatcttagtctatgacttgtcttttgatcctcttaaaagtggctctggaatagcggaatcactcaagtttaatgaaacctgatttatgtagggtttttttgctgtttcggattgtgtttttgttgtcttatttaggaaatatttgccatattcaaacccacaacaatttcctgctatattttcttctagaagttttatagggttaggcttaaaaatggttctaagattcattttgagttaattttttgtacacgataaaggtatagatgaaagtttttgcttaattttccttaatgtataatgttacatgacagtatttattttgaaaagattatcctttcttcactgaatttcctttgcatttagtttaaatcacttgagcgtatatgtgtgagtttttcttttttcttttctttttttttttttttttttgagttggagtctcgttctgtctcctaggctggagtgcagtggcatgatcttggctcactgcaacctccgcctccttggttgaagcgattctcctgcctcagcttcccaagtagttgggattacaggcgtgtgccaccacacctggctaactttggtgtttttagtagagactaggtttcaccatgtttgccaggctggtctcaaactcctgacctcaggtgatccgcctgcctcagcctcccaaagtggggtttttctttaatctgctgcatttttctataacaatactacactgtcttgttgactgtaggtttgtaataattattgaagtcaggtagtatatatccttcaactttttttctttttcaaaactgttttcactattctagatattttgcatttctatgtaaactttagagtcagcaagccaaattctataaaaatacttgctgaaaatttcattggaatgtcattgaatttatagatcatttggggaataattgacatcttaaaaattgataattttactatataaacagactgtatttcatcattaatgtttaatttctcttagtaatacttttttagttttcagtttccagatcttacacaaattttccagctatcctcaagtatttcataattttgatgctattgtaaatggtattttcaaaaacttcacttttgtagaaacacaattgattgttaatagtgatcttgtatcctgagacatgtgttaagctctcttattagttcaagaagatttttcttttttttgtagagtaatatgttgtctatggaaaaaaaaggttttcctcttccccaccaatccaaatgactatataagttttttgtgccttactgtattgactggaaacttgactaggaatagtaagaaaagatgtattttccttttttcctatcaaaggggaaaacattcatttttacataattaagtatattagcttcaggttgttataggtaacttatatcgggttggggaattttcctttcttctttactgaaatattcttttttagtgttttaaaatcaggaacaatagctcgatttatcttatactttttagaaatctattgggatgatcatttgtgtatatgatgaatgatattcttttttattctaatgttaaagcaaccttgtattcctgagataaactcaaattggtcttttttttgtatagtgttgaatctacttgttaacattttctgaaaaccttttacatctatgttcatgagggatattggtctaaagtttgcttctgttgtttgctagttctgttttcggttatgtttgttttatatcatgttaagaatattctatcctcaattttctggaatagtttatttaaattttttttaatgtttggtagaatttattatgatactgtgatatcacctgggcatagagttttctttgttgaaggctttttttttttttttttgatacggagggtacacatgcaggtctgttacatggaaatattgcttgaagctgaagtttagggtaatggtcctatcacctgggtagtgagcatagtacccaactacctgttggtactatgcctcctccctacctcacccctctggtagtccacagtgcctattgttcccatatttacatccaggggtgctcaatggttagttttcacttagaagtaagaacatgaggtatttggttttctgtttttaatgacaagttctgtttttcataactacaggattacttaggttatccatattatttttagtgagctttggtaatttgtgtctttcaaagtatttgtccatttatctatgctgttgaacttattggtttaatgttttttacaatgttgccttattagtatttttaaaaatatatctgtaaaatctacaatggtgtcacttctcgcattcctgctactggtaatttgtgtttctctcttttgtttctgatcaatctagtttaagcctgataaattttactgacattttgaaagagtcagatttagattttcattgattttctctatatgtctgttttctagttaatcattttccactataatctatattatgtcctttctctgcttactgttggtttcatttgtttttctttttctaattcttttttttctgatatcctgacattctttacctcatattatttccacttccaataaaatatataattgagctgaattttgaaaaaatatagatacttcaggatacttctaaatagtgagtgagtgaaagtcattatttgccataacataacataacattcaattagttaatcaaaaacccaaatgcccgctaggtgcccaacactgttccaggcattcttcttctttatttttttttttttttcattttactttaagttccgggatacatgtgcagaacgtgcatgtttgttacacaggtatacatgtgccatggtggtttgctgaacctatcaacctgtcatctaggttttaagcaccacatgcattaggtatttgtcccaatgctctccctctccttgttccccaccccccgacaggccccagtatgtgatgttcccctccctgtgtatatgtgttctcattgctcaactcccgcttatgaatgagaacatgcggtgtttggttttctgttcctctcttagtttgctgagaatgaaggtttccagcttcatccatgtccctgcaaaggacatgaactcattcttttttatgactacatagtattccatggtttatatgtgccacattttctttatccagtctatcattgatgggcatttgggttggttccaagtctttgccattgaatacttaagtggaagttgaagtactggatttgaatcttttcttatcttttccagtctggtcgtgtagtgctactgcttcacatagtgttactactgtacctaaaactgatatattttatatattttattttcattttcattcagatcagaatgcttttaaatttctcttttgattttttccttcacttgttatatgaaattgtgctattttctaagtaatcaatgattttctagctatctttctgttaatttgattgctaatttaattttatcagaaattaatttcaaagtttttcgactctttacttacaaggcttaatagttttaatatattttattaaaatgcatataagtttgttgagagtggatacctaaaaaaaagtgaacttatcttggaatgctattaatgtctatctccttcaggttttgtctaagccatttaaaagttttaaagctttcttctttattcctagatatttgataatttatattattatttatatgatactagccctattgatatttgattattactatttaggggaattattttgattttattggtctaccttctatcacaatgagcttgattttttaagctaaatgcctggattatgtgtgtgtgtatgtatgtgtgtgtatatatgtgtgtgtgtgtgtatatatatacatactatatatattatatatgtatgtagtatatgtgcatgtatatattatgtatatatttatgttatatatatgtatatatgtatattatacatattagcatatacatacacagtatatacacatatatgtatatataattatatacacatatgtgtgtatgtatggatatatgtttttagctatttttattgcattttaattctatttaatgagtcactgagaacatattatctgctcttgagtgttgcaatttattaatgctttcattgtattctttacaaggtctatttttgttaagtttacttatgctataaaattatttttggttattttgggtaatgtacattaacatattgaatacaataatcaaatatttgtacacttctttattgattccttcataattattcagtcactgaaagaacaatgataaaaaaaactctcattacaatcccacctattatcacagatgtattcatttttacctataatttcatcagttgttatttataaatatataaaaaggctacatttttagatatatatatagatttatacttgttatattctattcatctatgtttaaatattgcatggaatttgactttatcctttatgatttgtatacttaagttctatttttaattatacagtggcttgaataggattctttgattttaattgtcttatttaaattgcaatgcttttatttttaaactttctttgttcttctgattgtatctcttatagatttcagaaacctagaatattttttcttatccaatctgaagttagtgccttgatataagtttaacttagttgtattagctttaatgacatttgtgttatgatttactacagcttttccattttatattcatttgtttatcacaattccatttatcctatgtttattcatatatatgtatatttatatatgggataaatggaattgcacacatatacatatatgtgtgaataaacatgggacaaatggaatgcgagtgcatatatacacgcactcatgcttatgtttctattttgctatttacttcctggaatcatcttggaatcctctggctcactgatatcacaacacccaaaacacatatcatattgatattatataaatttcttgattgtaataaacatactacaatcattttaaaactttgtttcttatttatgttgatggcattaatctttaacaaataatttagtgattattgttattcatatcccaaatatatgacatattgaaattattttttctttctatagtatattgtttattaacaaaagctgtccttgcatgacaaaggctgttttattttgtcattgcatatatctgccagtttgctggaaaaaattagactacaatattttctgtcaactattcaacaatattattcctttgacttctcacatctagagttgctgttgtgaaaaccaataagtatctaataattgttccttttaattgatataatttcctttttaagagaattcagaactttctgtatagtgtaactagaagttaattttaaaaattctatagtgcttagcagtctgaaaactttataaatctgatttataatataatcatattgactaggtattaaagttttatttttgttaactatattttcttttttctctcttattaattccatctatgtttctgtagatttgtattcatgtaagctttctttaattttaagtgcacatttatttctttcattatttcaactaccatattttatcatctagtatcaccaatgtattttatatttgcatttatatttgttcatactccgtttttgagttttatttatttgattatatttgtatgcttattttatattacattcatatttttcattaattctaatttgctactcttgttcagtatgctgtcctttatagttctttatgtcccttatatatccattttttttcctgtaagttcattttttttttttttttggaaccattatctacctcagatcataataacaaactgaggggagggagaaaaagactagtttctggtttataccttataaagcttttaggatgttagagagtgaggtaggggatgcctcaaagtacaaatctactgcttttatgatctggtctcatttgtccacacacctccttatattaaaatataacatgtccttttgaaaatgtttctatacctccacttaaggcctgcttaattctaagatttatgtttcaaagttaaaattactaaatccatacaatgaccatatgatcacagagggtcagaagcaattcaattcttgggagtgaaagcatcatatatacctgttgctcatccttcattccgtctgccctctagtgcaacattgtttttgttctcacttctcgatacaaagatcagctaatgttatttcagctccttagaatcagagtataatgtgcctactatgaaggagagaaatgtatttatatagaatagcttttcacattatattgttatagttaaactgcccccccaccacctttctccagtgcattttttttttctttctttctttcttttgtccacagcaggatctattccttttgcatttccaggaaattattaagattttaatattaatttctggcataaaaatattttttaatttgtgtaggtggcaggagaacagtagcctatatttattaatactcttgtcaagaaatagcagcttctcatgtacttctttttacatattttgttactcctgaatttttaatcttttggtttatgtttgtactgactagaatagaaggataatatttcatatgtgcagtatatatattatgtatatttatataagtatatatacacaattccctctaagatatgtacatatatatgtgtatagacataatacacacatacaatcatataatcttataaatattcacaatatgagactctgtgaaagaagttctttaaaatgctgatcttcaaataaaagattaatatataatctataagttgtgatctttattttggctatatatttgggacttcttatttataaattagcataattttattgatattatacaatttaagtgagtaaatgccagagtccaatcattgagctcgggatctatgcctaagtgtgattcttggccaagaagaacaattgatggttgactcagtcttatgcataaccctgagggaataaatctctttattggccttcctatataaatctttccatttatataacctttccataaaaataagctttatctttggtatattaaacacttatcttgttcattaattttttcattgaatcattgtttggaatgcttaaagcataacatttagtccagtaaatttgcttttacgccaaacctcaaacgtaatcagtgaaaatatattttatttcttatccaagtgtattatattactttggtatggctactataacagaatattatagattgggtaactgaaacaatagatattaagtttctgtcagttttggaggctggaagttcaagatcaaggtgctgacagggttggattcttctaaagcctctctctttggccaccttctctgtggatgcatgtggtctctcttctgcatgcacacgtgtccctagtgtctcatgtgtgtcctgatttcctcttataaagattcaagcttagttagattaaggtgcactgcgatggccttattttaacttaattacctgtttaaaggcatctatctccaaatacaagcacattctcaggtattgagggttaggacgtcaacaaatgaatttgagggggatacaatttagcccatagcaccaagaattctgctcagtaaatatttttcataacattagtgcagaaaaaaatataacattgtgtaataaaaaataaatactttcaaaaattatttaattctgtagaatagaatcccagagcaattcaatgaaaatgaaggaggctatcttttatttcttggtacaatagttaggaaatgttagtagaaagggtatttgatttgagaaaagatgataaaccttttatatatatatatatatatatattttttttttttttgagacatacagtggagtacagtggtgtgatgatagctcattgcagcctggatctcccaggcataagcaattctgtcatctcaacctcttgagtagctggactacaggcatacacctccactcctggctaatttttgtattttttatagagacagggtttcgccatgttgcccaagctggttccaaacaactgggctcaagtgattctcctgccttggcctcccaaagtgctgagattataggtgtgagtcattgcgcctggtccagcatactgtcatactgagataatgatccttattaagccccttgacccctacaagccctgtcattttttttcatggcatgtttatggaataatgttttgggagatcaaatgaattatatatttgcaagttctaatataataaaatcgcaaataatcatatcttattgtttgatattactatcataattatcatcatgttcgtgtaacatacatttgacaaaaaataaatgcatattttctgggtaattttaaatggaaataattaatattaattttgttgaagaactttatgagacccttttcagtaatttagaaatactcctaattctgtgaaaattaatgtatatttttaagaacctattatgtataaaaagctagattgggtgttgtgcatgatacaattgtaaacaaaacgtattccagtttttaagacaattgtttccagtaacagtaatataccaaattgaatatggatggttccttaaagataactctacatgaagtgtggttgtagcccatgagagtttgtagaaagtcatgattgtaactgttttgtgcagagtgagaagataagaaaatacattttgagaaggtaattgaaaaggagagaaatgggaggaaatgagacctatgtaagaaaattcatagtgtgagtttgagtgagaagtaattaggtcctgaaataaagtaaaatttgaaaactggataaaggaaagataaatgacataaatatttaaatgcagggtttgcaagctgttagaatattcttttcctgccaccttcactttgtgacagtactcattctaccttgcatcatcagcaataatagttgtattcttcttttgatcctgtatttatggaggtggcaatactacattttgttttcctcccaccaaatagcatgagaacaattacataaaccatttgtattaagcttgaagaattgaattgcattgaaacaatgcaattgttgaaacagatggaatcaaaaattttcatattagatgatagtggtggaggaaagtaaaaaagggtaatgccatttatataaatacaaattgcaaaaaagaaagttttcttaggaaagaggtttaattcactctgggctgggtctagtttaagaggctgggattaagtagatggcaatgttaaataaattattggacattttattgtcccttaggggaatacctctatccttcctaaatgtaggaaaaaatctccctacatttgaagtataagtaagggaaaggggttccattaacacattattattctagtttttaaactgatggtcttaccaaggtgaagttgataagaaaaggcaatggtagaatattaagaaaatcaaaagttagaaggcagggaaaaggaaaaacaacaacaacaacaacaaaattttaaagtagattagaaaggtggaaccagaaaagtaaagtgttttatgccaaggagatgggcagatgtcatgaagtctagctaaagaatgtgaggaaaccattggtctgtgactttaaagcttcagtgtacaaatagaaaggaacaacttgaaaggtcaagatagaaaaagacaagaaagagaaagcatgctttttagaaagaggacttggaagacacaaaacagcacatgaccaggcaacagaacagagagggtaaaaacagaatggagtagttttgagaatttacaagataggcataagctgtttgatggaaccaattttaatggcttcagcaaagttgaaagcaatgtcgcctgatgacagagaactagtaacaaagtatttcaatgataaagaaaagtaaaaaatattttatatggacacaccaagaggtaagcacaaattacaattaacaaagaagactcgtgtgacccatcattaataataaactctgggaatttaaagaattgaattctagaaggaattttgcctctaaaacatgagatgctaacactaagtgaacaatttaaggcttcacttttgtcttttccaactgtaaaatattttctaacagtatttatctgatcgaaataattttatgattcctaatgaatccatagcaaactcctagtgaatcatagtgactctcactgaaagtgagtgcttcaggactttgaaaaataatagttactatacagccatttataaccagaaccatgctattataatataaatctcaaggaaaaaacttcaaaatgttgtgttatacatattttgtaaataaataatatgtaatatacatgtatacacacatgtccatagttaaattatgtttaaagaacaaactttttagtgtcgttaagtaacagaagaacagatttagatcaaattacttaaaattaacatcaaaaagtattattggtataagttaattgaaataaatttgtacaaccagttattttgagaatgtatatctaagtatttattagattgttttttattatggttactagatggtttatgtagatatgtactttatgttttctgaacacataaattgaaaaataattgtcaggtacaactaatgaatccttttgattttgcattttgtggttctgtatcacagacttacttttgtttgctccattttgaatggtgccttactttattattattacaatgattatttcttgttgggcttttatataaatttcaagtttattcagtttctacttctagttgtttaaatttaagagattatttgcatttcctgaaactatagctctttaattctgtaacattacttgtcctggattattaaaatgcaggttcatatgacttccgttaaggttcttcatgcatctccacttctctctctgtgaaataccttcaacagaaactgttaaaaaggaagaacttctctttccccaagtggctgcagtaaagggaagtaatagactgacaaggcttttagatgtaagaaaatgtcttctggattaattactccctaaaactttatatacaaaaagtctttgatactctaagtttccttatcaaactaatgagtttactcttgcctatacctgtttccccatccttgattttacttttccaaactcttacggtgtaaactgcctaattttgctatgtatgagatacatggacacactcaacaactatactatattaggtagaaaatcatattattgtgtgtgagatgcatggtaaattgagtgtatgcagtcttctgggaaaaaccattaataagtattaccttgttaaaagattttagaaaccatgaaatacaaaagcagggcatgtgaatgtatttatgcttttaatgcttgagtgcaatatgtaactacagctttatgaaaacttaagcaacatgtatatatatacatatataaataataaactttattttagagcattttaaagttcacagcaatattgaacagaaagtagagaaagttacagtatactcaccagtcaacacacatgcgcaatctctcccactatcaatatgctgcaccagaatggttatatttgttactattgatggacttaacactggcacatgattatcacccaatgtccatagtttatattgtttcactcttgatattgtattttttgggttttgaaaaatgtctaatgatatttatctaccattatagtgtaatgcaaaataatttcactgccctaatcctgtgttctccctattcatcccgccctcctttcctcctcctcctcctccccccacttcttctttttcttttttcttttcttttgagacagagtctcactctgtcgcccaggctgaagtgcaatggtgcaatctaggctcactgcaacctccgcctcctgaattcaagcgattcttctgcctcagcctccccagtagctgggactacagtcatgtgccaccatgcccagctaatttttttgtattttttagtagaggctgggtttcaccatgttagccaggatggtcccgatctcctgacctcatgattctcccctctgcctccccaagtgctgggattacaggcgtgagacactgcaccgggccccctcccttcttcttaacccataacaatcacttttttttttttaatgactccatagttttgccttttccagaatatcatacagttagaattatacagtaagtagtctttcaagactggcttcttgcactgagtaatattaattttattttctttcatgtgttttctttcttgggtagagagttcatttctttttaataaatagtacttattccattgagttggtgtacctcagtttatttatccacccatctcatgaaaaacatcttggtggcttttaaatcttggcaattatgaataaagctgctgtaaacattcatgaataggattttgagtgaacctaagttttcaactcgttagggtgaatatcaagaaacatgattgctggattatatgagaagagtaagtttgattttataagaaactgtcaagctgcctgctaaagtgtcttctaaaatggcaccattttgcattcccactagcaatgagtgagagttcttgttgttccagattcttactaatgttagatgttgtcagtgttctggatgttagccattttaataggtatgtggtggaatcttaatgttgttttagtgtgcaattccttaatgatatatgatgctaaaaaattttcataagcttactttctatccatagctcttccttggtaaggtgtctgttttgatctctccatttttaaaatgcgttgttcataaattttaagagttctctgaatattttggttaatagttctttattggaaggttttttgcaaatatttttttcccagtctgtcatgtcttctcattctcttgacattgtcttttgcagagcaaggttttaaattttaacgaagtccagcctatgagttatttcttttttttttctttcttttccttttttttttttttttttttttttgaggcagagtctcactctgtcacccaggttggagtgcagtggcgcgatctcggctcactgtatgctccgcctcctgggttcacgccattctcctgcctcagcctctccgagtagctgggactgcaggcacctgccaccacgcccggctaattttttttgtatttttactagagacggggtttcaccatgttagccaggatggtctcaatctcctgacctcgtgatccacccgccttggcctcccaaagggctgggattaacaggcgtgagccaccacgccaggcccaagttatttcttttatggataatgcttttggtgttatatctaaaaagtcatccccatacccaaagttacctagattttctccattgctatcttctataatttgtataggttagtattttatatttcactctatgatccattttgtattattttttgtgaaacgtgtaaggtctgtgtctagattcatttttctttttttaaagtttttctagcactatttgctcctttgtattgccttttttcctccgtcaaagattaggtgactatatttatgttggcatacttctggtctatttattttgttctattgatcaacttatctattttttcaccaataccacactatgttgatcactgtaactttacagtaagtgttgacactgggtagtgtcagccctcttactttgttcttccctttttttatttgaattgagtattatgggccttttgcctctccatataaactttaggatcagtttgccacaatgcatataataatttgctaagattttggttagaattgtgttgactttatagataaagttgaaaaaaactgacaccttcacaatattgagtcttcctatccatgaacatgaatgtctccccatttatttgattcttttttttgaaatcattcatcagagtattatactttttctcaaatagaccttgtgcatattttgtgagatttatacctaagtatttcattttggagggtcctaatgcaaatagtaatgtgtttgtttttaatttcaaattacatttgctgctatataggaaagtaactatcatttgtatattaactttgaatcctaaaaccttgttctaattgtttattggttccaagagggggttgtaggtatgtggccttatttctggattctctgttctgttccattggtctatgtgtctgtttgtgtaccagtaccaccctgttttggttactgtagccttgtagtatagtttgaagtcagtaatgtaatacctctagctttgctctttttgcttaggagtgccttgactattcaagctctttttggttccatgtgaattttaaattttgtttttttctagttctgtgaagaatgttattagtagcttgatcagaagagcatgaatctgtaaattgctctgggcattatagccactttaatgatattgatttttcctatctatgagtatagaatgtttctttatttgtttgtgtcatctttgatttctttgaggagtgttttgaaattctcacggtaaagatcttttacctccctgatttgctgtatttctaaatattttattccttttgtggcagttgtgaatgggattgcattcctaatctggttcttaccttggctgttgcttgtgtataggaatgctagttattttcatatgttgtttttgtaactgaaaccttgctgaggttgtttaccaacttattgagcttttgggctgagaatgcagagctttctagatatagaatcatgtcatctacaaacagggatacttttaatccctctctttctacttgggtgtcgtttatttttttctcatgccacattgctcttgtcacgactttcaatactattttgaataggagtggtgagagagggcgtccttgccttgagccagttttcaaggggaatgcttccagctttttcctatttagtatgatgttggctgtgggtttgttagatagctcttattattttaaggtatgttgcttcaatatctaatttgttgagagtttttaacatgaaaagatgttgaatattattgaagccttttctgcatctattaagataatcatgtggttttgtctttagttatttttatatgatgaatcacattagttgatttgtgtatgctgaaccaaccttgaatcccagggaaaatgcctacttgattgtggtggatttgtttttgatgtgctgctagattcaatttactagtattttgttgaggattttgcatcagtgttcatcaaggatattgtcctaaagttttcttttttttgttgtacctctgccaggttttggtatcagaatgatgtcagcctcatagaataaggtagggaggagcgcttcctcctcaattttttgaaatagtttcagtaggaatggcaccagctcttctttgtacatctagtagaatttggttatgattctctctggtcctgggcttgttttttggttgacaggctacttattactgattaaattttggagttcattattgttcttttcagggaattaatttattcctggtttagtttttggaggttgtatgtgtccagtaatttattcattaatttaccaatttcttctagattttcacatgtgtgtgcaaggaggtgttcataatagtctttgatggttatttgtattcctgtggggtcagtggtaataatcccttcattatttctcattgtggctatttggatcatctctccttcttctttattagtctagctagtggtctatgtattaatttttttttcaaaaaacccactcctgccttcactgatcttttgaataggttttcatatctcagtttctttcagtgcaggtctgatttcggttatttcttgtcttttcctagcttttgtgcttggtttgttcttgcttctctagttcttttaattgtgatgttaggttgttaaattgagttctttctaacattttgatgtgggcatttagtgctataaatgtgtcccagaaattctgtgtcccagaaattctggcatgttatatctttgttctcattcatttcaaagaacttcttgatttctgccttagtttcattatttactgcaaagtcattcaggagcatgttgtttcatttccatctaattgtatggttttgagcaattttcttagtcttgaattctattttattgtgctgtggtccctgagagtggttggtatgacagggggttcttttgcatttgctgaggattgttttatatctgattatgtagttgattttagagtatatgacaagtgtagaagagaagaatgtatattctgttgttttggggtggagagttctttagatgtctatcagatccatttggtcaactgctgaatatctttcaagtcctgaatatctttgttaattttctgactcaatgatctgtctaatgctatcagtgaggtgttgaagtttcccactattattttgtgggaatctaagtctctttgaatgtctccaaaaacttgatttaggaatctgggtgctcctatgttgggtgcatgtatatttattatagttagttcttcttgtttaattgaaccctttactattatttaatgcccttcttttttttttatctttgttgatttaacgtctgttttgtttgaaattagaattataacccctgcatttttctttgtttctcttgcttggtagatttttctccatccctttattttgagccagttactgtgattgcatgtgaaatgggtttcctgaagacagcataccattggatcttgcttctttacccacttgccactctgtgccttttaactaaaggcatttagcccatttacattcaaggttagtattgatatgtgtggacacacacagtcctacaccagagccctgccctactgctaacactgctacgagtacagatgtgcaaacagttgctatcaggtcctttgccccccagatcatactgccactgttgctgcggccaacacctgtacagaggccagcaccctggcacccactagcaccccacagcagctaaatgcatgtactccaccgtgctgctgctgctactgcttctggcacatgcaaatgagtatggatcccactgccactgccctgcaaagtgctttggctggcaccacccttcagagtgttgtgaccagtggtccaggagcacttcaccgcctccagcacagcaggtccctaaccttgaggaaccagaaatcaaagctataacctaatatcaatggctccccaatcagatttagaaaatccagtccaggagtcctgatctgagccttggcacccttaaatcttccagtaatgaagccagttgactgaacccaccttatatcacaatcaaacccccaaggtcatcaaataggataaaagaaaaaaaatccaaagggcagcaactttaactactgaaggaacatcagcccacaaagatgagaaaaaaacagcacaagaactctgacaactcaaaaaactagagtgtgtttcctccaaatgactgcactagttgtccaacaaggattcttaactgggctgagattgctgaaatgacagaaatagaattcagagagtgaacaggaatgaagatcatcaaggttcaggtaaacattgaaaccgaatataaagaagcaaagtcaacattatagatgcggacagataaaatagccagtatagaaaaagaatataaccaatctgataaagctgaaaaacacactataataattttatattgcatttgcaagtattaacaccagaatagaccatgctgaggaaagaatctcagagcttgaagactgtttttctgaaataggagagtcagaaaagaattttaaaaaaagaatgaaccatgtcacatgtatacatatgtaactaacctgcacattgtgcacatgtaccctaaaacttaaagtataataataataatacaaaaaaaataaataaaaaaattcaaaaaaaatttaaaaaaaaatgaaaagggccaaacaaaacctccaaaaaatatgggattagataaggagactgaatctacaactcaatggtgtccctcaaagagacggggagaataaaagcaacttggaaaatatatttcaagatatgatccatgagaacttccctgatctagctcaagaggccaacaatcaaattcaggaaatgcagagaactcccacaaaatatttcacaagaagattatactcaagacacatcatcatcagattctccaaggtcaaaatgaaaaaataaatgttaaaagcagctatagagaaaggacaggtaacctacaaagggaagcccattagattagcagtggacacctcagcagaaactctatgagccagaagagattggggcctcatattcaacattcttaaagaaaagaactcccaaccaagagttccatatccagctaatctaagcttcgtaagcaaaggaaaaataagatcctttccagacaagcaagttctgagggaattcattacctctagacctgccttacaagagttcccgaaagaagcactaaatatggaaaggaaagacaattgctagtcactacaaaacacacttgtatatttagaccacacaaacaagttggcataataaacaactgaaaacatgatgacaataaaaccaccacacaagcaaggtggcaggagatggagagagtgaagggggaactgccaaacacttttaaaaccatcaggttttgtgagaactcactcactgtcatgagaacagcatggtggaaactgtccttatgatcccatcacctccccaccaggttcctcccttgacatcttgtgattacaattccagatgagacttgagtggggacataaagccaaaccatatcaattgcatatgatattcctaggtatagtttttttgtttggtttggtttgttatctgtcctgctttgtgttctctgtactttctggatatgtagtttgatatctgacattaacttgaggacaatgcccaggcattattgcctcatacactttttctgcccctttctgtctttcttctccttttgctattcttattctgtgtatattatatattttatagttttcccacagttcttagatattttgttctgatattattttcagtatatttctctctttatttttcagtttgagaattttccattgttgtattctcaagttcagagattctttcctcaggtgtgtcccgtctactactaaaaccatgaaagtctcattattcatttctttacaatgcctttgatctctagcatttctttattagaatttctatccctctgcttacattgtcaatctctttttgcttgttatttactttttccattaaaggccatagaaaaataatcatagtttttaggcgttcttggccggataattccaaacttactgccatatctgactcttgttctgacaattgttcagtctcttcaaacttgtgtttttgcattctagtatgccttgtaactttctgttggaaggcagacatgaggtactaaatgtaactgtagtaaataggctattaataatgtagtgggaagatataaggggagggtaacttttttccagtcctattattagatctcaggcttttggtgagcttctgcttctggtctacaatctcgcagatccctcctctgtttcaggtgaggcagaatgactggaaggaactggaattgtgtatttcccttctactccatggaagaatagacagagcttgagttgagtattttccttctcgccaaatatgttaggctctgatataacaccagcaatttaggctctggtaaaagaatttctcctgaggactggccttgttaaaaaggacagtaaatatatggtgaagtatttcaaaataggtcctgcaccatgactgggttcccctagagtttatcttttagtttccccccacttctggcacccagcaattcatcaattaattatcagcttaggattttccacctcagtgttacttgtccccattgaggtttctactcatggatatctgcttcagtaatttgtggttctctatatccacctatctggctctctaatgttggggacagcagtttgccctgtgacatctcttctctaaaaaatctaagaagcattgttgactcttcaatttgtttacctttttacttggtaagacataataaagacttttgagctccttaaatgctgggctggaagcagtatttttaaaaatggcactgttgctaggaaagaccaattaaatcttaatgtttaatgattgtagtaagaatgcagcttgttttctaaaagtaagcaacacaaaatattctgagacatgtcattttcttttgtttaaaataaatttttaaattatttttttctgcgaaggggtttgaaataatagttttgtattgtgttttcagttggctatataaacttttaaaaatagataaaatttgacttggctttatttaaatagatttttgttagtagcatttgctctggcaaatcagttggttatgctagcagttctgcttacttttatcaagtcaaaatgatgcatcagctgaaatttaaggctagagtcagtcaaactgccatctcaaaactagtctttaacatctggtttgataccttcttaacatggtatcttttagatggatggtgttacaggaaaatcctcatagcaaaggcagcattcctggacatctgcagcctttttagaatcaacagaaatgctctggtgaagtagctgtgacatttacctcagcaaatactgaaattatgctaactgtaaaatgcacttcctcttcctactgcaactgctcttttgggaaaatttactatcacaatggccccagactaacattcttactcagatgctcacattttatcctgagtgttcaaacacctctctgcctttccagaaaggaatgaaaggagtgcagttgtttttcacaggtgggcatttactcttcagctttcctaactgtatgaggtacaagctttctttgtgtcaatctatacatgagatttgtgtcagtcttttcagtttatcacttttcaaccagtttaggattatgagctttacttttacacacataccaaccaaggcaaaggaatattgggaatcacagcaagagcattgctctcttctaacaaatcatccttgacatatctactcttaatcttttaaaatcatctttatatatccctttttaaattaaccatctaactgcttctagatctcctactatgaaatgtctaatggttgtctatttcatatttacttagtgtattatgctcatgatttctttgcgcatcaattgaaatgtcaaatttatcatcatattacccatacagttgctaaaaacatttcagacagatgcagcatttttaaaaatattgttttctgctatataaataaagatgtttagttaaaaaagtcctctttaggttaaaaagactatattgtgtagaaataatgtagagtccttacaggaagtaaatgacattccacagagtaagtatctcagggtcctgtctttgatatgattgctaagaaaactcttagacctttcattctgaaattgtttttagaatacccttgcttatgacataagaattagttgctttatttatagtgttaaagaaaaaaaaatcagtgatacatgttaaaacattgtatggaagactttcttcaggacctttgctatagctttagggttcactgcaatgggatattgtagtagggaagagatattgggatcaactcagaatacatcatgggcaagtagaaatttatagccatggagcagagtgaggctcagtaggtgaaaaattagtaaaaggaaacatcagggtaaggagattctagctaaaccatcctaagaagattctgctgaagacaggccaaggtgatcagacatcccttgccggatgatgaagaatgaggaacccagtgagctattttgggtcattggacattaagaatgggagcttcttgctaaactgacttaacagggttctttgctaaaactggattttataaagaagttcatagatgtgcctaggtgaaggttcgaaagccttgggaaagtttgatcagagaatatttgtcaatagctattcctgcttttagaacaattacaaaaatagtatataacttatgcattattttacttaaaataccgtgacatttttcaaaaagaaagactatcctaatgtgagaattgttattaataaggatattccgaaggaacaatataacatctgaaggcaatttcaaaagaggaacttgaaacattcaagcaaatttaaaataaagtgactattttaaaaatggaacagcaatttatatgtacatatttgagaatattcatataaaaagaagttgttttaaattttcattctatagaaaactatgtgcttcctagacatggtcacaacactcatatgggaagtaaagatggtaagaaacattctaatgaaaatgataatgctttttatgaaaaatttcacattttatgttagctttctcaggaaggatagaaaatctgaatgataaagacaaatagttaaagtaaaagttcaaatactattgtattacagtctaagatgttgttattactggcattgattccctagttattaagtgtcagagtaaataaatctttgtttttataaaatccttataaggaaatgaaataaatgtgagtactgaatttttatttcatagaaaactgagggtaaactagttcctttatttttagtttatctgataatagacagttaaaataatattctttacaagataattatgtaaatatattacaaataaatcatctacattatgttgactgaactttagttttatttcagataatttttatatttaatactgttttcactaatgctattcaatagctttcaggtagtagtttgctaattaatatttgaagtaaaatattaaaacccattaataataatagaggtaatgtcctagagttttactgtttgttcttttagaggcttattagtattttttcagactcgtatattatattcagttttcagtttgcaccatattttcaggtgatgtttcttttatttaactaaattcatccatatctaattctcatacatttttagtcacagctgagctaccctgcttatgtattaagaaggttgaattataattatgatttctttaaagtgtccttgaaacttcacccagtctagaatgaattttgaattttaaaatgttagttttgtgagcgggtgtcacttttgttttaaatagtagcgtagacctttcttcacttgtttcaaacacaacgtggccaggatgctgatacattcggaaaaaaaaaaaactatggatataaatatgcaaaaattttatttttagaagggtagatttagatattaatataaataatttatattatttttaaacttcactggctctatgaagcatagttctcttggttcctaaaattcattctttttctttccttttaaatgagtctgtctatataacacacacatacacacacacacacacacacacaacatatatttatatataaaaatttaacaagtaacttatatacatataactgtgtagtatttcaaaacagagtccataaatcatgaaaaaaaaactccatacacagttgttaatgaattaaaaccatgagtcatttctcagtgaagtagttatttcttattctaaaatttgataaaattggctaaatacagacatacactcacaggtacacacatacattttctgtgactatactttgagagcctggtttcctagttacttttgcatactattgtaccttacattttggtaatccaaatgtgagtaagccatgattgtgccactgcattccagcccgtgtggcagagtgacggcatgtctctaaaaacaaacaaacaaacttatcttaatgcaaaagaaattggatacattttcatgattaatttgaatgtttccttcagctattctataataactttatgcaaagttcatactgtcagaattaagaaagatgtattattgattttttttctgaagatacatcttcaatattatattttttataatctagtgttccattgccattgtaccttcatcacttgattcagtcacttcattcatttcttcaaatatttatagagcaaatgggtagaaaactagctgtgcctgctagagctttggcatcagttattattttcttttttaatctttagcataatagagagccatgttttctatcttaagagtaacagagctttataagtgagttaataaagtaagagttgatatgatcaagattgagatttaggaaaatcatcctgtctcagtgtagtgaacagattgaaaaggacagtggtggatgtgagaagttgttagagtgttgcaagaatgcaggagtggttaagagaatggcatactggagagtggccaagtaacctgtgtccaaaaaaattaatttaaatttaaaatatatggtgatcattggcatattttctcagatttatttcactaaggaatctagtgggctaattagaaaataagggaatgaaattatgaataaaattctttgattaattctgttgtgaagggaagagagaaagtatggcaactactgtggaaagtatgttaactagaggaaagaaaaataagacctgaaaggcttgaacatgtttaaatgttgtcagtaaaaagggaggggtaaaaaaagaaagaaataattatataagattcctgtaagtaatgtaagaatgtgatggaatttaaagcagaaaatgaaggattcgctgtggcttgtagggtaacaaacagaaggagaagaggagagattttgacagatggtctttgacataagaaggttttggattgatttttgagtgtgtttccataaatggttttatttttctctgtaaagtaaaacccaggtcaactactaaaagtgagttgagtccacagaaagttttgagtgtcaggaaaggagcaatttgaaattgacgttgtagagaataagttgaaagagatactaagctttctgggcagggttgaacatgtgcttcagtttcactcttgttagtaccactttttccagcaatgctgtgctgcttcagattcagaagacattgatagttgagttactccagggctggggttgggttaaacagttcaaaggaaagagagagtttagtgagtttaagatattggcaaaagtaatattgagatttatatcatggaaaaatcatctgaacatggtataatataaaaaaggagaaaaatctaatgaattgtaagactgtaggtctttaatgcgcatgaggctccagtgggattggaaaatattaccggtaaagaaactgaataaacaaagtggggagaaaaaagagtctaaaatcatagagcaggaaagttgagtaattcattttgaaagtaaagtaaattcaggtgttgaaaatagtgttatgtgaccatgattggctgaagcactaaaaaaagtgttggtaatgattttgaatgactgacaagtcactctgagtcctgtgtgaagggcactctgtgtgaaggactctgagtgacttgtcagtttcaagctggtgaaagagaaacagaggtaggctggaaatgacttgtactgactttcaggaaataaatttacagaaattttatgatttggctgacataatacctgtagcttgaaatcattaatagtggatataaaatcagcaagtaccacaagtaaaaataaagcaaataaaaattggcaaacactacaaatcagggcaagtctcccttttccagagagacaactgttaaacatttactagttcatcactgaggagaagcaaacatctgtatccaggaaatgaatagaagactgtagtaaaataaatcaggtagtaatattgaatggttcgaaccttaaaagaacagggttttgtaccttcgcttcctttcaagaggagtgtggaatgtgtgatttagaagtaggaaagaaacaaggatacatttcccattcttgatgtatgtggagtgtgaaatacatttttcattaatgtattaaagctgtactcaaaattaaatagaatttaaaattatttatgtagagcaataatgtggctatccttctattttgctttaaagctgggtcaggtatatatacatatatttttcttattgaatgaagccatgaacagaatatgagaaaaataagtacaagtctagttattcttaattaaactgatttgatcattacaaattatatgactgtattaaattatcacatgtgccatgatatatatatatattatttataaataaaaataaaaaacaaaaataaataaatattaatggatatatagaccatctccactgaaaaatatcttggaatttatatagtctaatccgtttattccacaattgaacaaattgacttctagagagataaacttactcactacagatcatttagctttgtaatgttagagctgaaagtaatatgcctgtcttctaaactccagcatgataggaataatttcattgtatgcatctagtcattcatttatccatttttttctaatttattcaataagtatctattgatatctatgatatactagacactgttccagatacaagagctataaggataggggaaaatccttgcattaatggaggttttcttctagtaggaagagagagaaattgaacagataaataagtataaagaggaaatacataatatactacctagtcattaagaggtatgaatacaaataaaatagacggaggataaggtatatatatggtgagtcgagggttttaattttaaatagggtaaatattagaaattctctggaaaaaggaatgtatcagcaaacatcaagaggaagtggagaagcgaggcacatggatatgcagggaaaatgcattccagctagagaaaacagcatagtcaaagaccctctattaaattgtacccctaattaaaatgtgctgtaaattaatgattaatataatcatcaactactttatacatactcatattgtgatatgttttaattctcagtgtacttgtaatgcattataagactttaagctttgccaggacaggggtcatgttttgtttttggtaaatctacgcacacacagtgcgtggcatggttatttataccaagctggtggtcaatatatattagaatgatagatcaaatgattgaatgaataatctagtgaattattaaatagaataagttgagttttaaactaaaacttttgtgcctctaagtctcctcacctgaaaaggcctggcgttaagggccatgttggttaaagctcctacctcagcaaaagctcagggtgctttttctattcttgcttactagggtgattaaataacaatagaggggaaaacaagtttccttatccttaaaaaattaagaattattttaatggtaaaggcatatacatatacacttacatatatatatatatatatatatatatatatatatatatatatatgaagacagtaggtatatgctacagtcatctcatgtacaagtactgtgtttctcttttgattgattatgtaaaacaagcaacgagaataaattctgattatctttacagagctttatggactgtcaaaatggctttagatgagttttctcatttatttatcacaatacttccacgatattgttaaagaagctttttattacattaggtagggaaaagaaattatggcttatccaaggtccttcattgacccagtgtggtaaagtttcttaattgtatttcagtttgtccacatgacagtaaaatatattcttgatggctattatttataagaaaagaaaatatttgatcaggaaagttgaagacatctcatttaaaagataatatgcaatgaaccttcattatgagatacttggaatggtacacaatgaactatcaaatgctgtttcaactacctaaaaaggataactgtctttaactgcaccaaatgatactaaacttgctgcctatcctattatgcttagtcactctgatttcttttattcctctattaactcacactaacactgagaagagcaattctctctgtttcattgtccttcccttcaaatatcctgttttaagagattacagatgccttgagataacactgccagaattatcccaaggctgacaggtttactaacaactgaatgcttttcagatcactgcactggactcagatccacctttgatatgaaccacatatggcttcagtcttgtttccctgaattaactctaatttcctagtgaccaaggtcagatgagtccagatagggctcagctgttcttacctagcacatatgttccagtattgttggtaatttatttctgtaataaaaaattaaaatggaaatctcagccagaatctcttttaccaagggagaccttgctatgagcattagggcttattacatgtaactttttcataacaaaataagaattattattatagcactatagccaaatatttaagttagcattataaacaaaattggtcatgtaaaatttattgaaaaagaataatttgagttagtaccaaataccacaaaatttacattgttaattttaaaaagtcagaaattagtttgcttttagcaattttactgtattaatctatacaccaatgttaaactaattctgccagattatttaggaggtaaaacttttatttataaatgtctgtttattaattcaagagaaatagaatttgttaacaataaagtctttttcagattacttcaagatattttgggtgttgtaccacctgattaactttttaaggtgtctgagctgaagtcaacatttctaatattatgtataacaaaacatattacaatatagtattcaattttctttgcatggtggatgtgttgttgttatgacatttaaaacaaaattaatgttaaaggttttaaatttcattcatggagaaacctttcctgtagaacatacttaaaaagttaattctaaatccttgctttaggaggttacacaaatattgataatgttattttcttatcacttttagacagtcaggttcataaaagcaagttcaatgagcataagatggtttctaaattttaatttatttttgacagcaaacaaaatgaacaaaggtgaggaatccatttgtgtacctaagatatctttaaaaagaagatacctttatatttgtcaaatatgttgctcccagtaaaagaaaagaagatctatgcaagtggttcaagagtaaaccttaccttattagcttttcataatattttcgaagaaatttaaaacaaaattgcaaagcactattcttacactgatattttaccagttcactaaaacattcagaaaagaaatttaccctaaaatttgttagtcatttgagacttgcaaagagccaaataatttccaggttgcaaactttatttagtgttctagcagaaactaaactaaaatgtctataagttttaaattgttagatgtgtgtttaaaatattttaaatatttacattgtatgctctttttaatacacaaaatcatttggcaattgtgaattttaaaagggggtgtatttcttattcctttaaagtttatttttgacaaaaatacattattttgttgatgtttcacaatccatgaaaactgctattataagcagatagtgtcttctgaactgattttattggtttgtgctgatgtagaaaaaaacaaatcggcttacaagcctcggcatttttataaaataaacattgctaaacattgacatcccaaatccatctaatataacatagaaaaataagtttctttaaggaaaggaggaataaaatagaaatacattctagtatttttagtggcagataggataagtttagtgggaaaataagatgatttacgaaaacttaaaaatgcatttttcttacagtgctttttttaagatatgcatttcatgcaatatctctgagacattatttaattgattctcttggctttatctggctaattactctgtataatataactataaggataataattaagaaatcgttttttttatttttgtcaggtaagttataatctttttatgttttatgtaattaaaattcttttgcaaaatcatgatgccatgaattttatctattttcacttttttttaaggcaaggagctttggttctctcaactgtgtaggaaagaaaaatattttaactatttcttatcttttacttggctaccctcaaggtgagctctttatgatcctctaatttgttgttacctcaattatttgctaatagaaaattattttatgatgtgcttagcttactacctgtcttttattttatatatttctcttaggtactacattcttttggagagtatttcctaataaatttggcagcagctatggacagggcaaggatgtgtctcaattcctgagtctttcctggtgttctgtctcagtcttcactttctctcatcacagtggccagaggaccttcaaagactgtggacattttggctgatcagcttagtccttatgtttgattttaatcaggtcccttggcaatgatcagtatctacttcactgaaagacactagccattgttacaggtgatggagcaaaatgtatttacaggtggctccttcaacatgccggttgttttccacgtataatctttagtttatactgcaactttatatttcctttcttctatgtcaatttgcatacaactttcatattcaacatagaaatatttgattaatttcatttttacctcatcactgatcctaagtgcatttttattccttttctttaacttgtacagctcccatttattgatttttacgtttcaagttcctataatctatttaactttgagaatgttcaacaactttttgctttattaaaaataaatctagctaagtcttcttattttccccttacacaatatattttacagtggaagtatgaccccatgggtgtttaatataaatattttcaaaccagaggtcaagccaatggcagtgttctaaatcctcgtttattctactcaggacccaccttattaggaacattgccttattttttttcagcttcactgaggtacagttgacctcaataaaataataaaaactgtatatatttacagtgttggagagtctttcctaataaatttgacagcagctatgcacagagccaggctgagtctcaattcctgcgtctttcctggtatcttatctgtatctacatacatatatataaagttatcataatcagtttaattaacatatccattatcctgtatttttgtgtatgtggtgagaatatttaagatctattctcttagcaactttcaagtataaatttgcagtataattatgtgtagtcactatgttaaatgacataagctaggcacagaaaaacaaatgctgcatgatctcacttacacatggaatgtaaaacaagttgaactcatagaagcagggagtagaatagtagttaccaggggtttgaggggatgaaatggggagatgttagccaaaggaactttgcattattgattgttctttctttttctgacattttaaacctctcctttcttttgaaacatccgccattggcatttaaacatgctcaaatctcttcaatcttttaaaatcttacttaaaccaaaatattcttctatctgctattctggatctgctcatcttcagggttgtactttttattttattttttttttctttttggcacttactgctaccagtttactttcctcaaatcctttcttaatccactttgatgtgacttctaagagcttcactcccctcaattagcccttgctaaaataaccaagaaactctctgttgccatatccaaaggaaattattcagttttcattgtttgtagttttctagcaaaatcactacaagggaccacttcctcactcaactttctcttgccttaatttatgcagtacttagattttcttccttctctgtttactctttttacgtttcagcctcctatgccagctggtgaaattcaaaattccacaagccttaatcctaggactcatcttatcttcctctcctgtctttttccacatctatccacgacttggtcaattgtatctaatatggcattcaaaatctacatttttagctttgatatcccctctgaactccagacttaatgtctaacttcatattacagatccatttgaatgttcctcatgggtccccaactcactaggtataatctttctcccctaaaatttgatcttctttcagttttttcctctgtcagtaatgctcaagtgtaaaccagaaaccaaggacttgttcaacctaaacctcttctttttatatttcaataattaccaagtattatgcattacacacacacacacacacacacacacacacacacacacacacacacacacaccccctttgagtttctggatgtctttccatctccaacaccatttccagagtccaagtactgtttccttagactgatgctatgtgcttctaaatggtctttttacatccattgtagtcttagtgatctcttcaaaatgcaaatctgatttcatcatccatagacaatctgcttcataattgccttcacttctcactgctcctatgattaaggcatattttgttcttgcatgttaactatttatgaaacctggaccctggtcagtgtctaaaattgtgcctattacatgaaagtaattcaatacacatattttacttatttatttttattttaaaaatttttaataatttcaacttattttagattcaggagatacatgtgcagttttgttacatgggtacattatgtgatgctgaggtttgaggtacagttgatcatgtcacctaggtagtgagcatagtctgcaatatgttttcaaccgttgcccccatcatcttcctcccttggtaatcccccgtgtctattgttgctatctttatgtccgtgaatactcaatgtttagctctcatttatatctgagaacgtgcaatatttggttttctgttcctgtgttaattcacttaggataatggcctccatccagctgcatccatgttgctgtaaaggacatgattttgttcttttttatgactgtgtagtattctatggtgatacacgtattttaaataaaagagtaacttggctctgtgaaagcagaagttgcactgggaaaagttaaaccaacaaggaagacttttctattccaaaaaggaagagagagatcagaagtcaatctctgaactgggctgaaactctggagagttttaaaggatggtttgggagtttttaagggtgaaagagcttttaacaacaattgggtgggtatgggggattatgaccatatgtgtttgctaattgggattatccaagggaaatataaactttctcatatcttcgtcacagaaagtagttttacaacttggaagaagggaccctctgtctgaagttaggtttctacctttccacagagactggaagatagagatgcctccttccttgatgattacctttcaaagggttgggtccaggccctttagaaagacagtctggtgttgaaaaactgccaagagcctttcaaaaagatttacatttaaaagggacaaataaagaatttacaattacaagaattcggcagtaaattatctacgagaggggagggaaaataccttgatgcttaggctatctgaatcatataagggactgagtgagcttaagatggggcctggaggtcagaaggagcctgcctaaagtttaaaaagctgagggaaggcttcaggtcaccttcattactccttatttattttgctatcattttctagcactctgttccttagctcatggtgccccagccaaagaatactttcttcaattatccctcccatcgagttcatatccaaggtagcatctcttgagtgctttctctcatattagagagttcttgatgttgtaaatgcaagagaatgcattttgagtttttgttttgttgcatttgtaaaatatttcttaccactttgaggatcatttatgccattctgtttgctttagtctttatattttcagttggaggctctcctcaagtatctggttatccttggctgtttgatcatatttaatagattttaaaaggctcactgcaaactctaggtgcttactcaaagctgaaaaactgagtttcactgtggggtatatagtgggtaatttagttagaaaatccatgaaatgtatatttagatagagttggtgtagtgcactgattaagattatgaaacttgtaggaaatcttcccatgtttgagtcctggttttgccactaagtagccatataattttaggcaaatcattaacatcattgtgttttggttttcttgtttataaaaggggtacaaaaatacctacatatttttataaaaattaaaaattttagtatttgtaaataatttggaatagcatctagcacatgctaaaatttatatatgtgtaaacttttattattactattaatatttattttgcttgaaaaaaattctattattctttctggaggaagtatatgaatcaagacagacataaggctgactggtctcaacagtggttatggatttcaacttatttcttctggttttaatatggtcttccctggttcaactgtccagcatgctcttgcttcctctccagagaataaaacctctagtacctgcttgagtgggttgggggagtcatcatgctattcggagataggctgtaacaatgtaactgtttttaaaacatcccttcaataaattctactttttttaaacccatgtttattttggctttgaaagggatctagaactgactatctctggacatttgtggagtgagggtgtattctaaagttacctatttcctggtaggtgaccagcagataatcatatttcttaaactgagctttcatatttattatgagaactaaaacagtttgggtgacttttctatctaaatatattttgccattaaaataatagaaatgcttaaagaaatgaaaaatcagtgctggaaagtatttcaagaattttaagtgagtttatgttttgtaaaattcttgttacaccaattaactgttagtattgtagatcagatatttcaaatgtgaaataatatgatagttcttagtaatttaacatgaaactatatacatttgtaaaggatacagtagcaacatgtcttaaagttggttggttttcagttgtgattaaaaaaaaatgtttgatgtgtttatcacatggattacagtaaaatattcacaatgaatggatttgtgtactattataaaatataattatcttggccaggcatggtggctcatgcttgtaatcctagcactttgggaagatgaggcaggcatgttcagtgtttcactggggagcaaaggtttgcatttctacccggtcttagccctgattctgtccttgtctttatagagcactcattgtacctttttctttttcctagtaaatcataaggtacttatttccattttatcattgaaacagtgccaggatttttctctgtaatattgtgggcctgccttgtagtggaagtagtagtaatatcacatttatttccttgcacatgtagaaataaaagcacacttaaactgtaaaaaatattccatatctatttgcttgaaaagagttttaactttttatgataatacaagcagtatgatgaatatccttcctgtgtttgtaacttcaggattatttttggtatttgtataatataataattaaatgatgataagggtttcacagatgaactttcaaggagcagatgctaacgtttttcctgtttatgttttaccagggccttctgaacaaaacctattttcttcttttagtaataaaattctagtaaagccctcctgagaattttcagttggatataaacactattcaattgtattggtccaggaatctttagttatttagtaggcctgaataatagatttctgaagtccagcttaaagaagtactgaggtgatcaaattgtttctcagtggaaatgtagacatctttatttgtaacatccttatttgtaacacattctgctcgtctcttcaacccatacattttttgtgtatccctgggggttaatgtagcatctgtgttacgttaacccaagttgggggaaaacaaacaaactcttggagtcttacagtgtcaatctgagtgcagtatttctctcttccacgtttgttgtaaagaaatattgacaaatatgaaatactcaggtaagagacaagcacaaagaacttccttataaatcatttgttttctgttgtatgtatagctttcagtgatttactgggatgtgattttaaacatgaagatttttaaaaatatatttgttaaataaatctatactatacctagaaatatgacgagaaattgctatgagacagtcattatacagattcagacttttttggtatatatatatatatatatattccttaaaaattatattaagatggtacaagtaaagtaaatgtagttcattgtgtctaagcattataggagcacatggaaactaaagaataactttctcgtgaccaacttatatttattttcttcagaaatcaaaaatctccacgtatgacaaaatgtgggcctttatgagtagcagaaggcagtcagtgctggtcaaaagtaatgaagaaggaatccagcgagtcctcacctctgattatgctttcctaatggagtcaacaaccatcgagtttgttacccagcggaactgtaacctgacacagattggcggccttatagactctaaaggttatggcgttggcactcccatgggtaggttatatgtcagctctttgttctttgttcattaatctgagttgctgtaagacaggggaaaaatagtgtgtccacgtatgccattaggaattttgtttttaccaaatgcatcctgctacctctctgattgtataaaagcaggttatcattttggacatattcttctgaatagataagtcaaaaataggaaaaaataatttctatcaaaatggtcagtagatatttttactgtatcagtgttgaaaaacacacagtataacccagctaaccttctcttttcaatcttaaattcaaaaaatgttttatgagtacactaaagtttttgtaacaatttacttttttaaatttgtggcttacaaatatagtatttgacttagagagttaacgaaaataagtgaggcataaatggctctcatgaatattatcagaattgttttacttaaaagaaggtagaaatagaagactatttaccaatgacatatctagaatatttaacactaaggattatttttaacatcccccttctttcatatggcaaatcatttttagtcaaaataatcaaatgagataatgaattgtaatttccagaaaaccataataaaactcttgattatatatatacaaacatgtatgaatatgtatatgatggtgccgtaagtaaacacacacacacacacacacacacacacacatatatatataaaacattacagtacatgtgtacatgtagtggacagaataatggcttcccagagatgtccatgtcttaatccccagaacctttgaatatgttactttatagcaatatactttgaatatagcatatgctttgaatatgtatcatagcaaaagatactttgcagatgcgattaagttaaggatcttgagatggggagattttcctggattaaccaggtgcgtccaatgtaatcacaagagctcttgtaaaagggagagtgtagggttgagtcatagttacgatgtgattatgacagggatgtgaaagaagtagagagagggagagagaaagagaaagaagagagaggagagagatttgtagatattattttttggtattgaagatgtaagaagaagccatgagccaagaaatgccaggtgacctttagaagaaatacagtccttcagagacatcacttttaggacttctgacatatagaactgtgagataataaattttatattggtttaagtcactaagttgatggtaatattttagagtagcaacaggaaactaattgtacagagggaaaaaagtcatagcatattttaattacatcaatgtactttttgaaagaaaagggaaaacatattcatgatttatcacagtaatatctaataatgctgtacatgctttggacctttacttttgcaaatttgtcaatgacttggttaaaaccgatcattgatttctggcaactctgaaaagtctaggaagtccaataattttctaccaaaaaatttaatattaaataaataatattacatttggaaaatcatctgaaatgtattatggtttaaaaaaagctcgaattagttttgacaaaattttgagatactaattcttgcatttatgtagtagagtcataataaagaataattgtgcagtcattattgaaatgaaaaaaaacaaacgagttcttactcccaaaataggcaagtgtagctgagtccacataattgaggggttaatggtgtaattggaattgtccaattttatttccaggtagaatacaatacttattaaagaattaaatataaatatttgctaatttgaaaaagtcaataaaagctcagttgttaaaactcaacaataattgtttagaacttagaccaacaaaagatattttggaggaggaatattttatattttacatgttttagacttcccagtgcataatgatactggatgccactgtttttaaattctccacagaaaatataccccctttattacctgcaccagggaaaggcttcctcaagctttgtccctgttattccaatattatgtacaaattcaaaattgggcaattaattttaatatactataaatgtattaaaatgattgtgttttcacaattatattgctgagaaacatttttttacttctcaaaatgtgttaaattatacctttatcgccagtaaggctttggtttattgccctagctctgtgtgatgggagtgctcaaatcttggcattctgcatagttaggtcagttatggttctttccctcaataagaaatgcatactgaacccagaaacttcatgagttaatgcaccagttatttggaatttgtgatgcacaacttctttgataatttttgaaatatgttttttcctaggaaaaatcatatactcttaaaagaagaggctgataatgtgctatgaatatcatcatgcagtattctgcacactgatattctgaacttattcttgtcactactgtgctcttggacaagtaacttgaaatttatggcctctaattttttaaactagtaaaagaagaggattgtatatctcaggtccatttaaatgctaaataatttggcaaataatgtgcttgatagattctcagagtttcgtctaagttaggctagactacatggagaaatatggttagctgatgtcttagaatacattcaaaaaatcaggcacactcttaaagtagttatgagaggtggaagcaggggtctgttaggctgccattatcctatagtttcatttgggaagagctgaaataaattaacccatgttttagtatcatttctgaaaggagtgagactcatatattactaccattttctccgggtttgcatcgtctggatgagactcatatattgctatcactctctcctggtttccattgtctggataagggcagagatatttatttgtctctcttttgctgttcattgtttcagccactatcataatctgcatttctcaactgggaaattagcatttgccttttatgttaccattgctgaagcatactgaaaatgataatagtgtgttaatatatttacttacttacttactttaaaaattgtacttaattataaacaacaacaaaaaaaaggaattcattaaggtgtgaaaaatattccttgaggttcttgctctttctcagcaagagttaatgagaatagctatattcaaagcagagcaatatgggctaaggttctgaaaaactcagattacttccagaagttccccaggctttttaatttatatattcaggagctataatccatagtgaaaatttcacctttagtaatatcctatatgtgatcaaagaggggaacttccttttctttgcttttattattgctcagattttgaggtattttcaagaaagcctatgtggtttgatgaggagattaaaacgggaaatattatgagtctttttgagtgggaaatcagaaaaaaaattaaaaattgtgcatatatccacccctgccccattttcccccaaattcatatattatcttcttagcctgccatgcctccttctaattgattcatttaggggcctccccatcaccattcatcactctgagtgtgatcattactgcccaaagtgtgctgtgagatcgctgaatgactcagaataagctatttaattaaggaacctctgtttacacaaaaatagcttagtggagcaatcaacaatgatgtgaaagtaaatgctaaataagcttaagcaggtttaattaagtttggagtgacattaaattccttcatagttttcctgactgcagcaacgttattttaatgtggcatttactgtgtggtagatttttgaagttgcaggagaccttacttggtaagttaactgaacttcttatttcattcaaaacaatatttttaaaggctcggagtgagttaaaagcaaggagcaaaatcatagcagtttcattaaggaatgtctaaattgtgtgagcaggtgccgtcttgtctcttatttcaccataggtgataatctatttatctgaactgggaacatttctcctccttaatagcatttttggctgcattgcttctctcctgactgcctgtacttaaaagccttcttggtttctctttttcaaatgttgagtgcatattgcactttgaggactaggcagactcagcagtccgtgagctggtaggaaagcagcagtctagaaaaaattccattagggccagttggtattattttgctttgctttatgcaatttggtagaaatattatcaaatgactgaagggtctcattaagatgatttctatgtttagcaatgagttagtgtcctctttctttcatgtattagttcctcacaactttaacaacaagcattgtatgtggcagctgaaaaagggatggagggaattgtgctcatatttgtgcatattattaataatgtaattttctataatttcagttgtttctattttacttgtgggattaaatcaatagtgaattccagtcagtgagtgtataattatttaacagtgagtaactatttctgtgaacaaaacccaaaatgaattagtcatataatagagaattactgaaatacacactatacatgaagaatgtaaagataaagtggacatatttacaatgccctttaatatgaagattaaatttaaaaataattttagccatacacaaagctgttatatacattttctctcatatttactgatttaattagaaatattagggtatattttatttagtaattgactttaatgttacctttacaagctaatgctttaaaacaatattatctatgaatatcaaaaagcagtagtaccattaataatcctcaagtaacttttatcaaattataatgtacttacccataattagcctaaagtaaaaaatgtaacattgagtttttatggtagaagtacactactttgacatataaacaaaatgaaatttcctttttttacttctgttttctaatgttaaatgcttaagattcactctttatttttaaatttctcattatttggtgaggtaagagatgtagaattggtaccagtggaggtacgttgtttgtttgaggcagatgccaatgtttgtaaaaatagaaatcagtatgagaagaatgtcgttccctgttttattcaccatccatttctaaaattctcaatttatgatataataagtactgaaatattcatcattatagatgcataaaattgccagccttccgtttttcagctttactgaagtgaatgaatacatttgtcttcattagtttaacataatgcacaaaaattgatgcaaattattcatctttctgcaggtcagcccttccattaaaatgcattctattttccctttgcataagcagcacaattttaatatttgaagtgattttgcagggctaaatctagatctaataattttcagagactgaattaacaaataaactcaaattacacctgttcaagctgtacattcctggcatatttgttaagtctagattatatgtcactgaaaacataagcatctcaataagttatgcctgctccacagacatcattaacaggctgcatgctacaatctaggaggcttcaacagggaatttgatgaattgtgagcaccactgtgaacagccgtgattaatattgtaaatgttgaccaaatggtacccaaacaatgtagaaatggataattctcataaaacagagttctgacagattttatacacaaagattggatcatttaattcatttacttattagtccaagaccatggcttcaaattttactttagatcagttagccacagactgtcagactatgtcagatagttgtccttgggttagcagaggtgggtaagatcaatgaggagtcactcttattagaaaaaagctagtcaaatgtttgttctaaataccaaacccaaatgctttgcatttgctgaccctcatgtgacagacatattcatagcatgttgcatggagtctttggcctttgtagtcagatgacctgtgtgcaaattttagtttcacctggatgaaacctgaagaagttactgagtccctattacacttagtgtcctcatgtataagcagatataaccatgttcacataattggattgtgataaagattgagcatattatatttttagtacttgaatcagaataggtagcataaagaattttaaagaaatgttttgatcacttctaatacgaggttttagaaaattaaaaaaaaaaagtgttttgaagaaatgttctctaataattgaaagaatatgttagtggtctctatttatacatttttagaactgtcttgtctttgtatgtttagggatattaaatatatagccgagaaagcagagtattagtatgacccactgttaaccagctggaaacctgtttctaatgaaacctacctgggattttaccatcagccaatcagtatattgtaattagataactatcattttgtgggaagagagtgattgatatctactatataaagttaagaaaattcctatcataaggcattatctgaacaagcaaaatggttttccatttccaaacatgtcttgaacttttagtaacagagctcaaaatgtattaggagaagtatcatctctaaagacatgtttagtaaacaatctttttagtaaacagagctcaagatatactaggagaaaaatcatctccaaaggcctgtatattttctttacatttgaccaatctacaagaatttcattactctttctttcctgcttagctctgtaaaataatgaacataaaatataaacataaatcatctttcttttttagaagaaagataaggaaaaacaaatttgacataaaatagagaaaaatgcaatattggacataaacaaatacctgttattagtgcagggacttagatagctggagcttagtgagaccaaagcagacagaccaaattgcaaaagggacttcagcaatacttaaaggatgggtagttcactgtcttgaaaaagatatatttttttcttccaattttagggttcttaatgattaatcaggataatgatttaatataaaatggtccaactcttataattctttccttggaattttacattagatttggaaaaaagcataatagtaaggaaatcattgctgacataaccattcctaacactattctaatgattgctgatggcaaaatcataagaaaggtagggtttataggataaaattatttctattttcatacttagtgtcagagtttcatggtttaatactcaagaaatatgacagcaaatctatttcaccagtcacttttaactaatatatatgaaatatgtcagaaccagtaaaaatagttggctgtttcattacaggttgataacattttctttttcacaagttagaggatatacagaatattaataaaaggcaactgtctaatacatatactctataatttgaattcttcattgatacattttatatgccatatataagcatctccctttatgatcttaggtacctgaatattttcctgcatattctataaatattccttcaattagaatgcgtttatattatttaaaaaaattttttaaactaaacagttataatgtgtatatttatgacgtaaaagtgacattgtgatttatgaatacaataaggaatgattaaactaattagcatatcaatcacctcagatacttttttatggtgtgaacatttgaaatttattagaatttttgaaatgtacagtacactgttactaattatattcaccatgttgtgcaatagatttaaaaagaccctgttcctcttatctgagattttttaccctttgaccatcatctccccatttctctcaaccctccagcctctgctttctgtttctatcagttcaaatgtgttagatcccacatgtcagtgagaatatgtgatatccgtctttttgtgcctgacttctttcatttagcataatattctcttgtttcatctaggttgtcgcaaatgacagaatttcattattttttagggctgaatagtattccattgtgtgtatatgtactgcattttctttattctctgatccattataaatataaggttgatcctataacttggctattgtgaaaagtgctgcaatgagtaacggaatgtgcacatctctttgacaaactgatttcaaatcttttgagtaaatacatagaagtaaaattgatggatctttcccatgatggttgcactaattcacattcccaccaacagtatgcaagggtttccttttctccacatcctgatctgatggttttataaggagttttcacttttacttctttcacattctgtcttgccaccaccatgtaaaaagtgcttttcactttcctctgtgattgtgaggcctccctaaccacaaagagctgtgaggccattaagcctatttttcttcacagtctcaggtatatctttatcagcagcatgaaaatgggctcatacagaggaataccattgaaagaccttaattttatagaagtataagaaattcatgagcaaaaatgataaggatacaaaaagagtaatttcatctttaaaaatatatcaatccataacattttaatcaccaaatggtgtcagataaaagtgaaccaatctttctgatacctaataatcttttcacattgtgtatctgttcaatcagtaccttgctgaaaattttctagtggtgctctcgagctatcagataaaatactaactcctaacaatgtcatgcaatccctttcttttacctatcttaagattcctgtattagtctgttttcatgctgctgataaagacatacccaagacgggataaaaagaggtttaattggacttacatttccacatgattggggaggcctctgatttatggcgggaggtgaaagaattattacatgctggcagcaagagaaaaatgagaaaaatgcaaaagcagaaactcttgatgaaaccatcagatctcgtgagacttattcactaccacgagaacagtatggggaaccacccacatgattcaattgtctcccactggctccctcccacaatacatgggaattatgggagaacaattcaaaatgagatttgggtggggacacagagccaaaccatatcatttcctttctgaatttatcccctcttccctacatctaacctgataacaatacaaacaagttgggtttccttctgcctgagtttaccttttttcactcttcctccaattttctggttgaattctctcatccaaataaatttcttatgctgaccttttcatctctttacacacttttcctaggctgccacagaaatatatatgatctctctcttttggaaccatagcacattttcagatattcctatatagtatttggtatataatattacaatttttaaagtatctttttctccattaagatgataatatgagtgtcctaatggcaaggaccataaatgaatcaatttttacccatactgtctcactattgttgagtacataaatattacttagcgtagctgtgagatcctaagtatataatggtgaacaatataaccatgacccctgccctgctagagttctcagtgtaacaaagactacataaaatttagcaagtttttacaaataaacaaggtaatgtgttacagaattatgtgacagatgaaactataataaattagtcttcaggaaaggtaagcaaaaaagattacttctatttgataacaggcgtaagaatgataactcttcttttacttttgctacctttttcttacttctctctcttctctttccatctacattccagttttggaaaggtgtacatagaaaaggaaaaagatagtgagagcatctcaaatccattttgttcatttcttctagatttagaggataggatgaggtacaagatatcaggaccatggaagaatttagccaactataaatgacactgttcatgtagaaatgagagaagagaggttaaaaatcatctggtatcaagagaagaaaaaaaatgtactaaagacatacctaataaataattatctaataatgcaaagaacttttaaaacacaatcataataaacaaccccactaaaaaatggtccaaagatcttaacagacacctcatcaaaggaaatacacacataccaagagagcatatgacaagatgctccatatcatatgtcataaaagaaatgcaaattaaaataatgctttatttaaaaagcaatgaataaaaattgcaagagtaagttgttacctatcaataataaccttgaatgtaaattaattcttccatcaaaatacatacagtggctgcatgtatttttaaaaagatcaaattacatgttgcatataagagattctttttagctttaagagtattcataactgaaagtgaagtgatggaaaatgtattccatgcacatggtaaccaaaagtcagcagggatggctatacttagagttcaagtgaaaaacatttataggagacaaagaaggtcattatttaatgataaaggaggaaataaatcaagaggacataataattgtaaatatatatgcaccaaatattgattcacctgaatatataaagcaaatattaatggactgaaaaaagaaattaaaataatagtaaaaggcaccaataccccacttttattaataggtaaatcaaccagacagcaaattaacaagaaaatactgggcttgaactgcacttttgatattgttttgctctgtccccacccaaatctcatgtagaattgtaatccccacattttaaggagggacatggtgggaattaattggatcatgggggcagatttcccccatgctcttcttgtgatagtgagtgagtgctcacgagatctgatggttaaaaagtgtgacacttctccccacaacctgcacccactgccaccatgtgaagaaggtccttgcttccccttagtcttcttccatgattgtaagtttcctgaggcctcccagtcatgcttcctgtgaagccttcagaactatgagtcaattaaaactcttttcttcataaatttcccagtctcaagtggttctttatagcagtgtgcaaatggactattaaaactttatatggaatgaacctaacaaacatatatagaactttccattcaagaacagtagaatgtgctttcttctcaactgtccatgtaacattctccaagacagggcatagtttaggccatgaaacaaatcttaacaaattcaaaaaggttgaaattatgtatagtattgtttctgaccacaacagtatgaaactggaaatcaataacaagagaaatcttggaaaattaacaagtatgtagaaattaaacaacatgctcctgaacaactagtaggtcaaataaaaaatcaaaaggagtgttaaaaaatatattgaaacaaatgacagtagaaacataatatatcaaaacctacagaatgcagcaaaagcagttctataagggaactttatagcaacaaatgcctctacttaaaaagaacgaagatcccaaatagcctgacattatgcctcaaggagctagaaaaggaagaacaaactaaaccctaaagttagcagaagtaaataataaagatcagaacagaaatacatcaaacagagaatagaaaaaccataggaaaaaaacccaatagtcacttctttaaaaaaataaacaaaatagacaaaccttttactaggctaagggcaaaaagagaggcgactcaaaatcagaaagaaaaagaaggcattaaactgaaaactctaaagcattactgaaagagattgaagacacaataagtagaaagatatctatgttcatagattggaagaattaatattgttaaaaattttcttcctggccaggttcggtggcttatgcctgtaatctcagtactttgggaggccgagctggatggatcacaaggtcaggagttcgagaccagcctggccaacatggtgaaaccccatctctactaaaaatacaaaaaattagctgggcatggtggtgtgagcctgtaatcccagctactcaggagggtgaggcaggagaattgctttaacccaggaggcagaggttgcagtgagccaagatcacaccaatgcaccccagcctgggtggcagagcaagactccatctcaaagaaaaaagaaaaaaaaaatatttcttcctacccaaagctatctacagttttaatgtaaactctcttaaactttcattgtaatttctcataaaaaatagaaaagcaatcctatagattatgtgaaattacaaaaaggcctaatactcaaggcaataatgagcaaaataaaataaagctagaggcatcacaatatctgatttcaaattacactgcaaatcaatagtaatcaaaatagcatggtactgcccccctcccaagaaaaaaatagacatattgaccaatggaactgtatggagggtgcagaaatgaacccacactgtatggtcaattgtcaaaactatcaagaacacccaatggaaaaaaacagttcttcaatcaacggcgttgagaaaactggatatccacaagcagaagacgtaatttggtctttttctcacaacacatacaaaaatcaactcaaaatgcattaaagaattaaaagtaaggtcagaaattgtagaagtactagaagaaaacatagggcaaaaactatacaacattgagttgggcaatatttttttagatttgaacccaaaagtgcaggcaacaaaagcaaaaatagacaaatgggattacatcaaactaaaagtttctgcaaaggaaggaaaaaaaataatagtgcgaagggacaacctagagattgtgagaaaatatttgcaagccacacactcaataaggtgttaaatcaaaactatattaagaactcagacaactgaatagcaagaaaaaattatttaaatgagtaagggacctgaatagacatttctcaaaagaaaacatacaaatgactaacagatatatgaaaaataattcaccattgttaatcattggggaaatgcaaattaaaaccacagtgacatatcacctcacactagttagaatagctgtaacaaaaaagacataatgtattggagtaatgacaagctagaagaaatgtaatattattagtagtctacttcataaaaatattttcccagaaccaaagcgagcaactagtaccaaaccactacctaatgctaggtcatatacagcatgtaatataatataattacaatatctgaataactaatgaatataaaataaaagaaacaaatgtcctttcggaggtggccagagaggatatgtcatatgaaaaaaaagcaatacccagtaagccctttagacttttaacaaaatgtatgaaggatttgggttctattaaggaagaacaaaaagcatatttttattatttttttcaaaaattggtttcatcaattttagtatacagctatatttaaagtgttcttataactcttgtcccacaaaattatcttgcaaatagacttcaaagccagttgtggaactgtgttttaatacaagcagtgtgctgtgaattcttatgaagcatatggagcaatagatgaaaaagggaacctacaaaaaatacaaattggtaagctgtgagttcacaatatgtaagttcaaaggcagaaaggagagtacatagggtcagacagaaaaatctaatgaaggggcaacatattttccacagagagaacacatgtaataacaatagtaattgttatctaaggttatcttactttacaataagtattaatagtaattattgtttctaaagccatacaaattgaatttaaaagaaaagaatttatggggacattaataagcgagagggaaaaattcttccccgacaataaatttaaacattagaaacaagttttatttaattttttctgttctttcctttaatagatagatggaagcctttactttgctaatgtataatgtgaatttgcatgagatatatttgatatgtagtattaatcaagattatttgtacaagtaatcctttacaaatcaaacagatgtacatttaccaaaaacagaagtgcatgtgggaatagccagtttgggaaatactgttgtaaagagttttagaaggagatatattataaaaagcaagaatgattttgtttctgacccttgtaattgattaaagcatacagaagcttgatttgaaagtaaagaaacatttgaaaggctgaatgagaggtttccagaatgtaagataatgcaatttcagcatgttaaatataagatacattgatttcagtatatatttttaaatataggataatgtgatttcagtatattcattattggacaatttgctgtgcaacctttaaagaaaagttatttatcaatgaataagcctccctcagaattaaaagaaatgctgactgcatttactttattagtcctatattatctagacgtaatgaaataagataaagagaaaaatgttggcatgtaaaattgagagtttgtacagggtagtaaaagggctatagaagaaataaatcaatatattgtatataatagacttaaactttaaaattaagtatttagaactacgtgcacatttcattctacaagtaaggttcctagaatgatagagaggaaagaaaggaagaaggaaaaaagggggaagggaaagaatgatagagggggaagggagagaagagcacaggagggaagtggaagttagggaaggaaggggaagggaacaaaagaatacagggccccagcacggtggctcaggcctgtaatcccagcactttgggaggccaaggcgggtggatcacgaggtcaagagattgagaccatcctggccaacgtgatgaaaccccgtctccactaaaaatacaaaaattagctgggcgtagggtgcctgtaatcccagctgctcgggaggctgaggtaggagaatcacttgaaactgggaggcggaggttgcagtgagccaagatggcaccactgcactccagcgcctgggcgacaagagcaaaactcggtctaaaaaaaaaaaaaaaaaaacggaataagaaataaaaagagagtacaggaaaggcaaaaaaagaaaaagaaaaaggaaagggaacacagaggaatgaaaaagtagggagggaaaaaaggagaaaaggagggtagagggagaaagggagggagggaggacagaaggaaggaaggaagcaaggaaagaaataaagaagaaagataagaataactcaatttaataaacccagcaagttagctctgaaatatttggtgagatttgtgtttactgtttataataatcacagtttaatctcttaaggagttttaatctatgtcttgggagagattctcatgaaatcacaatattacataaaaatatttgattaaagtttaacataaaagggacatttagagacaataactctattgttgaggaagttctggatagatacatttgtagtttttatgtgcccatccatacgctgtcattgtatgtcacttgaaactgcctctatacctcctttgagggctcatttggagcatcaggtcttatacatctgacatatgaagaggtttcactatgtaataactgtatgtactatgactgcctgcttccctccctcccttccttccttccttccttccttccttccttccttccttccttccttccttccttccttccactctctgcaagctaggacttttttttacttggtaaaagggatcttttggcaacttgtaaaaagataatttacaaacatgagttccttactgtgaatatggagaatttgtttaaattatcaaagaaagtcccactgagagcagcgatatagaaagtaccaaagattagagattgaaatgaagattcaaggcctaatttggctttaaaagtgttgggtttatcctgaattttttaaaataatttatttgtcaatgttttaaatgtgtgaattttagacaaaatatttcatatgatctgacaaaaaagtgaaaatatatggtcaccctgtgaccatatagtctcacaaggttttagtaaaactgcaactgaaggccgtctattttgagtgttgcagttttccagatatttttgtctaccttcctccactcatttatggttgtctgtcctcctaacagtttgaaaattgactctaagttacaatgatgcatgttctaatagacacatttataatttccttagtgttttctaattaaagttagaggccccttgaaaacatatacatatttcttgaaggtgaccttacagtgtgactcctgagcttctctcagttgacattcagcaacatcagttctttgtttgccaacatacagattcatgtgggagtttgaacttgggaggaactgtctctatctacataattaatgagtgttcacttcattagagttaagtgcatggctgttcatgtcacagggagaatggaagattctttcgttctttggtctcaatgtgtccttgagatttttcatctagctgaaatttcagtccacatttgacttcagctggcatatttgtagaaatacttccaaaggagcatcaaattatgtatcaaataagtaataattcatttttaattacttgtccttttaaaaaatacttaaactagatcaatgatggaaggacaagtaaaacatgtcattgatttattggcattgattatattccttatattatttcatcttgtttaaaaccttaataagcccattaactttgtacatttgattcaaatcaaatatcatttaaacattcctatgttcataaaagcaagtgtgctgaggtttgctagcaatgggaaatttgtatattcacattcaatgctggaaataggaagttcagctggcgaaaagtcaagcggtgtctcacttgctgaaaagtaggttgcttttgtttatttgtgtcttattttgttcttgagaatgtaatggagaatatagtgtttgaagatactggaatagacatcccagtgcagttggtgcatatagtgagttggcaataatattatattctttcaatagttctcaaaatgagaaatgagctctcacaaaataaatacttaagtggattaagaattttctatatttgaaagtctactttccaagtaatcacccttcacaaatcttgcttataattatatttatataaaagaaattacagtctgggcaccttggctcatgcctgtaatcccagcactttacagggcaggtggattgcttgagctcaggaggtcaaggccagctgggcaacatggtgaaaccccctctgtactaaaaatacagatgaggtggcgggcacctgtcatcccagctactcaggatgctgaggcaggagaatcacttgagcctgggaggcagaggttgcagtgagccaagatcccaccactgcactccagcctgggtgaaagagcgagactctgtctacaaagacaaacaacaacaacaacaacacacacacacacacacacacatacatacacacacaaagaaaagaaattacaactttttgataaccaggtgtggccattttcacaaacactatcaacacaagatttgttgcatatactgtttctaattcaaagaaatttgataaactatcattctgtttaaaatggagatactcttccccattaagtaagcatttattttgcagggaaaatatatcattatcagaataaaattgatctttcaactggcaccatgctagatatagcaaattaataaatactgaatagtcaagcaaaatgaccttagtttatggtgttttattacatatcacagagactcaagcaccatgttattgctcttacgttatgttaaaatgcttttagtcagttattatgctcctcagaatatgcaaacatttgctgagagcctatgatttgaaaaatgattgagaattcagatggatggatgtttcattagtgttctttagtgtttatgctaatggatgtagatattcatctgcattagatattacataagtgatatttttgttaatttgttgaccagaaacatataaaaataatgaagcacatgcatctttctatatctgttagatggatggatggatggataaatggatggatggactgattggacagacagacagataatagatagcctccatacaaaaaagcttgtaatgtatttaggaaaatagaacatatctcaacaggtaaataataataccagggaacctaggctgaatgcccagtgagtgatcaagacagaaagtagtataagttgggctaatatattgaaatctgaagtggttaaggggcagaatttacactgcaccttcatgttagattagtattttaagaagagcacaggggagaaactgagaagcagaaattcccctaatatacttaagaattcttgcataatgaaaataaaatatttgagttctaattataggaatgggcaatgcccctatttaggaaggctgtaaaaaatgtagagaagccataaacttctacagcttttaagtagagaaaagatgatgttaaacaacttttcagttgagtttggtagatcttcatttgtccaactttttaaacaggttacttacattctatggttctcgtctttctacttttacattgcctactctcactaaaagagatgtatagatgtggacacatttaaatcaaaacaaaattacaggcaatgttgaatacaagctgaaatgtttaatatttttctggaagcaggaaaacactatgggtgaatttgtacacaaaaaatggaatgtgcagtatagtgtcttaggaaaaagatcacactttagaagcaggctatttctgggtgggggaaaggaataaaaccaatcccttggaacagatatagaaaaatgcatgtgcttcaatatttttatatgtttctggtcaatgaattagcagatattacttatcatgtaatatctaatgcagatgagtatgtacctccattagcataaacaatacgttttatttatattgttgcctccactggaaaaaaacaaaataaaaccttgtctcctataaaataaattgataaaggaacaacgccccaaatgtttacaatacgtggctgtatgccccttgatttataaagtaaatcaccataatgatttttaaattatctaagtccatacaacctgtgacttctgttatgcacatcacataacagatactagtgactgcccattatctgctaagtaaaagataccattgaatacagcttattagtaattattcccttaaattactgcatttaatctttggaaacaccaatttttcacaacttttctggtctaaaaatagagatagctgttttatcagtgctctggtttcagtgtagaataaattgtagatatgaatgaaacatctttgcactctatccgttttcctttgtggattctttcttactgttttacaatgctgtaagctgagtccaccttttaggagacatattctttcttaaaacaaaattcatttaattcctcaatatctagcaaggctatccattttaatgatcttgttaaacgtctatgtgttttttccagttgtttttctcttctgaaaaaacattggcacactttgaagcattttgaaaaatctctgccctcctctcatcttgctaacctttaattatgaaatttcaggttccttgaaatacttaacataacctctcctttcttaggttctccatatcgagacaaaattaccatagcaattcttcagctgcaagaggaaggcaaactgcatatgatgaaggagaaatggtggaggggcaatggttgcccagaagaggagagcaaagaggccagtgccctgggggttcagaatattggtggcatcttcattgttctggcagccggcttggtgctttcagtttttgtggcagtgggagaatttttatacaaatccaaaaaaaacgctcaattggaaaaggtaaatgttacttgtttcagtttaaatttaaaacaatttttgttgttacaataaaacacaaaccaaaagagtttttatgttaccaactaatgataatgcatagaactattgctctaaattgtcttatgtcattcattacataacaaaatattatattttgtgaaatttcacagaaagactcatggtcacctttatgattttttatttaattttaatatgtttaattgtagccagcttcaggaaaaatagctatttctactcttattacagacttaaaaaataaacttttgttgtttgaatttcatcgtggtatatgatgagatacagttaattaagtgagtaaaaattagaaactaatatgaaagaaaaaatactctgcagattaaaaatgaggttttatatacaatatgggttaacagtttcaagttagagagtaagtttttatctgaatagctttagtccaataaatttctagtttaagaaagatattagctttcactggagaaattacagttaattttctacattaatgagtgtgtgaaaatagtatagtttctttttgccatttaatagtattcttaatcagttctttgtttttttgtaccagagtccttctaaaaatatgtataaacttcaaaaatattgaggctattgctatattttgcatttgaatgcagtcatttgtataaatgctttttgtattatccttgaaaagtttgtcacctcattcagattctatatttctagtgctataatttcctcatttttataaatatgatgaagactaggaaaataactctttcagatgctacatgatactttttgtatgcaaattcattgctctggatatgacaaaaccaacagtttaaagtcttctagtacattatttaatcttttgtatgtaaacatctcttttgtttttgaagaaactcacaatattttagacttaactttaaccactgtggcagagtgagatgatataatctttaatatttaagaggtttatgaactttagttggtaaatacaaagagcgaaaaagaggtattttgaaaataatgccatacaggaataccaggtaaatattttttctaatattctttgaagtgtttgtacctttagaaatatttttgaaaataaaaatgctcctttatctctaataacttatgtcataattatttatccttcctggaatcagaattttggatacagtatttgtacatttttgcttgattacagtacttgacactgaggaatgttatcataaatgtatatttttataaccccattttgtctatgactgaaataacaaattaaagtttttgaagaattcagaaaataacatgatttgttttcacaacacattcaggttgttatttatgcttgcttggctaactcaaatattggttgcatttgtgtgtctaagtacactttttatgttataatcatttttaaagtgtcaaaatgaactttgaaactaaatctaaagagctaaccaaagaagaaatattaactcattaattatcatttcaggtttaatttgtcagtaaatgtggtatttaaggcattaatgtgtaatataagaatgaaaatcatagaataaatatgggttttctacttggaacctcaaataatccatatgtaataattttctttaagttatagctcagtattaaagtaaaacgaattagtctcttgatgatatgtggtattctattgtgcttacctctatgtgtcccattcatttgatttagctaggccgtatctttagtgcagttttgttttacaagtatctggttaaaacaaaaacaaatgatgcgaggatttaattttgtaacgtatcgtgcttcattgttattacgaacacgtttagttgaatttttcagatattacccagatctcttgacattctatggatctatatgatcctctaaaaattagaaaaataaaattaatgtaccttttcaaacggaaacaatgaagcattaacattgcactagaaagaaataactgagtggatattacatgagcattatagtcacttcacaatgctttgcacactgtttctacatagctgccacaaagaaatccaaattccttaggttagcagatgagaccctttcacacctgtccctgtccactgctgtagctttatcttttgctcctctccaatttgcacctttactacagccacactacattttaactctcaatttcccaagtttatactctcccttttgactggagtaaatcttgtctattattttaccttgcaaactctcacaaacattttatattaggcacttaaaatgagacattaacttgcccagaaagctttccctaatcaaaaggtataatgggtttgggcacagagcatagcttgtttctaagaagtggaagtagattttcatttcctattgcaatgaaaaaaaatgtgactcatatatctcatctttatacttagtttatttcaggtactgtcataatctaaaaacatgtatctccttttgagaaagctgggaaggtattttgctcatttcaaaccattttcagcattaagtctagatatcttcacgctgcgaacccctaagcacatctccattatcccattaacagtattgtattcttgtttgttggcttctgtgtatgggtgccttttcacatattaaattcttcttgctgttaggacaaatacctagtattttttgtttgtatctccaaggcctcaattagtgcctggtggcataatatctatctacctatctatctatttgtctatctatttacctacctacctatctacctatcatttaaattaagaatgaagttgattgcagtaactttttaagaaaagtatcataaagaaacaaattatttttctatacaattcaaaatagtaaattaaataattatggatttaatggaaatgattcattttatttattctgataaattaggttcttgggctcagttcttcatttttcttaagaaaatttaggttggtctatatgatctatatggctgtttaacacattacttaatttattaaaattagccatacgatagtcctagattttatcatacatttgagaacatacagaaattcagtttacttttacttatcataattgtgtctttaacctagatgtcttatatttcaaaaataaggtaaacacttgtgagatccattatttactcaataaatatttattgataaataagtctacaatgaattgtgttttgcccattgaaggaaagcacgaatgtattggtgactaaatagtttgtcagatatgtcagatataatatatatgaagtttagctgaatgtgaactttgtgaataaaatttataaataatgaatatctttccatattaagtcttacttttaatgatgataaaattataatatattaatttatgggtgaaaataaaatgccttttataatacatattgtaaatactagtgaaaacaaatagctcttgataatgataggctttctcataagttgttggataaagattaatatgcaaagtttcacatttttaaatgagggcaggttaaaaataaaaacagaaaataaagctgaaatatgtggaccttcaagcatttaaaaatggaaattgcattcctttcagataaccacaagatggtgtatcataatttttataaaaaatggctttaattgtgatgtaaatattaatgcctcaaggacacattgctttttatttattcaaacttttaaaatactcagaaccttttctcatctgaatgtgtctgaaaaggtaactaatcaacacatgcattttataattatttttctttttgccttatctcttctgtgattttaaagatatttctactgaagtttcactgagaaagcaatccaagaaactgttgtgtatctgagacaattatcacactttgggtgtatggatttggttgaaagatcttgtgtccctcttctaagacttacttttggctataacaagctgcttaatatactgaattttgttgttttctctgataatatttataatatgttggctttgtaagcaagaattataagatataataattttaatttttataaactttttataacatggattgtttaaaattctgcatttcttaaatatttgcatatgtctacttttaacagacatacataatttttctttttttaggttttcagcaagaacagcaacataacttctatagtttgatctctttttgtgtgttttgtatatagaaagaatatttttcccatgtatttgaaaatgtatttgcttatacaaattgtttttattgaactgtctggatataaattattgagtttcctgacataaaaaaaatcttaagatgaagccaaaagcactccatttcttattaagtgtaaattaagtaaatatgtctaagaaataaaatatatatatatataaattattgctcagatactgaatttgtgcaataggtgtcccatcttgaacacacatttttgttgtctttaaaatggttaaaatgtatttttaaatctatgtggtattgttgtttttttaggacatagtctactttggtcaatgtagctgtttctattatagaacactggcaaattttacctaagacaatctctaaataattatatttttttctggtgcactgatagttcaaaaacattttgtgagggaacatagaatgttcttcagtgtttagaggaataaccaatttggaatacagctataaatcagagtagtagaagcacaaatgaacaaaacatttcaatttgggggatgataagaagaaaatcagagggtttagtttaaacacgcaagactagggatcctattttaaaggtcatttataaggaaaacacgtagcaaagccaactaattctgtatttcatggaaacagaagaatgaaaacaggttgtttacagatagctacgtataagctgctgttaaaattttaaataattagttctaacaggagcaatgctttttagaagaatatacttttggggtaaggtataggaatgcaaacagtgttataaattatcagtaaaaatgttatgtcaatatttatgttttgcccagtaatgcctttttagaaactataagatatctatactttttattaattacatttgatgtaagaaattttagctgaacttaattttacagaagttaaaatttctaagtaaattttcagtgtaaaaattatagctgtaaagcataattatataataatatcatattactttttcttaaaatgcgtttcacagctatattgactaaagttgtgttgattcttgtcagaccttatgtattaattttttaacttgttcttcacaagttaaaaagtataaataaactttggacaaatgtcaatttttttattgtttttatatcactgcctttctttgagagctgagtgtctttcaatttccatgaatgatctatataatgactaattggatgaatttttaaaatgtcttgatatacaaatataaaatactgtactttgaaatgaggtgtcaatcttcattttgcttactgatctacttccaaatcagctaaaggatttttaggtcatttgtttatgataacccatactctttgtatccccacaaataattatttttaattaaaataatagcttaatagataattttaccaccttatttttataaatgactttagtttttaaagtgtaataccacatttgaatacaaaactaccctaagagccatgtaaatattatcatctatatagtacagatgaggataataagtatctcaagggtgaagttgttttccaagttcaaagatgcctagtctaacagtgtttcaaccatatcaagctgtacagaatggaggcagaatatttaactattcttcctccttgaatttttcactaaggaaatatatggattaggagtttgaattagataaacagattatgggctttggtcataagcagcctaataatttcaccttcctagatagtaagcatgagttatggaattaaaaagacttggaaacataactttgtttaaccttagataaaattacttagcctctctattcttctttttaaataaataaataaatgaaacaatgaataaacaagttatgaatccataaaaacggtgttttaagaattaattaagatagttaatatacatagagggcttctttgcacataactggcttataacaagcagctcttttaaaaataatatcattattattatttgtaaagctgatacattttaactgccacaccttatgaaaagaaagttttctagcttaagcattagttatttggatgtaactcttaaaaaaaatcgtatcattatgactactagcaaaaatgtgatgattagtattattttttctaaaaatgcatttcacagctatattgattaaagttgtgttgtcagaccttatttttttttttaactagcttaagtaggggaaatttaaaagtgtataatgatcctcaatttttctccatcccattgtgtttgcaaaatacaatatgaggatattgggtaactgtttctgttagagtaaaggtttctgagaatattttaatatttgataatgtttatcattgtgaaataatccaggctaaagcataacatgatttataatttaattcactaagaaagatatgtatttcttttgccctcataatttttttctgtctgctgtataatttagtattcaaaaaatttacatttagcaagaatagagtccaggtaaaaagctcagctgagaatgaaatcatcattaataaggcaggctaatatgataaagctttcatagatggaagttaagataatagagttcctgtcttagctctgagactagttagatatataacttgacttcttaagttttaattttttctagctataaaactacagtgatcagtaggatcacgaaagatgctacatgtaaagtttcttttgactgctgaatagcttatgtaaataataaaacttttttttaaagatagctgctctaaaaccaaatatcaagaacaaggttgtatatatttttttaacatgagtgatttagccagtcattttccatctttcattgcttcactgttatattcatatagccttaggtcaattcatacttctgatgtatagcattaactgtttgatgtttttaaaaggctgccaatcaaaacagttatattcacaagaaaaaatttaacgggtcacattaaatgacatttatttttgttatttaacacaccaatattatgtaaaatattatatcttatatcctatgaatattttttccattttagttattattattatctaatgtggtagaataattttctgcaactaatcacagtgactgttttgatttgtttccactacatgtgacttactattcttgggcaaatggcctatagagtcagaaattaattggagagtgtctaagaatatatagtatatccataattagttaacaaataatttaaatgacaaacacaaaataaaagtttggttgatatgtactagaatatattagaccactgaggtacaatagtatcttatagataccattgataggagtagctcaaattttggtaggctccaagtaggataagtagaaattgtatgtagaaatggttaggaattattctgaatgaatactaaaatatcatttagttattttatactatcaaaattaggccagcgagatacacaaaataggatttcctccttaaaaataaatactaaatgcaggcttgaaagtaacatattttatgatatttcttgaccaatgaatacatatattcaaaaagagagtgatgagcataaaagttaaatcatgctggttatttttcttcagatactgtttttcaaaaataagtatattgctaaacataatggttttaactttaaaatgaagctacatatgtcaattatcaatgtggagcatgatttcaactacacttctaatataaaaagaaatctgtgcttctccaaatgctgtcacatcatgttattataaaaatatatcttttaattaggaagttaagcttttaagaataaatattctgtaacatcaacaatgatattcttgaaaacatttacctgtggactatttatgtattttcttattacatccaaaatacaaaatagagctctttaaaaaaaaaaagctctataaaaaagcaatgtaaatatggccaagttcatactatcaagatttccagatctacattgtttcaagaattagagatgtgtaaatataaattgactaattaaatataatgaattttattaagagttttactaatttaaatgcaattatacatgctaacagctcaaagatttaaattttcattttcaggaatcttctatttggttagtgccaccataccatccagacactgtttagtaatcttttgaaacttactaaaagaggtttttaataatggttagtatccttgtgcctttcttttttctttttgtagtctgttatattaatgtggagaaacatttttattgttgttttcatcctaaggaactgaccttatttaatgacacagtgcgtgggtttccacccctaaatagtgattttaaaagcaagatagttgtctttctctttcttcttccctccagctttccctttcttcttctcctccttctcctccctctccttctccttctcttctccttctcctccttctcctctccttctcctcctccttcctttcctttcctttctttcctttcctctttccttccttccttctttctttctttctttctttcctttctctctctctctctccctccctcctttctttctttctctctttctctgtccatctttctttctctctttccctctctctctttctttctccacttcttttcttctttcttctttttttagtataaccaggaaaattactgcctagtgcacttgggttttgagacttatttcatagtccaataaaaagatttaaaataaatttcaatcattatataaagtataaaagacaatttgtctctacttaatgataatacgttagaattttacttaaaagttagacacagtaaattttgggcaatgtacagcacagggaaacaattatatttcacaaaactctgtatagtttcagctttagagacttatataaatcaagatatggaatttgccttgtaaacctttaaacaaaaagaaaagaatgtatatttgctctagtaccataaatgaacagttctttgtgatatccttgaatttgtttaatttgccatgttaattgtaaaatcttgctcaaatctaaagattatcaagttttaaaatgggttagaattattctacaaatgagaaaagaacctatcgtctcacagtaactttatcaataacctaaataaacctatttttcatgtaaacttacattgataaataacaaaagagctggcaaaattcatcttattcaaagagaaaattaataaaatttgtattttgtcattatgtaatcgagaccattgattgacttatgaaagattgcttgattaaatttttactttctaatggctttgtaagctaaataaagtctatgacgacaatggtgatttacatgtttacaattttgagatagttgtaaaatttgtaaatataatttatttaagacaatttcaaattataaaagataatactattctggtaattgattagaatgggcttttttcaatttacattatctattactcagcaatataaacttaatattatatgaaattgcttaaaatggttttaaatgttcttatttgtagtctgaagtaagtatggggtactaaacacagagtttacctcttaaattgctagaaataatattgagtcatttcatagttgagcttgtatgcacatgtgtaagattttttcctaagaaagttagttacttagcctactcccttactataggcaaattattaattaacatttatactctattctgttttgaaagtaatgtaaccaaaatatctgaaaattgagattgccaagaagaaggtgtcataaatttttgaagatttgggaaatttattggttttaaatgaaggtttatttcaaacgattcaatgttacacgtcctataacaattttaaatgtcaacgggatcaagttttgaccatgttatgtcatctaattaattcttctgttaaatgtttcaacagagagccaagactaagttacctcaagactatgtattcctccctattttggagtcagtttccatttctacagtgttgtcatcatcaccatcttcatcatcattatcatcatgttcttaataagtacatctaatagtaggtattaagcaacaagaaacactgtttccatatactggctgtcaggtgccacataaatcctttaatagaaatataattcatgaattgcagaactgcataatttaacacataatacataatgcatggcaatgactctgtagttaatggggaattcacaagtcacatttaatcatcacccattacaagtgctaatatattaatatttttattaatttaatgttattaaacaaatgctaaagttttgcctaattttattaggcaaaattaattgtatgcaatatattttcactaggtttctaaacctgaaaattttttaagcaattgaattagaaacattgttaaataagaattaaaatattagagtcctgtgtatctattgttaattcaatcaacatttaaagagcttatgtgtgtacaagcagtgccgtgagaacttgacctctgctctacacaattcagggagagagatacatagagcactggcaggccagacagaaaaacaggataatgagtggaaaatactgacagaataaaacaaaatcaagttgtgaaaacaaaagaatgtgcctggtcaagtggaaagggcttcctaattaagttaaaacttgagccatgtcctgaggtaggggataaagttgggatgatgtgaaagatgaaagaactcagcagggtaccagaacaaggagaaacaaaggaaaaatattaatggaagtcccaccaataaagggagtgtgaggagaaagagagagagatggaagcagtggggaagggagaagagggctagatcagagaagtcatgatggaaaaaaataatagatttgagtttgacttgtttcctaaaggagaaaatgctattaataattgatattttaaaaatagattatccgggtaattgtgaacctttacagaagagtggcgtagacgtagaattaggaagaccattaaggaaactctttaaggagtccatcaaaggaaaattaggatatagccagagattgacaggaaggtaatagagcagtgtcaaaatcataaaactagatatatcaggatatgttgctggaatcttaggtgtgaactgtagaaagttatccaacctctctctgaatcagttttctctgacacacagatacctaattaattcaaagtatgtttagactggcacaaactgttatgaaaacaattttttaaatgtatttttaagttaacatataaaattgtatgtatatatcatatataacgtgttttgatgtatatatacattgtggaatggttagatatgtctaattagcaaatgcattacctcacatatttattatttttgcaatgagaacacttattcactcttttagcacttttcaataatatattattattaactatagtggccatgctgtggaacagagctcttgaaatttttcttcctgcctaactgtaaatatgtatcggaaaatgacacacatatggtcttaaatattttcatcatgttgtcttagaaatagtctaagttcataatcaataaagcagctaacgcacaaataagtcttcacatgtatctcaatcagttggggagagacactaacaaaattttgtttcatatatatgactctacaatataaattttgaggagctgtaacaataagccccagataaacagaggttctagcaaatctatttccaatgagatgggaactaagacaaaagcaacatagggtcatattttttctcatttgataaattatcagctctcagttatcaagctaatgatgacaaaaaagttaatatttgtttgtagatgtctaacatgctataatttgtcatttcatgattaagtcatatttgtttgtaatcactgtcaatgtttctataggcataatcacaaaaaagacataatgaaatgccagaaattgttttccatattttatgtctgtgtgagtgctatctttgttttgagatgtacaatgaagaatcaatgttcaaacaacatttgcatatctcatcttgtgatctgaaaagtagtatgatttgtctatttttttgtatcaagaatgggtttctggtatagaattgtcattgtatttaaattttaaagtagatgtctatgtcatgctaatcatttttatataatgtcataggaaaattttatttaatatatgtgtaatatatacattactagctggttgttcatttcagtatcgggtggagattttctttaaactagcccacttttatagaatattttaattatcatgggttgagtgtttaaagtgtgacatttgttataacttttacaatgaaaattttcaaaccttcaaggatgttatgtgacaagtctgttgaggatgattttaatattgatcttggacagttacagtttatgtatcttgtaatatttaatttttctgtgttcttctgtagaggtccttctgtagtgccatggtagaagaattgaggatgtccctgaagtgccagcgtcggttaaaacataagccacaggccccagttattgtgaaaacagaagaagttatcaacatgcacacatttaacgacagaaggttgccaggtaaagaaaccatggcataaagctgggaggccaaacacccaagcacaaactgtcgtctttttccaaacaatttagccagaatgtttcctgtggaaatatgcaacctgtgcaaaataaaatgagttacctcatgccgctgtgtctatgaactagagactctgtgatctaagcagttgcaatgatcagacttgatttacaagcatcatggatcaaccaagttacacggggttacactgttaatcatgggttcctcccttcttctgagtgaatgttaacatgcgcattttgtggctgatttcaaatgcagtccagtgagaaattacaggttccttttgaagctcaactgttgccaggagatggaatatcaatgcccaacagggcaaccaataaaagtgtcactaagaatataaatatttggaatcagcaaaaactgtagtgttacaggaaacagtacagtcttctgaacacccagatcatagaggtgatgatgttactagcccccaactactcagtataattattgtctgaatgcaaagtatgtgtttataggatgtgaaaaaatgtaatgcaaaacaaatttgaatcccatggcagttggaatataaagcagatgttcatcacttattttccttttttcttttcttatttttttttttgacagtctgtgtcactgattgagatagaaatgccaattatcaaggaaataatgttttcttaagttccctaaggcagaagatttaacatgcaattctaccagatcccttcctattcccccaacaccttttctctaacccccatatcccaaataataataataataataataataataataataataataataaaagcagttggttcagtgattctgaattaaaaggataatgttttgcaatgttcaagttgtaaaaactggccgagtattggctgtgtggaagactaaagctttcattctaacattcagacatagcaatccaaacccttgttcctgctgtaaatgaacttgatggagcatgggcagatttcagtgatacgagaaaggggactggtcatctatagaaaaatctgtgagagaacttggaagtggactgcgtttatcaatacagtcacaatgttaaatgaacaaaattcttgaacagttttttttcaaaaaatgttcaggtttatttgtggaaatgcaagatttctatgaaaatagtttttgtatggaaatttttgtaatactttttatcaacaaaacaagaacatgtgttcctgtcaggggtgtgatgtcaagcatgaatggtagtgcgtgtgcaccaccaacgtttggtgaaaactatttttatcaagaaaaaaggaatcatagaagagaaatattttcaagttagataatataaaagctaggtgcactaccaccactgcttaccatgccacacccctggtttccacgaggctgacaacatactgtaatgaacaattgtgtgtaaaatggtaaaagacacagacctcttgacaacattgtgataacagttgagtgcacacagtttgctgtttgaatccaatgcacaaaattaaaaaaaatcattaaaactatgttcattttactttcagctttgtctttcatttttctcttgtatgtgtaatgaatgcaccatatacttctttacattaagagaagcacatatcctaaatatttctagatcatcaaggatggccacttcccaactacctgaagaaaagaagaaaaatgcttgggggaggacctactcagatctggaaaagctggactgggatataaaaagtaatcttaagttcagagcagttaaaataagacaaacagtagttctagaggtgacagacatgatattaccttttcaatgagaggatattgactttgtaagttaggttgtataagactgtacagtgatcactaacatttaaagttcaactcatatgctatttaataattccttgcacattgataatttaatgtaattcagcataaaacagagaaagagataggtctaatattccacttagtgatgatgtggcatagatgttcacataccaataggaactttttaaaatgataaattgtaacatatattttgctaagcaaaacaattataatcagaaccactgacagaaagaaaaaaataagaagttctgtgaagtattttttaactcacaaaagttgcataatcaaagtgcctgacatctaaattaaatatccaagtgttttctaaatttctagtctcatggtcattttaagttaaaattcatatgtcaatgataattatctcaaaatataattttagagagttgcacaaagcactgctaaaaatctcagcattggtttggtggcaaatatcctcaaataacatacctcataaaaatgttcagattttggataatattaagctttttataaatcagattctaattagactttaaagcacttttaaaaatcagtttcgtattgtattatccaatcttaaatgataggcaggaaatgacaactttaattatgtttaattaatcactaaatagttacttaaatttttgcaaaaatttgacatttatttaattcaattaaattagtgaactttgaagagtgtaaaaaacctgctgccctcaacttttcaagtaatatagaatatataaacaatgtatagtattactttttgtcaatgtcctaaaaggtatctacattattgccaaaacagatatttttctactgtggggcttatgcaatatgaggtactaatattaattccaataaattataattacctttaaagtaaaatttaactttgaaagagcatctcttctctgggaaggcagtatatttgagtaagcattattctctgaagtacattgaaattgtaagagagaggaagaggacacgtattctaatcagcaacataaccttaaactctcggtcatcaatggaggcacataagccacagctaaataacccaaatcaggatgaaaacactgaggatttatattctcatttaacatacctaaataatttgaaccactctgagaacaccaaagagatatttaaatatttatagctgataaccctaaccactatggaacactaa

SEQ ID NO: 240 - DNA, 32605 bp, Homo sapiens
  source 1..32605: mol_type = genomic DNA
tgcctgccgccacgcccggctaatttttgtatttttagtagagacagggtttcaccatgttggccaggctggtctcgaactcctgaccttaggtgatccacctgcccttgcctcccaaagtattgagattacaggcatgagccactgtgccctgccgaggtggaagtttggagatgggccacaaactcctggagatagggccagctcagtccccctgagcacccacacacaccctcctgagagccaacagaaggagtgagggccccgaggcggatgacccgtgtgcctcaacccgaacggggagaggcggggtctgcagcagggtacgggcaggtgatcccccaaggaaagattttcctgtattgagagagaaggggccaagaggaggagcttgtcaaacaccacagcccctccccctcctctcagctccagggggtccctggtgccagtgttcggctgatggagagaacggcaagcgggagagagagtgtgacccctgtgggcacatgacttcccttgctgcactgctgcacatagcagaggtgtggtgacgaccctgttttgtcccattgggggcgtttgctgttaggtctgcagaatcctcagttgctattggaaatggtgacatcactggcaggggcggagcttcagccatccttcaagttagggaggggcacgcacactccaggggtggagggggacaaagacagggtggtgtggaccagagggatgggtaaggctctggaaaagggggcgctgggagcgcattgcgagggggctggagagggagagaggagcggaagctgagggtgtgaaacggctggccccgaacacacctcgcggcgctccagtgattcctggtgtccgacctcagccccagtcagtgcgggtccagtttccaggctctcgcggaaggcctggctgagcacatgcggcagccacggtcaccctccctattcctcttagcccgaggaggggggtcccaagttacatggccacgcagatggggcctctccctcatttctgaaccttgtggggaggggaaccttgaagggagcgccccccagagccatggcttagggcctcccccacccctctggagctccagtctgcaagagtcaggagccgaaatatcgctgactgtgggtgacgactcttgcgcgcacacacacatacaagcgggcacgacgcgttcggtcctattaaaaggcacgcaagggtgcgggctgcacgcggtgacacggacccctctaacgtttccaaactgagctccctgcaggtccccgacagcacaggcccctgtcccaggacccctccaggcacgcgctcacacgcacacgcgcgctccccggctcacgcgcgctccgacacacacgctcacgcgaacgcaggcgcacgctctggcgcgggaggcgcccccttcgcctccgtgttgggaagcgggggcggcgggaggggcaggagacgttggccccgctcgcgtttctgcagctgctgcagtcgccgcagcgtccggaccggaaccagcgccgtccgcggagccgccgccgccgccgccgggccctttccaagccgggcgctcggagctgtgcccggccccgcttcagcaccgcggacagcgccggccgcgtggggctgagccccgagcccccgcgcacgcttcagcgccccttccctcggccgacgtcccgggaccgccgctccgggggagacgtggcgtccgcagcccgcggggccgggcgagcgcaggacggcccggaagccccgcgggggatgcgccgagggccccgcgttcgcgccgcgcagagccaggcccgcggcccgagcccatgagcaccatgcgcctgctgacgctcgccctgctgttctcctgctccgtcgcccgtgccgcgtgcgaccccaagatcgtcaacattggcgcggtgctgagcacgcggaagcacgagcagatgttccgcgaggccgtgaaccaggccaacaagcggcacggctcctggaagattcagctcaatgccacctccgtcacgcacaagcccaacgccatccagatggctctgtcggtgtgcgaggacctcatctccagccaggtgccctcccccacctccgccacccacctcccctctcctccatcctgcaaccccacacccccagtttcattccatcctttccgtgcccccttcctccctgtaagacaccaccccagagtcagctggctgcttccgggaggcctcgtctcactaggaaccaaacaccagggtctgctggctcccctatcttggcctgagaccagtcacctgccaccttggctggtcctcagagggcccctggggctccaggccctgactggtgtgtgtagacgtggggctggagtgtgtcagtgtgggggtgggcattccgggtaagagagtagaagcgcctgtccagctacatgcccgccctgcagagctttaaacaggacggggcctggggccatctttgtttctgcttccaggttctcctgccctttctttcgtcccttccccctaccgatgggtccgcctgggaagagaaatggctcaggtgccacggcaggacgctttgtgggggtgggagtgggggtgcacacgcgagaggcatcagggcatgggagctgtcggcagccagcgctgcgggggaggacgtggctcctgggattttgcctgtcggagctgtccgcccctgggccgagcgcctgctgaattccaatgaggctgcaaggatctgcaatgcagccctttatgtaagaggcaagacagacatccagcctagcaccgctcacacgtgcctacctgatggacacaccacatctgtggacacacatgctcacactcacaccaaatgttacattagcacacactcatgcacctcagcatcacacaatcaatttcatatgctcatctgcacacatgcagatccattgacacctgctcatgtgccacacacggcttggcatgcattcccagaggcacgtgcaaacatgcacatttacacacatggttccagtcattcacacgcatgtacacgaacagacatgccagggcatgtgatgcacataaccataccctagcacacgcgtgaacacctgcatggtcacacacggacctacgggtctttgccaagcacctctgggtgcaggctggaagcaagagctgggggagggagaaccacttcaaacagctgcagctgcagggcccacaccagagttttctcagaaatcctccctccccacttcacaagccacccccgtgccccagcccaggacaccatgggatgggactggggggatgcatctgtagccagtggctgcagtcacatattccatctgggactggggagggacacggaaggtggactcaggaaatccaggaggggccattcctggggaattgcttcaactcacgcccatgttgctgtctgtctgtgggcatggcctctgcagcaaaggcaatgcctgcagctaccactcacggaacacacccccggccaggtactgtcctgccacgtggggccatgcagtgcacgcccccattcgccaaagctctaagaggcacaggcagacttggggacagacgcaggtccttgctgtgtgaaggtggtgtggaccaccagctgcctgcctccctgccttgggaggctggggagagagggaggcatcagctccagggggctgagccgctggctttagatctgccccatggggccttggtcatgggcaggaaggctgggctgcacccccaatgcctcccttcccttccttgaggatgaggccagcactcaaagtaagggcttggtgttgttcagacagagcccgtcacaggccctgcccctggagacaccagcaaaagggatctcggcctctttggcagctcctagctgcttccccctgaagtccggtaccacccttcagagctgcccgccctgtctcgggatgtgggctggccccacccctggcccatcaggaaggacgggtgggttctgagaatcaaggccatcatgatgcaggaccagccatcctccccggtccaccttgggtgcgtcccgtgctccaggcccccaggacatcccaagggcagtccttcacctggcccttgagcacaacacctgcagggccctagtcagcagtgtgagaggagtgaggggaggtccgggtggggtctccctcccctgccctgtgggcatgtgtgcatctgggcctgggcatgtagcatgtacccgaatcatgcccccagccccccttagcctgctgggttcagcccctgctgcttccagatctcagcctctaacccagtgcctggctcacccctgactcaagctgatcatgtctcctgtgtccacaggtctacgccatcctagttagccatccacctacccccaacgaccacttcactcccacccctgtctcctacacagccggcttctaccgcatacccgtgctggggctgaccacccgcatgtccatctactcggacaaggtaagcctgactgccagaccaggccttccggccctcggccccagggcacagcctggccactccaggagcagcgggccgacccgctcacatggaactcacacaccacaaacagccacacagctcccccacattcatgcacgtccacacgctctcacgtgtccaactcacacatctgcaaacatgctcacatgcacactcatgtgctcttacacacacaatacacactctcttgcacatagagggctcacgtggagcccagcacgtgcccccagcccagagcaggccaaagggagggggcacacatcacacactcacacatcacacacacatcacacactcacacattcatacagcacccacacgctacactgctatgctcaccctccccacacatgaacactgacacacccatggattcgcacaaagtcacacacactcactggcacaggcaccagtgacaccccctcaggacgagagggcccgtgggctaggagaagggatggctgggaggctttctagacaggtggactttgaaggggagtttggagagctgggggttgctccaggaggaaaggggtgtgcacgcagccagggtggtggggccagcctttcccactgcaggcatgggtggagagcaatgtctgtggttgcagctcagggtcgggggcgctggcctgggggcttccagcctctagggctgagggcaccttggcttagcctcctgcagaccctcctggcccacaggctatgaggagggcttctgtccaatcctggaacatcagctggaagagaggagggtcatccagtcagttttgcaggaatctccaagccagagagccatgggggcttgctctaggtcacacagccctccgtctacccaggatgcaaactgggcactgagaggctgaccaacctggggccactggcagacagacctgcagggccacttggcaggggacatccagtttggtgccagcgctgaggagccagagggctgggctgtgcagccaggcttctgggtcccccaccttctccaaattcctcctgcccagagtccacagtccttggtaacactgccttaaagcacaggggtcgccccagccaggcccaggctcttctgggaggatggaaggccccagaggcaggaactgagacagaggctggaacagccaccttcctgaggctctgaaagccctggcgtgccccctcggcacccaaactgctcctcccaggtgacttcacctctggccatgggaaggtgggggtctcattcctgtgccctcaggcacgacctccttcgcctctctgggcaccagtttcctcacatgtgaaggagagaagatggccttacccaggaaagcagccagtggtcaaatgaaaggcgggggaaacggatgcccctggcccagagcaggccaaagggagggggcacagctcacagctgcaccctggccttaccacagtctctacactacaaccaacctgtgcccaaaacatgaaccggcaaggccaggtcagagctagtccaagacctcaagcacagcctgccttgccaccacgtcaccaggtggatagacagaagcaggggacatttttgcaccccaaggcactgccccaggccacaaagagggagcaggtgaaaaataacctggaagcctcagaggaccacaagatcagcaagagtccacagggacactgaaggaaccagggcttacctggacagacacagagaactgaggcagaggggggcagagcctgctccactcccggccatgccacggcactccgtggcagcttgaagccaggaaaagcaagccagggcaagcaagcaccacgctctcgcctggggagatgaggcctttagccccaagagtgaattcttcttcatacatagagttgtttaaatttgggaggactctatgggcagccccagggggatcttcgaggcgctatgtgtcatcaagaatttcctgagctcagcttgtccaaaggtggtgggctgcaggggaagaggtgagctcaccccaggcacaattccacagaaacccacgtcccttagggtgctatggggccaacactaaacctcctccatttccgagattatatgtgggaggagaggccggggtgggagagaggttcccagggtctaaaaagtgtccccaggatggtggggacaggggtgggaaaaaggaggggtcccagtgtctagaaagtgtccccaggttggccgggcgcggtggctcacgcctgtaatcccagcactttgggaggccgaggcgggcggatcacgaggtcaggagatcgagaccatcctggctaatacggtgaaaccccatctccactaaaaatacaaaaaaattagccgggcgtggtggcgggcgcctgtagtctcagctacttgggaggctgaggcaggagaatggtgtgaacccaggaggcggagcctgcagtgagccgagattgcactccagcctgggtaacagtgcgagactgtttaaaaaaaaaaaaaagtgtccccagggtggtggggacaggggtgggagacaggagggggtcccagggtctagaaagtgtccccaggggtgtggggacaggagtgagaggaagggggtcccagggtccagaaagtgtccccagggtggtagggacaggggtgggagacacgagggggtcccagggtctagaaagtgtccccagggtggcagggatgggatgggagacacgagggggtcccagagtctagaaagtgtccccaggggtgtggggaccggggtgagaggaagggggtcccagggtccagaaagtgtccccagaggggtggggacaggagtgagaggaagggggtcccagggtccagaaagtgtccccagaggggtggggacaggagtgagaggaagggggtcccagggtccagaaagtgtccccagaggggtggggaccggggtgagaggaagggggtcccagggtctagaaagtgtccccagaggggtggggaccggggtgagaggaagggggtcccagggtctagaaagtgtccccaggggtgtggggaccggggtgagaggaagggggtcccagggtccagaaagtgtccccagaggggtggggacaggagtgagaggaagggggtcccagggtccagaaagtgtccccagaggggtggggacaggagtgagaggaagggggtcccagggtccagaaagtgtccccagggtggtagggacaggggtgggagacacgagggggtcccagggtctagaaagtgtccccagggtggcagggatgggatgggagacacgagggggtcccagagtctagaaagtgtccccagcggggtggggacaggggtgggagacacgagggggtcccagggtctagaaagtgtccccagggtggtagggacggggtgggagacacgagggggtcccagggtctagaacgtgtccccatgggggtggggacaggggtgggaggaggggggttcccagcctccggcgggtgttccggcagtgggaggcgggtgggagggcgggtccccgcgggtccacctcagcccgccgtgcccccgcctcccgcagagcatccacctgagcttcctgcgcaccgtgccgccctactcccaccagtccagcgtgtggtttgagatgatgcgtgtctacagctggaaccacatcatcctgctggtcagcgacgaccacgagggccgggcggctcagaaacgcctggagacgctgctggaggagcgtgagtccaaggtgagggtcggcgccgcgggtgggcgcctggcggagccgaggtgcaggacgggccgccttgtgtctgtggctccgtgtgtgacaccctcttctttccatcgtgcatggtcagcaccaccacgtctggcgagcgcccgccccagcctgtcctcggctcatttcactcgcttttgccattagtcgaaatctccttcgtgtcagtccctgcggggcgagggccagaccacctggagctccgcaaacacccctgccccgcgctgccgagcgccctcgtcccctcctcctgcccatgcccctcgctccctggaggccccagccgggcttgggactcgtcacccttcccgcccaccctgtcctgagtccccagcagcctccctctgggcaaggtctcccctgtacacgacccccacataccgcccctgcaggcctgtcccctcctggctgggcccattccctgtcctcccccgcgtggcctcccctgaagctctgcacctcatggctcagcaaagccctgtccacagacacctgccccccagcctggaccgcccctgtgggctccactcccctccttgcccccaccacagggctccctctgcactcctcaccaagacccattagccacctggttctaggacacactgacccccaacacagccaggcgtccactctgtggggctgcagagagatcagagctgggatttgggggggtccgagcgacccctttccccttccttaccactcccatttgcagtctggggcagagctggttctcggctacagacccccggagccctgggtgctcagcacctgggccagctcctgatcaagcagtgggaggaggcccaggctgaggagggccagacctatgggtggctgggagcatgtttcgtgtcagagctggcttcatcggacttagggccaacctagcaccccccaaggcaccccaggccccgggagggaccagagggcatgggtcgggggtaaagccaggggcagaccagagggtcctgggagtactgtcgtggggggtctgctgagtcttgggggggaggggcatgggcaccaagggccccacccaagacagtgcccctcaccccagtgcccgacaggcccctccccccagcgcccgacaggcccctcccccccagcacccgacaggcccctcaccccagcgctcgacaggcccctcaccttctggcatgtccacccacggccacggactcccatcacacactcacccctgcgcacccaactgcctgctttcactcacaggtgcatgcacacattcccatcacactccacacctctggccacaggctcaggcttgcctccatgcagctccagcgccacacacacacctggacacgtactcaggtgcgctcctcacacacacacctggacacgcacaggtgcgctcctcacacacacacctggacacacgctcaggtgcgctcctcatgtgcatgctcacccttacttgcgccagccagcacagacacacatgcacacacgcacacacgtgcacaggcacacacatgcacacatgcacacgcacacacatgcacacacgcacacacaagcacgcacacacgcacatgcacacatgcacacacacaagcatgctcagaccatctggcccttccccaaccttcacaggcctttgtggactaaccctcccatgctgacacccacaggcgcatgccacccctgcaggcgcacataacgcacacacaccctcttgggcgcatatgcgagccgaagggcgtgggcaccccagttagtgaggatacctcggtctcttgagaggcagagggagaccaaggagagggagggggagggacatggggacaggccccgggggggctgctcacctcccactcaggactgacacaggttggagtgggcactgctggggccacacagcaggtgcacggcagggtgggggcggcaggtggggctccctccgaacggtggacgcggacagggcctccttttctcccgagagcgaccgtttccaagagcacagcttcgtggcagggagcctccacggccccgcccctacgaccctcacccccagctccaccccggcccccagccccgccccgggcctcggtgtttgcgagctccaggtaggagcccgtctgcagacgtgccgaggaggtggtgtgattgctttagcgccgtcattttcaaccgtttataatcttcttctgtgtctgcatattttctctgtgcacattattcatcagagtaaaaaaaggaactatgaaaacctcgaccaactgtcctatgacaacaagcgcggacccaaggtatatatgcatggacgtgcacgccacccacggctagggagccctggcctcggcgcctcggccactagggccactgtctggcccagccgccgagccgcaggcccaagcaatgaggagaggcagccggcagcaggcaggagagggcaggcaggagagggcaggcgtggcggcgtgggtgcctgaggcccacccgccgtgaccctagcctgcaccctcgaggcaggcgcggctgcaggaggagctgctctccgggaagtgcatgcgaatctccgagaccccaagggtttcctcgtggaacccgggagggagcccgcccgcctggccacccactcgccggggccgggctgctcctcaggggcctgcggaatcaaacctcagaggacctcccatggttttggaaaagtcagccccatctcttttcctggttgcattccaaaactcttttctgtttcccgtccgctgcacgcctcctgagtctgggtccacttcagcttgcatgctcagtgcaaagatgaggacaggagtgaggtggagagagagatccagagagagcagagagagcacagaacgagcacaggtgagcgcgcaggctgaagacaggacaggaccggagaggcgaggccaggccaggcaaggactgaggaaggcaggcggaggcgcaggtggcaggcgcagaccatggcagccctagctaagctgcctcggggttcccagcggctccggcccaactctcacccctgaggcgctatgtcccctgccccagccgcctgctaacactcttgctcacaccgcaggcagagaaggtgctgcagtttgacccagggaccaagaacgtgacggccctgctgatggaggcgaaagagctggaggcccgggtcatcatcctttctgccaggtgaggctgggcagggccctacacactccacacaggatggtacctgagccaagtacccgccatctgagccagagctgggacattgttgggcacagtgaccttcagcttccaaagcaccttcaccaaggacagccacccccacccccacccgcacccacactcctatcggcatggctgatgtgacaccctccatctgtccctcccttcctgggcccttccccattccacagtcacatgctgctgctgccctgagctgggctgtgggagagggatatggaagagaccctgcccttgggaagccccgcaactcaagggggcaaacctgtgcaaacaaggcccaggcctggggccagggactaggcccagggaagtgatgtgcaggtgtgccaggcgaaaaggcccacagcagggagagggccagatttcccaactgaaggattgcaacagctgcagcagtagcttagggggaaatcagttaggtacccgggaaatcaagctgctctggacaggtccggtgccacagagcaaccttggggtggagcccactgtaaaaagctccctatttgcaaatggctaggttctcccgggaaggaaaagcctgggtgactgggaataggaaaagcaagagtggggaagggcagggtgaggagccttgccccatgggacagccaaaaccccactgtccctgacctaaaagctctgctaggctccaacagagcggagcaaaacagcagtgaaacacccggaggaacacagcccagccctccagccctgcatatgggaaagagccggcgacactctcagtcccagggcagaccaccatttccacggtccatcaaatgaccctctagcacggagacagatgcagccccctcaccagggcagaacgcagggtggggccagccagggctcctcggactagaaggcaggaatctccccagcccaaggtagggttgttgcttagagctgcccacggggccttacatgctcctcctgcagctgctataaaaaggcactaatcgtcccccattacgccccctgcactcggctttaagctcacaggtcacttgtccactccactcatccaactgcaagccccagggagggttggcctgggctccaggaaaaaagatttttaaagacgtgaccaggcaaagtcccaagggtatgcacaggtcccaaagaaggaatgccccgcccagggaaagacccgcccagaaaaaaagacccgccaagggaaagctccgcccagaaaaagacctgcccagggaaagccccgcccagaaaaaaggtcctcccagggaaagccccacccagggaaagctccacccagataaaagcccgcccagggaaagccccgcccagaaaaaaagatccgccaagagaagtctccgcccagataaaagccccgcccagaaaaagacccgccaaaggaaagcccagcccagaaaaaagacctgcccagggaaagccccacccagggaaagctccgcccagataaaagcccgcccagggaaagccccgcccagaaaaaagaccagcccaaggaaagctccgcccagggaaagccccgcccagaaaaaaagacctgcccagggaaagctctgcccagataaaagcccgcccagggaaagccccgcccagaaaaaagaccagcccaaggaaagccctgcccagaaaaaagaccgcccagggaaagccccgcccagaaaagacccgcccaggaaaagctctggccagataaaagctcagcccagggaaagccccgcccataaaaaagccccgcccagataaaagccctgcccagcgaaagcctcgcccagggaaagccccacccagaaaaagacccgcccagggaaagcccagcccagagaaaagacccgcccagggaaaactctgcccagataaaagacccgcccagggaaagccccgcccagaaaaagtcccgcccagggaaagccccgcccagaaaaaaaacccgcccagggaaagccccgcccagaaaaaagtcgcgcccggggaaagccctgcccagaaaaagtcccgcccagggaaagccccgcccagggaaagacccgcccagaaaaaagtcccgcccagaaaaaagtcgcgcctggtgaaagccctgcccagaaaaaagaccagcccagggaaagcccctcccagaaaaaaagacccgcccaggaaaaagctctggccagataaaagctccgcccagggaaagctccgcccagggaaagccccgcccagaaaaaaagccccacccagggaaagcccagcccagaaaaagacccgcccagggaaaactccacccagaaaaaagaccagcccagagaaagcccaacccagaagaaagccccacccagggaaagccccgcccagggaaagcttcacccagagaaattcccacttagagaaattcccactcagagaaagccccacccagaaacgtgccacccagggaaagccccacccagtgaaagcccctaccagaaaaagccccgcccagaaaaagcccctcttagagaaagccccgccagactctcagaagttaatttcctttttcgttgttttgagagggagtcttgctttgtcacccaggctggagtgcagtagtacaatctcagctcactgcaacctctgcctcctgggttcaagcgattctcctgcctcagcctcccgagtagctgggactacaggcacaagccaccacacccggctaatttttgtatttttagtagagacggggtttcaccatgttggccagactggtctcgaacttgtggcctctttttttttttttttttttttctttgagatggagtctcactctgtcacccaggctggagtgcagtggctcgatctcggctcattgcaagctccacctcccgggctcacgccattctcctgcctcagcctcccaagtagctgggactacaggcccctgccaccacgccctgctacttttttgtatttttagtagagacggggtttcaccatgtcagccaggatggcctcaatcttctggcctcatgatctgcccgcctcggcctcccaaagtgctgggattacaggagtgagccaccgtgcccagccacttgtggcctcttctgttattttctgaattgtttacacttcccttactcatcacagagcttgagagaaattctgtagctgtgatgggataaaaggatggatgggcaggtgaacaaatggacagacagctggctgggaagtggaatttcttcatccaagatgggtcaactcaaggaatcgattgccctaaaacatacctgttccactgttggccacttttgcaatagacaagttcacatcaagctagacctgcctgatccctacattctaactggagtgaccaacaggacacgggagagaaaaccacatacaaaaccaatccacagaaccccgccatgcccaggtccccacagagaggggagggggcgttttctccacttttttttctcggcctgtgagcccctgagccgtgcactgcggtcccacaggttgaccccgcgttgccagcctcagggccaaggtcacgtttccagacatggccctaagaaaaaggccagcccaggggaagggacatggtcagggcacacaggaaccacgtgcataccacacatccatgcccatgagcacacaccacacaccacatgtgtatgcacataccatacacacgtgcacaaatgcatgtatacacactatagtcacaccatgcatacatctctacccacacatgcagaatcatgtacaggtcatacacaacacacacgcatgtatgcacatgccatatacacaccacatgtaccatgcatacaccatacacacatgtgcgcaaatgcatgtacacacaccatcacaccactcatacatctctactcacacatgcagaatcatgtacaggtcatacacaacacatacacgtgcacacatgccatatacacaccacgtgtacacacatgcaccatgcatacaccacacacacacgtgcacaaatgtatgtacacacaccatagtcacaccactcatagatctctacccacacatgcaccatcatgtacaggtcacacacaacacatacacatgtgcacacatgccacataccacgtgtacacacatgcaccatgcatacaccatacacatgtgcacaaatgtatgtacacacaccatagtcacaccatgcatcatctctacccacacatgcagaattgtgtataggtcatacacaacacatacgcatgtatgcacatgccacatacacaccacatgctccatgcatacacacacaaatgtatgtacgcaccatagtcacactacacatacatctctacccacacatgcaccatcatgtacaggtcatacacaacacatacacatgtgcacacatgccatataccacatgtgtacacacatgcaccatgcatacaccatacacacgtgcatctacacatacagatacaggcacacacaccaccatatacatcacatacaaagacatccactgatatacgcacacctacatacatgtacacacagcacacatgcacatacatcacaacacacatgcgcaccacacaccatgtgcacacccatacacccatgctacatgcacaccataccccacacatatgcatacactgaccacagcacacatcaaccacacacccgccaacataactctttctcttttttggggagatagagtcttgctctgttgcccaggctggagtgcagtggcgtgatctcagcttactgcaacctctgccccctgggattcaagcgattctcctgcctcagcctcctgagtagcaggaattacaggtgtgtgccaccatgcccggctaatttttgtatttttagtagagatgaggtttcaccatgttggccaggctggtcttgaactcctgacctcaggtgatccgcctgcctcagccttccaaagtgctggcattacaggcatgagccaccgtgcctgcctttttttttttcttttttttttgtgtgtgtgtgtgagacagtcttgctctgtcacccaggctggagtacagtggcacaatcttcgctcactgcaacctcggcctcccaggttcaagtgattctcgtgcctcagcctcccgagtagctggaattacaggtgcaggccaccatgcctggctaagttttgtatttttagtagagactgggtttcgccatgttggccaggctggtctcgaactcctggcctcaagtgatccacccacctcggcctcccaaagggctgggatgacaggcatcagccaccacccccagctccaacaactttttttttttttttttttttttttttttttttttttttaagatggagtctcactctgtcacccaggctggagtgcagtggcgcgatcttggctcactgcaacctccgcctcccagattcaaccgattctcctgccacggcctcccgagtagctgggattacaggcatgcgccaccaccccggctaatttttttgtttttgtagagacggggtttctccatgttggtcaggctggtctcaaattcctgacctcaggagacctgcccgcctcggcctcccaaagtgctgggattacaggcatcagttactgcgcctggcctcaaaatacttcagagcaatggctctggactgtcagggctggaaaggaccctcctctcacatgctgagctccttggagtggaggccaaagtcccacagcagaggccgactggcccacccagcatgcccatctcccaggagtgcagagaggcaagccctgggcagtggcaggcacaggccttcttgaccccagaccttcagcctgtcatattttggctcctccttagtgaaggttgttgagggtgttttgcagagagacatgacgccaatcttaatttttgacaattttccatagcatgcagataatttgtttccaaaacttttcattttcctgaagtcatcttgattggtatcagctatttccataaaacgatcggatgagttttgatggacagatcaggcttttgtttacaactgttttgctcctaatcattccaccacatcacatgtcatggacctgaattgcgtcaagaagacgggcttgtctgtcaggccctggtgggcactttgatagcgggcatgctgtgccatgacacgtgtggtgttgggtcttgctggacaagctgtgctgtgttcagtgtgcggagcctctgctagatgctctcatttggggcactgggccagtgctactgggagcacttctgttttgtgtcactgacatccaatagcatcgttatgtagagcaaacaccgaagggctgcatttctttgtgggcttattctcgagaaaactgggggcagatccctcctcaaggaggggagggccaccttggtttccagtcaagtattgtgaaaattatccaacactcaggcaatccacccaaccctgctgcccatgtctggagaagcaaagtgtcaggggtagtccaggcccacctggagacaggtcaggccctgcagagaaaggtctgacagacgggggtgagggaagaccccccaaaggcctccagagtcccaccaggtctccaggtccttgtcataaccagagaggccccagccccagaggaccaggtcccctgctccactgtccacaggggcccacctgcaagcacactggcagagctcaagaccacacatgcctgcaaggtgaggcctgtctgggctctgtcctcctgcaggccccaggcctgggtggctgggcgaaggcagctgcttatgcagactccagggggaaagccgcctctcatctctggccgtccccaggacgctggatccaccaatatctcaccaacctggagagccactcaacccctcatttcacatgtttgaacatagaggaccagaggggtgtggcctgtctaggaggtcttaggagctcgggtcctgactctgccacttaccaactcttgtgtgtcccatgtgcctccgcttcccctcgggacacagagatattgtgaaagttaaacaacataatccccgtaaaacacttcgagcagtgcctggtatctggccagcaagtgatcaatggtgatccattaccatcctgggaccccatcagagccttctgaggtggagggaagggcgtgctggggagcacaggtgcaggtcacaagaaggaagtcagtcccataagccaggtatctaaccccatccctgctcccccaaggtaagggccagcatctaaccccacccctgctcccccaaggtaagggccagcatctaaccccatccctgctcccccaaggtaagggggccagcatctaaccccatccctgctcccccaaggtaagagccagcaacggaggcctgggaggctcctgggttctgggccgcagcgcctctgcgaggtctgcaggcttcgctctaggaggggatgggggctgggcaggtccctgctccagaggaggaggacctgggcctgcggagcgccgcggtgggagtgctggagtcctggcccgtcatccccgtctgccccacagcgaggacgatgctgccactgtataccgcgcagccgcgatgctgaacatgacgggctccgggtacgtgtggctggtcggcgagcgcgagatctcggggaacgccctgcgctacgccccagacggtgagtgctgggccttggcggggtccccgaacggggaggaccccacgggctctgagtcgcatgctcgcctaggcatcctcgggctgcagctcatcaacggcaagaacgagtcggcccacatcagcgacgccgtgggcgtggtggcccaggccgtgcacgagctcctcgagaaggagaacatcaccgacccgccgcggggctgcgtgggcaacaccaacatctggaagaccgggccgctcttcaagaggtgggcggggcctccccggagctgggcggggctgctcttggggaggtgggcggggtcactccagagatgggcggggccgctcttggggaggtgggcggggccactctccagagctgggcggagcagctctcaggactaggcggggccgctcttagggagctgggggagcgctcctcaagagatgggtgggggcactctcggggaggtgggcggggtcgcttccaggaggtgggcggcgtcgctctcaggggtactgcagtggagcctgctgccaacatcctctggacactgttacttctctcctctccccccacacccccagcaccaccacatctaatggcacaatcatctgccctcttctcaacactgacaccagtacctgggccgtcactggagtggggactggctccactgcctccgcccctactttccacactgcagcccaccctgaaacagcacccctctccctgtgtggctggcagcctttgggaggaggctcttgatgcagatggggactgaaagcttccagggacccaggaggccagacaagcagcccaagaacagcacacgagccttagacagccagggttggccaaggcccagagacccaagtgaacatctgcagtgtggcaggagttagctcacagcacgcctggacaccatgccatgccagctcacccccagatccccaaccactgagtagcacgtgcagagccaccatccacaacgcccacataagtgcagatgtaggcagcacgtgtgcacacacacgacacacatacacagaaccatgtgtgcacacagactcaggcacatgacacacatgtgacacaagcacatgcatggggtgcaccccacatagggatcacgtgtgcacacaggttcactgatgtggcccgatgggtacaatgcacacgtgcacacacagccggacaggacagcctggtggttagagctggctcaacctcgccttcacttgctggcaagagggcaggcatccttctgagcttctgcctccgtctctgtaaggcaggatggttctgaggacaacgtcctaacccacagaaagccgggtctggcacccataaaccactcagctgtcatgaaccacaccgtccatctggtgcaggcagataccacggtgtccagggtctggcgtctgctgatctttccgttcttgggactgggacaagggaaaagcccaagctgctcagccggcaggagaaggagcagggagaaggagcagggggaaggagcagggagaagcagcagggggaaggagcagggaggagcaggagaaggagcatctctgagaagcctcagctatgcttccttccctagagtgctgatgtcttccaagtatgcggatggggtgactggtcgcgtggagttcaatgaggatggggaccggaagttcgccaactacagcatcatgaacctgcagaaccgcaagctggtgcaagtgggcatctacaatggcacccacgtaggtgggggtcatgagggggtgggggctggggccttagggtcctggggccaagacccctgcgtggccaccctccatctcatactcccacccccaggtcatccctaatgacaggaagatcatctggccaggcggagagacagagaagcctcgagggtaccagatgtccaccagactgaaggtgggggccccacagacctccctcagtgtccccaccccagacagcccatccaccccctctggcctgaaggaggagggtgcggtgaggtcaatgaaagccactaaaggaagtgggggtggggcctgcttcccctggacaccgtccagcacacctggcacagcacaggaagcagagagaacaggagggaggagaggaagctgcccccatcccacagggggtctccagtgcccctcttgacccagccctacttaagtctggggcagttagttgtctgacaggaccctgctggggaagagcagatgggggacagcaggcagacctcagcttcagcactcgctgtccccagtcctggtcctccacacccctcatccctcctccagcctgcattgctcttgatgggaccgggtcaaactgtcctcttccaccgtgtgggacagcccttcctgactcccctgggcctctgagagcctctgccctcgccggcttcctcctccagaacatctttcccttggctccctactccagggtgctctcctggccattcctccccgggcagagccacactacccccactccacacacactccagtcctggtagcatcacagaccaccaaaggcaaggacctcacaggcgacacgcccaccaaccttctctcggtcattccaagccctcaaatgtctcttgaccctgtctgttttctgagcccacccctgaagcttggtgtcagcccctgtgacctctcacccaggctccctcccctgctctgcaccggcccctgtggcctctcacccaagctcccttccctgctctgcagacagggtggggttttccagtgccagtgtgggtttcattgcagcccagacacctcacactgaaaagtctgaaagcagcggtcaaacgctaatggccaaaaggccccatctaggctgtgagatggagatggctttttacaaatttgtttctggcctcactaattttttaaaaatactagcatatatattacctgtataacaggaaaatgtaatgaaagttttataaagcaaatcaacttcttcaatggctcctgattcccctggggataaaagacaaaatgctgcctggaggctgagggtgggcgggcctgcccccctctcaggctcaccctgcctaggacatgccgggagggtgcctctcccaccacccccacgcctccctgcctttgcagttctggactgcagactcctctgctccacctgccctcaggcacctgcttgatccctgcccaccttgagggctcagctctgacaccatctcccctcacagttctggcagtgtgctatgctctattccagccccctgtgccccagatcccttccccacccccatgccatggtcccttgaaggacagacaggagggcgagcccaagcaggagtgtgggtcgaagaggccacggcgcggtggagcacgtacacacgggcaagagaaaggagccagagacctacattcaaagcctgagggcttcgggactgggggccgggacaggcagtgcgccgggatgaagggaggcacgggtgggtggccccacgggtcccaggtcctgtgcaggtgcagggtcggctttgtggacatgcccctgtcctcgtggcacagcagggtgggggtcagcctgcaggctgggctgtttctcaccccaggaagatgcctggcatacacgggacatcagcggctcctctgctggagggaatcatgtctttttttttttgagacagagtctcgctctgtcgcccaggctggagtgcagtggcgcggtctccgctcactgcaagctccgcctcccgggttcacgccattctcctgcctcagcctcctgagtagctgggactacaggtgcccaccaccacgcccggctaatttttttgtattttcagtagagacggggtttcaccgtgttagccaggatggtctcgatctcctgacctcgtgatccggccgcctcggcctcccaaagtgctgggattacaggcgtgagccacagcacctggcggggaatcatgtctaagccaagactggagaaaaagtggccaagagaagggtccagctctccaggagtcttttctgagcccccagcccccacccccccggggctgcaggcagacgatgctgacggtggctggggaggacgtgtcctgaacacttgggctcgtgaagaagctccagagaggggcagtggccggcggcgcagggcggggggtgtgaggggtgcgtcggggattaagaggggcgccaggggaggctgggagctgagaagagactgccgccctgggcagccttaggtcggtggtccaggctgggtctccccttcccccccagattgtgacgatccaccaggagcccttcgtgtacgtcaagcccacgctgagtgatgggacatgcaaggaggagttcacagtcaacggcgacccagtcaagaaggtgatctgcaccgggcccaacgacacgtcgccgggcagccgtgagtgcgcggggcagggcgcggggcgcggggcagggcgcggggcgtggggcggtctggagcccagcagttaccgcccgcacctacccagcccgccacacggtgcctcagtgttgctacggcttttgcatcgacctgctcatcaagctggcacggaccatgaacttcacctacgaggtgcacctggtggcagatggcaagttcggcacacaggagcgggtaggctggacggcgggggtggggaccagcgtgagaggggcctgcaggcgcggtcggagtgggtggggcatggagtaggcggggcttgcagatggtggggggtcctggggtgagtggggcatggagtgagcggagcctgcgggctgggtcctggcgtgggtaaagcatggggtgggcggggcctgagggctgggtggggcctgacatgggaggggcctgacgtgggggtcggagtgggtggggcacggagtgggcagggcctgcaggcgggggtctggagtgggcgggacgtggagtgggcggggcctgctggctgtggtggggcccgcccggcgtgggaggggtctgcgagccagggcggggctggagtggggtggggcctgcgagctgggtagggtcttggggagaagacccccggagtgctctagggcggcttcagtcgggggtacctgtggcgggagctgggaggacgctgcctgcatgcccgccggctctgtcgcctcgcaggtgaacaacagcaacaagaaggagtggaatgggatgatgggcgagctgctcagcgggcaggcagacatgatcgtggcgccgctaaccataaacaacgagcgcgcgcagtacatcgagttttccaagcccttcaagtaccagggcctgactattctggtcaagaaggtgggcaggggccgggtggcggggtggcggcggggggagtccctggagggcccgggccgcgctgacctcgcgtccctccgcaggagattccccggagcacgctggactcgttcatgcagccgttccagagcacactgtggctgctggtggggctgtcggtgcacgtggtggccgtgatgctgtacctgctggaccgcttcaggtgagcgcgacccggggctcagacacctccatctgcggggcgcggagccggccaggggcggggcagggccgcctctcccgccctctctcccgcccgccctctgcgccccgcagccccttcggccggttcaaggtgaacagcgaggaggaggaggaggacgcactgaccctgtcctcggccatgtggttctcctggggcgtcctgctcaactccggcatcggggaaggtaaggccccgcccggcccgcctggtcccgcctcggccctctagggtctgacagagccccccgcccgcccacaggcgcccccagaagcttctcagcgcgcatcctgggcatggtgtgggccggctttgccatgatcatcgtggcctcctacaccgccaacctggcggccttcctggtgctggaccggccggaggagcgcatcacgggcatcaacgaccctcgggtgaggcctggccgggctgggggagggaatgcgaggtgagctggggtcggcctcggttaggggcctggggagccgccgccgcgatccctgccctccgaccctgcagctgaggaacccctcggacaagtttatctacgccacggtgaagcagagctccgtggatatctacttccggcgccaggtggagctgagcaccatgtaccggcatatggagaagcacaactacgagagtgcggcggaggccatccaggccgtgagagacaagtgaggcgcgggcggccaccctggcggggcgggacaggtgcggggagggggagggtggcctccaccgggcaggagagcgtccgggccgggcaccccggagggcgcgggcgtggggcttccaggctggcaggaccaaggcccccgtgactccgcctctgccggcagcaagctgcatgccttcatctgggactcggcggtgctggagttcgaggcctcgcagaagtgcgacctggtgacgactggagagctgtttttccgctcgggcttcggcataggcatgcgcaaagacagcccctggaagcagaacgtctccctgtccatcctcaagtgagtgtccgtgcgcccgcgtccctcctccgcccctctccgccagaggtggacgccctccccagtgccagaccactccgaggccaccactgatttcccacccaggccgggcgctgcccactccacgccgcaccctaccccgcaggccccgccccggccccgcccccagcttgctccttcccgtcctgggccccgcctcactgcaggctcacttgttcccaccgccaggtcccacgagaatggcttcatggaagacctggacaagacgtgggttcggtatcaggaatgtgactcgcgcagcaacgcccctgcgacccttacttttgagaacatggccggtgcgttctccttcatccattctcgggtgggttctccgtgggctgcggcctccctggccagcaactgaggctctgggtcccggcacacaggggtcttcatgctggtagctgggggcatcgtggccgggatcttcctgattttcatcgagattgcctacaagcggcacaaggatgctcgccggaagcagatgcagctggcctttgccgccgttaacgtgtggcggaagaacctgcaggtagggcaggccaccctccgaggcctggtgcccagggcccggcctggccacggccctcctccatccccgaaggccgtggcactggctctggctctggtgggcaggactggagctaggagccatggccaggggcagtggtgagtgctcccagggcacgggggcagcaccggtggggggctgcctgcaggtggctgcccactgcaaagccggggccgagggaggccacgcaccctgctccaagcctccgcctggcccctctgtctccagagtcgcccgccggtacccattccataggaaggcaatcaggcagggtaagacaggggcccgcctgtgtatggcacgtgagtccaagatgcattttgccctccgccgacccaagccccttgacacccttcggagacccccccctttcctgctatgtccttgtgctccgtgactctaatccgaattgggccaggtccggtcctgcctggtgcccaggttgtatccatgagaatttgccaccagcaagggcagccacggcccacctgggacagggtgggcagtgggcctgtacaggcctaagggctcgtggcccgcggtcgagttccggttcactccgtctcttctctttctctgggtgccgtcctggagcctgtgtcctgagatgaagccgacagtgcggccagggctgctgggggatgggggttgctggaggctccacacctctcatccgcccgctcttgctcttggcccccacaggtcccctggggacctggccgctgccagcactggcgggcacaggccacctggccatcagacctgaggccagagtcccgggagctgcctctgtcactccaattccacctcgacacctgcctccagccctcggccccttcctgaatcttggtgtgtgccccttgggggtcagtggcctccacgcagacagctggtgtggcctgaggggcaactcctccagtcctcagaggactcctcctcctcgggacgcctgtaagccagggccacccaggagccagggagccaggcggacctcccaggaagagccagccgagagcccccaagcccagccccagcacgagcaaggtcaggcccgagaccccgggcaggagaagaggccaccctcgaacgtccgctgtcggcccgtctgtccagcacagggaggcaggcaggagcgagggcccaagtggccggccaggctgggcagcggcccatgcaggagcaggcgagggcaggtgtggccaccaccctagccatctaatcacttatacatattcattttaggatagaaagagtggtagagcagagcctgaccctaaaaagaaagccacatttagggctatcacctccaccctggcttccagcttcaagaggcgtaggtcctccaaagacacggtaagggggagagcaccccagtcccgcgtccgactccacctgccctgccctgcgtgtgtctcccgccccatcaccccgccccggaccctgggctcctgtggcccactctgcccctgtctccctgtggcggccgctctgcccagcccgcccatgctgctctctctcactctctggacctttctccccggccctcctgggtcctcggctttccccgtgtgtctccgttagtctgcccgcccacctcccctgccatgacccacacgccatcttgaagcctgtcatctcgttggtcagtcagtcagccacaccacctctcggggccaggtctggggccctgggagcccagcgtggccccatcctggactcctcagctgccgggaggccacaccacttctctgttatgtccccgtttctctcgcctctcccagaggggcccgccgccctcacttcgcccctgcgacggccctggagggggtggctgtgatgtcccatcccgtccgtctgtctggccactggccccgccccccagacacctgtctcacctgtctcaccagagccatgcgtgttgcatcttcatgtggtctctgtgtgggccgggggctgggggccgggcctgggtccgtctgggtggacggctggggcctggagttggaactggccccggccacaggggactgtcaggcagggagtggggtgggaccaaaaggggtggctcccaccccaggctgagcgggggccctgcaggaggtgtggcggcagctcccagagggtctgagaatgggtaggggcggccccacaagccctggcctgcagagcccaggacgacactgaggttcccagacagggaggcctctggaagggaaacgaccacctcagctcctgaccccagcaaccccacaaggcccaccccaaagagccaggccttctgccctttggagcccagaatcccccacctcctgctcggggcagcttgtccctgtagcggatatgcacactcggaccagaggcccccagagcgaacccagccttgctagaggcaccccaggcccaggcaccatggtggggaggggctgcccagagaggcagcggagacctcagccccgtggccaccctgcagtccagggaccagtctggcccacaggaagcccccagcccataagcagcatcaccagagagaagcttacgcccgggggaggaagtgcgatttgcagccacctgcccctcagtgcactggaagcggggcagacctccagggcacagacaggacttggcatcaagcaagccaaatcccgagatgaagccaccagggtgccccaagagggacccatgaggcctggctgctcagcttcctggggaagggacttggcatgcaggatgggtggacagtgagagcctgtaggcctgggggccactggaggctcaaggagcaggtggaagcaccattcctggagccacctctgctgcggaaagcgggcagagctgatgctgcaaagtctgagccaggagtcccgcagggaacagggagggggaatagcgcagggatcgtgggctgggcaggctggggaagagggggtgtccaggcagacaggagaaacagcgatttggggcaggcagccacggggggcaagcacaaatgtcgtgcaggtgatgggccactttcagagggtgacactgggtcccagggccctgcctggagcgaggccaggtgcagctcagagaccctcatggtgccctcccagggacatgttcccagcggaaccctcacccgagcctctctgggcaccagggaccgtcctctggggccagttctggcatcacgtggcatctggggctggccccgccctgcaaggctgaactgtggggggcactgccagctgggggtctgggcaggggagggcagcccagctcccacctggtctctggggctgcgagcttattcagagggaggcgtgggtggggggctcctttgggtagggtggggtcagtccggctgcggagatcccctgcccctgtcctgtggccggtccgggccagggcggcactgggcgctgagggctggggtccctggcggccggcggggccagcgggtattgattgttggttcttatttatagagcaccgggggtggacgcggcgctttgcaaaaccaaaaagacacagtgctgccgcgacgcgctattgagagggaggagggccagctgcagctgtgttcccgtcatagggagagctgagactccccgcccgccctcctctgccccctcccccgcagacagacagacagacggacgggacagcggcccggcccacgcagagccccggagcaccacggggtcgggggaggagcacccccagcctcccccaggctgcgcctgcccgcccgccggttggccggctggccggtccaccccgtcccggccccgcgcgtgcccccagcgtggggctaacgggcgccttgtctgtgtatttctattttgcagcagtaccatcccactgatatcacgggcccgctcaacctctcagatccctcggtcagcaccgtggtgtgaggcccccggaggcgcccacctgcccagttagcccggccaaggacactgatgggtcctgctgctcgggaaggcctgagggaagcccacccgccccagagactgcccaccctgggcctcccgtccgtccgcccgcccaccccgctgcctggcgggcagcccctgctggaccaaggtgcggaccggagcggctgaggacggggcagagctgagtcggctgggcagggccgcagggcgctccggcagaggcagggccctggggtctctgagcagtggggagcgggggctaactggccccaggcggaggggcttggagcagagacggcagccccatccttcccgcagcaccagcctgagccacagtggggcccatggccccagctggctgggtcgcccctcctcgggcgcctgcgctcctctgcagcctgagctccaccctcccctcttcttgcggcaccgcccacccacaccccgtctgccccttgaccccacacgccggggctggccctgccctcccccacggccgtccctgacttcccagctggcagcgcctcccgccgcctcgggccgcctcctccagactcgagagggctgagcccctcctctcctcgtccggcctgcagcccagaacgggcctccccgggggtccccggacgctggctcgggactgtcttcaaccctgccctgcaccttgggcacgggagagcgccacccgcccgcccccgccctcgctccgggtgcgtgaccggcccgccaccttgtacagaaccagcactcccagggcccgagcgcgtgccttccccgtgcggcccgtgcgcagccgcgctctgcccctccgtccccagggtgcaggcgcgcaccgcccaacccccacctcccggtgtatgcagtggtgatgcctaaaggaatgtcacgcagttttcggtctgtgtcgcttgttgacgccggcagacagtgtaaagggagggcaaaggcatgggggaagcttcgagcgctccaggcggccgcggccgctcaggcttgggcggcagcggcggggctccccgggtccgcgggcgaggcacagccgtgggggtcgggatcggggttcgggtctggcggtctcggcgggcggagggcggcggtgcggaggcggcggcggcgcgcacggcaggcggtgagcccagagcccagcgccaggcaggaagccaggctgacgaggaaggaggccggcccgagcgtgtaaaccacggccaggtcccgcagggcgagcggctgcgcgcaatggctaaaggcggcgtcggaaaaggcagtcagggggctgagcgtcaggcgtcccggccacacgcagagcaccgtctcggcctctgtgggacacagacaaaggcgcggcgtcaggtggcggctgccgcaccgccctgcagaccccgacccgcgtccccagcagctcacctgacgcgggcagcgggtgccggcgcagccaggcgcagagcgggcgcagcgcgcacccgcagccccaagggttgccgcgcaggtgcagcgcgtctagagcgggcaggcggcccagcagccccggcgcgagtgccgccagctcgttgtcctgcaggctgagtgagcgcagcagcgggagcgcgcctagcgccgcgggctccaggcgcgccagccggttgccggccaatgagaggttgcgcagcgcgcgcagcggcgcgaaagtccctggtgccagtgcttccagctggttggcgctcaggtccagcagctgcagcgcgcccaggccccagaaggctcgcacatgcaccgagtgcagcccgttctcgcgcaggtccaggcgctgtagcgcgcccgctcccgcgaaggcacctggcggcagcgcacggacgcggttgtggtccagcagcagcgcgcgcaggcgcaggctcaggcccgggggcacggcgggcagcgagagtgccgagcagctggccaggcctcccggcacgcacgtgcacacctcggggcagtccggggcgcccagggaccccgagggcgaggccgtggccgacacctgggcccagacaggccaaggcgacagcagcagcaacagcagcagcagcggccgaggccgcgaccaggaagggccccgcatgggggcagcccccccgcccccggcacccgcggtgggaggcccgctgcctgtgcgtccctggagcccgtcgtccgcggagcccgttcctgcggcgcctgcacaaatattaactctctggcccgagctcaggcagttcctgtcccacggctggatccacgcttggggcgggggcagggcaaacagccaacgcccggcaccgccagccacctgtccgggagctccaaactactcttggctcagcgccggccacagcgctatcaagaccacctcaccccgccttgtccaccaccgggcgcccgccgagccctgacctgagcag
